(19) United States
(12) Patent Application Publication
(10) Pub. No.: US 2026/0201011 A1
(43) Pub. Date: Jul. 16, 2026

(54) VCAR COMPOSITIONS AND METHODS FOR USE

(71) Applicant: Poseida Therapeutics, Inc., San Diego, CA (US)

(72) Inventors: Eric M. OSTERTAG, San Diego, CA (US); Devon SHEDLOCK, San Diego, CA (US)

(21) Appl. No.: 19/291,465

(22) Filed: Aug. 5, 2025

Related U.S. Application Data
(62) Division of application No. 16/772,262, filed on Dec. 20, 2018, now Pat. No. 12,415,844.
(60) Provisional application No. 62/608,571, filed on Dec. 20, 2017.
(60) Provisional application No. 62/608,894, filed on Dec. 21, 2017.

(51) Int. Cl. C07K 14/725; A61K 40/11; A61K 40/31; A61K 40/42; C07K 14/705; C07K 16/44; C12N 5/0783

(52) U.S. Cl. CPC C07K 14/7051; A61K 40/11; A61K 40/31; A61K 40/4211; A61K 40/4215; C07K 14/70517; C07K 16/44; C12N 5/0636; C07K 2317/24; C07K 2317/565; C07K 2319/03

(57) ABSTRACT

Disclosed are VHH chimeric antigen receptors (VCARs), VCAR transposons encoding VCARs of the disclosure, cells modified to express VCARs of the disclosure, as well as methods of making and methods of using the same for adoptive cell therapy.

### RELATED APPLICATIONS

[0001] This application is a divisional of U.S. patent application Ser. No. 16/772,262, filed Jun. 12, 2020, which is a U.S. National Phase Application, filed under 35 U.S.C. § 371, of International Patent Application No. PCT/US2018/066936, filed Dec. 20, 2018, which claims the benefit of provisional applications U.S. Ser. No. 62/608,571, filed Dec. 20, 2017 and U.S. Ser. No. 62/608,894, filed Dec. 21, 2017, the contents of these applications are herein incorporated by reference in their entireties.

### FIELD OF THE DISCLOSURE

[0002] The disclosure is directed to molecular biology, and more, specifically, to chimeric antigen receptors, and to transposons containing one or more VCARs, as well as methods of making and using the same.

### INCORPORATION-BY-REFERENCE OF SEQUENCE LISTING

[0003] The instant application contains a Sequence Listing, which has been submitted electronically in XML file format, and is herein incorporated by reference into the specification in its entirety. The XML file containing the Sequence Listing XML is named “000218-0100-302-SL.xml,” was created on Aug. 5, 2025, and is 21,970,369 bytes in size.

### BACKGROUND

[0004] There has been a long-felt but unmet need in the art for a method of directing the specificity of an immune cell without using traditional antibody sequences or fragments thereof. The disclosure provides a superior chimeric antigen receptor.

### SUMMARY

[0005] The disclosure provides a chimeric antigen receptor (CAR) comprising: (a) an ectodomain comprising an antigen recognition region, wherein the antigen recognition region comprises at least one single domain antibody; (b) a transmembrane domain, and (c) an endodomain comprising at least one costimulatory domain. In some embodiments, the single domain antibody comprises a human or humanized sequence. In some embodiments, the single domain antibody comprises a non-naturally occurring sequence. In some embodiments, the single domain antibody comprises a recombinant or chimeric sequence. In some embodiments, the single domain antibody comprises a VHH or a sequence encoding a VHH. In some embodiments, the single domain antibody comprises a VH or a sequence encoding a VH. In some embodiments, the single domain antibody comprises a VH of the disclosure or a sequence encoding a VH of the disclosure.

[0006] The disclosure provides a chimeric antigen receptor (CAR) comprising: (a) an ectodomain comprising an antigen recognition region, wherein the antigen recognition region comprises at least one VHH; (b) a transmembrane domain, and (c) an endodomain comprising at least one costimulatory domain. As used throughout the disclosure, a CAR comprising a VHH is referred to as a VCAR. In certain embodiments, the antigen recognition region may comprise two VHHs to produce a bi-specific or tandem VCAR. In certain embodiments, the antigen recognition region may comprise three VHHs to produce a tri-specific VCAR.

[0007] In certain embodiments of the VCARs of the disclosure, the ectodomain may further comprise a signal peptide. Alternatively, or in addition, in certain embodiments, the ectodomain may further comprise a hinge between the antigen recognition region and the transmembrane domain. In certain embodiments, the ectodomain may further comprise a signal peptide. Alternatively, or in addition, in certain embodiments, the ectodomain may further comprise a hinge between the antigen recognition region and the transmembrane domain.

[0008] In certain embodiments of the VCARs of the disclosure, the VHH comprises or consists of the amino acid sequence

(VH-A; SEQ ID NO: 18000)
malpvtalllplalllhaarpevqllesggglvqpggslrlscaa
sgftfssyamnwvrqapgkglewvagiigsggstyyadsvkgrfs
isrdnskntldlqmnslraedtavyycvkdwnttmitergqgtlv
tvsstttpaprpptpaptiasqplslrpeacrpaaggavhtrgld
facdiyiwaplagtcgvlllslvitlyckrgrkkllyifkqpfmr
pvqttqeedgcscrfpeeeeggcelrvkfsrsadapaykqgqnql
ynelnlgrreeydvldkrrgrdpemggkprrknpqeglynelqkd
kmaeayseigmkgenrgkghdglyqglstatkdtydalhmqalp
pr

or the VHH comprises or consists of the nucleic acid sequence

(VH-A; SEQ ID NO: 18001)
atggctctgcctgtgacagctctgctgctgcctctggctctgctt
cttcatgcggcgcgccctgaagttcagctgcttgaatctggcgga
ggcctggttcaacctggcggatctctgagactgagctgtgccgcc
agcggcttcacctttagcagctacgccatgaactgggtccgacag
gcccctggcaaaggactggaatgggtggccggaatcatcggcagc
ggcggcagcacatattacgccgattctgtgaagggccgcttcagc
atcagccgggacaacagcaagaacaccctggacctgcagatgaac
agcctgagagccgaggataccgccgtgtactactgcgtgaaggat
tggaacaccaccatgatcaccgagagaggccagggcacactggtc
accgtgtcctctacaacaacaccggcgcctcggcctccaacacca
gctcctacaatcgcgagtcagcccctgtctctcagacccgaagcc
tgtagacctgctgctggcggagctgtgcataccagaggactggat
ttcgcctgcgacatctacatctgggctcctctggctggcacatgc
ggagttttgctgctgagcctggtcatcaccctgtactgtaagaga
ggcaggaagaagctgctgtatatcttcaagcagcccttcatgaga
cccgtgcagaccacacaggaggaggacggctgctcttgtaggttc
ccagaggaggaggagggaggatgcgagctgcgcgtgaagtttagc
cggtccgccgatgcacctgcatacaagcagggacagaaccagctg
tataacgagctgaatctgggccggagagaggagtacgacgtgctg
gataagaggcggggccgggaccccgagatgggaggcaagcctcgg
agaaagaacccacaggagggcctgtacaatgagctgcaaaaggac
aagatggccgaggcctattctgagatcggcatgaagggagagagg
cgccggggcaagggacacgatggcctgtaccagggcctgagcacc
gccacaaaggacacctatgatgccctgcacatgcaggccctgccc
cctagatga.

[0009] In certain embodiments of the VCARs of the disclosure, the VHH comprises or consists of the amino acid sequence

(VH-B; SEQ ID NO: 18002)
malpvtalllplalllhaarpevqllesggglvqpggsltlscaa
sgftfsnyamnwvrqapgkglewvsgiigsgattyyadsvkgrft
isrdnskntlnlqmnslraedtaiyycvkdwnttmitergqgtlv
tvsstttpaprpptpaptiasqplslrpeacrpaaggavhtrgld
facdiyiwaplagtcgvlllslvitlyckrgrkkllyifkqpfmr
pvqttqeedgcscrfpeeeeggcelrvkfsrsadapaykqgqnql
ynelnlgrreeydvldkirgrdpemggkprrknpqeglynelqkd
kmaeayseigmkgerrrgkghdglyqglstatkdtydalhmqalp
pr

or the VHH comprises or consists of the nucleic acid sequence

(VH-B; SEQ ID NO: 18003)
atggctctgcctgtgacagctctgctgctgcctctggctctgctt
cttcatgcggcgcgccctgaagttcagctgcttgaatctggcgga
ggcctggttcaacctggcggatctctgacactgagctgtgccgcc
agcggcttcaccttcagcaactacgccatgaactgggtccgacag
gcccctggcaaaggccttgaatgggtgtccggcatcattggctct
ggcgccaccacctactacgccgattctgtgaagggcagattcacc
atcagccgggacaacagcaagaacaccctgaacctgcagatgaac
agcctgagagccgaggacaccgccatctactactgcgtgaaggac
tggaacaccaccatgatcaccgagagaggccagggcacactggtc
accgtgtcctctacaacaacaccggcgcctcggcctccaacacca
gctcctacaatcgcgagtcagcccctgtctctcagacccgaagcc
tgtagacctgctgctggcggagctgtgcataccagaggactggat
ttcgcctgcgacatctacatctgggctcctctggctggcacatgc
ggagttttgctgctgagcctggtcatcaccctgtactgtaagaga
ggcaggaagaagctgctgtatatcttcaagcagcccttcatgaga
cccgtgcagaccacacaggaggaggacggctgctcttgtaggttc
ccagaggaggaggagggaggatgcgagctgcgcgtgaagtttagc
cggtccgccgatgcacctgcatacaagcagggacagaaccagctg
tataacgagctgaatctgggccggagagaggagtacgacgtgctg
gataagaggcggggccgggaccccgagatgggaggcaagcctcgg
agaaagaacccacaggagggcctgtacaatgagctgcaaaaggac
aagatggccgaggcctattctgagatcggcatgaagggagagagg
cgccggggcaagggacacgatggcctgtaccagggcctgagcacc
gccacaaaggacacctatgatgccctgcacatgcaggccctgccc
cctagatga.

[0010] In certain embodiments of the VCARs of the disclosure, the VHH comprises or consists of the amino acid sequence

(VH-C; SEQ ID NO: 18004)
malpvtalllplalllhaarpevqllesggglvqpgeslrlscaa
sgftfsnyamnwvrqapgkglewvsgivggggtsyyadsvrgrft
isrdnskntlylqmnslraedtavyycvkdwnttmitergqgtlv
tvsstttpaprpptpaptiasqplslrpeacrpaaggavhtrgld
facdiyiwaplagtcgvlllslvitlyckrgrkkllyifkqpfmr
pvqttqeedgcscrfpeeeeggcelrvkfsrsadapaykqgqnql
ynelnlgrreeydvldkrrgrdpemggkprrknpqeglynelqkd
kmaeayseigmkgerrrgkghdglyqglstatkdtydalhmqalp
pr

or the VHH comprises or consists of the nucleic acid sequence

(VH-C; SEQ ID NO: 18005)
atggctctgcctgtgacagctctgctgctgcctctggctctgct
tcttcatgcggcgcgccctgaagttcagctgcttgaatctggcg
gaggcctggttcagcctggcgaatctctgagactgagctgtgcc
gccagcggcttcaccttcagcaactacgccatgaactgggtccg
acaggcccctggcaaaggccttgaatgggtgtccggaatcgttg
gcggcggaggcacaagctactacgccgattctgtgcggggcaga
ttcaccatcagccgggacaacagcaagaacaccctgtacctgca
gatgaacagcctgagagccgaggacaccgccgtgtactactgcg
tgaaggactggaacaccaccatgatcaccgagagaggccagggc
acactggtcaccgtgtcctctacaacaacaccggcgcctcggcc
tccaacaccagctcctacaatcgcgagtcagcccctgtctctca
gacccgaagcctgtagacctgctgctggcggagctgtgcatacc
agaggactggatttcgcctgcgacatctacatctgggctcctct
ggctggcacatgcggagttttgctgctgagcctggtcatcaccc
tgtactgtaagagaggcaggaagaagctgctgtatatcttcaag
cagcccttcatgagacccgtgcagaccacacaggaggaggacgg
ctgctcttgtaggttcccagaggaggaggagggaggatgcgagc
tgcgcgtgaagtttagccggtccgccgatgcacctgcatacaag
cagggacagaaccagctgtataacgagctgaatctgggccggag
agaggagtacgacgtgctggataagaggcggggccgggaccccg
agatgggaggcaagcctcggagaaagaacccacaggagggcctg
tacaatgagctgcaaaaggacaagatggccgaggcctattctga
gatcggcatgaagggagagaggcgccggggcaagggacacgatg
gcctgtaccagggcctgagcaccgccacaaaggacacctatgat
gccctgcacatgcaggccctgccccctagatga.

[0011] In certain embodiments of the VCARs of the disclosure, the VHH comprises or consists of the amino acid sequence

(VH-D; SEQ ID NO: 18006)
malpvtalllplalllhaarpevqllesggglvqpggslrlsca
asgftfsnyamtwirqapgkglewvsgitgdggstfyadsvkgr
ftisrdnskntlylqmnslraedtavyycvkdwnttmitergqg
tlvtvsstttpaprpptpaptiasqplslrpeacrpaaggavht
rgldfacdiyiwaplagtcgvlllslvitlyckrgrkkllyifk
qpfmrpvqttqeedgcscrfpeeeeggcelrvkfsrsadapayk
qgqnqlynelnlgrreeydvldkrrgrdpemggkprrknpqegl
ynelqkdkmaeayseigmkgerrrgkghdglyqglstatkdtyd
alhmqalppr

or the VHH comprises or consists of the nucleic acid sequence

(VH-D; SEQ ID NO: 18007)
atggctctgcctgtgacagctctgctgctgcctctggctctgcttc
ttcatgcggcgcgccctgaagttcagctgcttgaatctggcggagg
cctggttcaacctggcggatctctgagactgagctgtgccgccagc
ggcttcaccttcagcaattacgccatgacctggatcagacaggccc
ctggcaaaggcctggaatgggtgtccggaattacaggcgacggcgg
cagcaccttttacgccgattctgtgaagggcagattcaccatcagc
cgggacaacagcaagaacaccctgtacctgcagatgaacagcctga
gagccgaggacaccgccgtgtactactgcgtgaaggactggaacac
caccatgatcaccgagagaggccagggcacactggtcaccgtgtcc
tctacaacaacaccggcgcctcggcctccaacaccagctcctacaa
tcgcgagtcagcccctgtctctcagacccgaagcctgtagacctgc
tgctggcggagctgtgcataccagaggactggatttcgcctgcgac
atctacatctgggctcctctggctggcacatgcggagttttgctgc
tgagcctggtcatcaccctgtactgtaagagaggcaggaagaagct
gctgtatatcttcaagcagcccttcatgagacccgtgcagaccaca
caggaggaggacggctgctcttgtaggttcccagaggaggaggagg
gaggatgcgagctgcgcgtgaagtttagccggtccgccgatgcacc
tgcatacaagcagggacagaaccagctgtataacgagctgaatctg
ggccggagagaggagtacgacgtgctggataagaggcggggccggg
accccgagatgggaggcaagcctcggagaaagaacccacaggaggg
cctgtacaatgagctgcaaaaggacaagatggccgaggcctattct
gagatcggcatgaagggagagaggcgccggggcaagggacacgatg
gcctgtaccagggcctgagcaccgccacaaaggacacctatgatgc
cctgcacatgcaggccctgccccctagatga.

[0012] In certain embodiments of the VCARs of the disclosure, the VHH comprises or consists of the amino acid sequence

(VH-E; SEQ ID NO: 18008)
malpvtalllplalllhaarpevqllesggglaqpggslrlscaa
sgftfssyamnwirqapgkglewvsgisgsggstyyadsvkgrft
isrdnskntvylqmnslraedtavyycvkdwnttmitergqgtlv
tvsstttpaprpptpaptiasqplslrpeacrpaaggavhtrgld
facdiyiwaplagtcgvlllslvitlyckrgrkkllyifkqpfmr
pvqttqeedgcscrfpeeeeggcelrvkfsrsadapaykqgqnql
ynelnlgrreeydvldkrrgrdpemggkprrknpqeglynelqkd
kmaeayseigmkgerrrgkghdglyqglstatkdtydalhmqalp
pr

or the VHH comprises or consists of the nucleic acid sequence

(VH-E; SEQ ID NO: 18009)
atggcactgcctgtgacagccctgctgctgcctctggccctgct
gctgcacgcagcacggcccgaggtgcagctgctggagtccggag
gaggcctggcccagcctggcggcagcctgaggctgtcctgcgcc
gcctctggcttcacctttagctcctacgccatgaactggatcag
acaggcccctggcaagggcctggagtgggtgtccggcatctccg
gctctggaggctctacatactatgccgacagcgtgaagggccgg
ttcaccatcagcagagataactccaagaataccgtgtacctcca
gatgaactctctgcgggccgaggacaccgccgtgtactattgcg
tgaaggattggaataccacaatgatcacagagaggggccagggc
accctggtgacagtgtctagcaccacaacccctgcccccagacc
tcccacacccgcccctaccatcgcgagtcagccactgtccctgc
ggcctgaggcctgccggcccgccgccggcggagcagtgcacaca
cggggcctggactttgcctgtgacatctacatatgggcaccact
ggcaggaacctgcggcgtgctgctgctgagcctggtcatcaccc
tgtactgtaagagaggcaggaagaagctgctgtatatcttcaag
cagcccttcatgagacccgtgcagaccacacaggaggaggacgg
ctgctcttgtaggttcccagaggaggaggagggaggatgcgagc
tgcgcgtgaagtttagccggtccgccgatgcacctgcatacaag
cagggacagaaccagctgtataacgagctgaatctgggccggag
agaggagtacgacgtgctggataagaggcggggccgggaccccg
agatgggaggcaagcctcggagaaagaacccacaggagggcctg
tacaatgagctgcaaaaggacaagatggccgaggcctattctga
gatcggcatgaagggagagaggcgccggggcaagggacacgatg
gcctgtaccagggcctgagcaccgccacaaaggacacctatgat
gccctgcacatgcaggccctgccccctagatga.

[0013] In certain embodiments of the VCARs of the disclosure, the VHH comprises or consists of the amino acid sequence

(VH-F; SEQ ID NO: 18010)
malpvtalllplalllhaarpevqllesggglvqpgrslrlsca
asgftftnyamnwvrqapgkglewvsgisggggstyyadsvkgr
ftisrdnskntlylqmnslraedtavyycvkdwnttmitergqg
tlvtvsstttpaprpptpaptiasqplslrpeacrpaaggavht
rgldfacdiyiwaplagtcgvlllslvitlyckrgrkkllyifk
qpfmrpvqttqeedgcscrfpeeeeggcelrvkfsrsadapayk
qgqnqlynelnlgrreeydvldkrrgrdpemggkprrknpqegl
ynelqkdkmaeayseigmkgerrrgkghdglyqglstatkdtyd
alhmqalppr

or the VHH comprises or consists of the nucleic acid sequence

(VH-F; SEQ ID NO: 18011)
atggcactgcctgtgacagccctgctgctgcctctggccctgct
gctgcacgcagcacggcccgaggtgcagctgctggagtctggag
gaggcctggtgcagcccggccggtccctgagactgtcttgcgcc
gccagcggcttcacctttacaaactacgccatgaattgggtgcg
gcaggcccctggcaagggcctggagtgggtgtctggcatcagcg
gaggaggaggcagcacctactatgcagactccgtgaagggcagg
ttcaccatctcccgcgataactctaagaatacactgtacctcca
gatgaacagcctgagggcagaggacaccgccgtgtactattgcg
tgaaggattggaataccacaatgatcacagagaggggacagggc
accctggtgaccgtgagcagcaccacaacccctgcccccagacc
tcccacacccgcccctaccatcgcgagtcagccactgtccctgc
ggcctgaggcctgccggcccgccgccggcggagcagtgcacaca
cggggcctggactttgcctgtgacatctacatatgggcaccact
ggcaggaacctgcggcgtgctgctgctgagcctggtcatcaccc
tgtactgtaagagaggcaggaagaagctgctgtatatcttcaag
cagcccttcatgagacccgtgcagaccacacaggaggaggacgg
ctgctcttgtaggttcccagaggaggaggagggaggatgcgagc
tgcgcgtgaagtttagccggtccgccgatgcacctgcatacaag
cagggacagaaccagctgtataacgagctgaatctgggccggag
agaggagtacgacgtgctggataagaggcggggccgggaccccg
agatgggaggcaagcctcggagaaagaacccacaggagggcctg
tacaatgagctgcaaaaggacaagatggccgaggcctattctga
gatcggcatgaagggagagaggcgccggggcaagggacacgatg
gcctgtaccagggcctgagcaccgccacaaaggacacctatgat
gccctgcacatgcaggccctgccccctagatga.

[0014] The disclosure provides a chimeric antigen receptor (CAR) comprising: (a) an ectodomain comprising an antigen recognition region, wherein the antigen recognition region comprises at least one VH; (b) a transmembrane domain, and (c) an endodomain comprising at least one costimulatory domain. As used throughout the disclosure, a CAR comprising a VH is referred to as a VCAR. In certain embodiments, the antigen recognition region may comprise two VHs to produce a bi-specific or tandem VCAR. In certain embodiments, the antigen recognition region may comprise three VHs to produce a tri-specific VCAR. In certain embodiments, the ectodomain may further comprise a signal peptide. Alternatively, or in addition, in certain embodiments, the ectodomain may further comprise a hinge between the antigen recognition region and the transmembrane domain. In certain embodiments, the ectodomain may further comprise a signal peptide. Alternatively, or in addition, in certain embodiments, the ectodomain may further comprise a hinge between the antigen recognition region and the transmembrane domain.

[0015] In certain embodiments of the VCARs of the disclosure, including those comprising an ectodomain comprising an antigen recognition region, wherein the antigen recognition region comprises at least one VH, the VH comprises a human or a humanized sequence.

[0016] In certain embodiments of the VCARs of the disclosure, including those comprising an ectodomain comprising an antigen recognition region, wherein the antigen recognition region comprises at least one VH, the VH comprises a non-naturally occurring sequence.

[0017] In certain embodiments of the VCARs of the disclosure, including those comprising an ectodomain comprising an antigen recognition region, wherein the antigen recognition region comprises at least one VH, the VH is not naturally occurring.

[0018] In certain embodiments of the VCARs of the disclosure, including those comprising an ectodomain comprising an antigen recognition region, wherein the antigen recognition region comprises at least one VH, the VH comprises a recombinant or chimeric sequence.

[0019] In certain embodiments of the VCARs of the disclosure, including those comprising an ectodomain comprising an antigen recognition region, wherein the antigen recognition region comprises at least one VH, the VH is produced by an in vitro procedure of affinity selection and recombination.

[0020] In certain embodiments of the VCARs of the disclosure, the VH comprises or consists of the amino acid sequence

(VH-A; SEQ ID NO: 18000)
malpvtalllplalllhaarpevqllesggglvqpggslrlsca
asgftfssyamnwvrqapgkglewvagiigsggstyyadsvkgr
fsisrdnskntldlqmnslraedtavyycvkdwnttmitergqg
tlvtvsstttpaprpptpaptiasqplslrpeacrpaaggavht
rgldfacdiyiwaplagtcgvlllslvitlyckrgrkkllyifk
qpfmrpvqttqeedgcscrfpeeeeggcelrvkfsrsadapayk
qgqnqlynelnlgrreeydvldkrrgrdpemggkprrknpqegl
ynelqkdkmaeayseigmkgerrrgkghdglyqglstatkdtyd
alhmqalppr

or the VH comprises or consists of the nucleic acid sequence

(VH-A; SEQ ID NO: 18001)
atggctctgcctgtgacagctctgctgctgcctctggctctgct
tcttcatgcggcgcgccctgaagttcagctgcttgaatctggcg
gaggcctggttcaacctggcggatctctgagactgagctgtgcc
gccagcggcttcacctttagcagctacgccatgaactgggtccg
acaggcccctggcaaaggactggaatgggtggccggaatcatcg
gcagcggcggcagcacatattacgccgattctgtgaagggccgc
ttcagcatcagccgggacaacagcaagaacaccctggacctgca
gatgaacagcctgagagccgaggataccgccgtgtactactgcg
tgaaggattggaacaccaccatgatcaccgagagaggccagggc
acactggtcaccgtgtcctctacaacaacaccggcgcctcggcc
tccaacaccagctcctacaatcgcgagtcagcccctgtctctca
gacccgaagcctgtagacctgctgctggcggagctgtgcatacc
agaggactggatttcgcctgcgacatctacatctgggctcctct
ggctggcacatgcggagttttgctgctgagcctggtcatcaccc
tgtactgtaagagaggcaggaagaagctgctgtatatcttcaag
cagcccttcatgagacccgtgcagaccacacaggaggaggacgg
ctgctcttgtaggttcccagaggaggaggagggaggatgcgagc
tgcgcgtgaagtttagccggtccgccgatgcacctgcatacaag
cagggacagaaccagctgtataacgagctgaatctgggccggag
agaggagtacgacgtgctggataagaggcggggccgggaccccg
agatgggaggcaagcctcggagaaagaacccacaggagggcctg
tacaatgagctgcaaaaggacaagatggccgaggcctattctga
gatcggcatgaagggagagaggcgccggggcaagggacacgatg
gcctgtaccagggcctgagcaccgccacaaaggacacctatgat
gccctgcacatgcaggccctgccccctagatga.

[0021] In certain embodiments of the VCARs of the disclosure, the VH comprises or consists of the amino acid sequence

(VH-B; SEQ ID NO: 18002)
malpvtalllplalllhaarpevqllesggglvqpggsltlsca
asgtttsnyamnwvrqapgkglewvsgngsgattyyadsvkgrt
tisrdnskntlnlqmnslraedtaiyycvkdwnttmitergqgt
lvtvsstttpaprpptpaptiasqplslrpeacrpaaggavhtr
gldfacdiyiwaplagtcgvlllslvitlyckrgrkkllyifkq
pfmrpvqttqeedgcscrfpeeeeggcelrvkfsrsadapaykq
gqnqlynelnlgrreeydvldkrrgrdpemggkprrknpqegly
nelqkdkmaeayseigmkgerrrgkghdglyqglstatkdtyda
lhmqalppr

or the VH comprises or consists of the nucleic acid sequence

(VH-B; SEQ ID NO: 18003)
atggctctgcctgtgacagctctgctgctgcctctggctctgct
tcttcatgcggcgcgccctgaagttcagctgcttgaatctggcg
gaggcctggttcaacctggcggatctctgacactgagctgtgcc
gccagcggcttcaccttcagcaactacgccatgaactgggtccg
acaggcccctggcaaaggccttgaatgggtgtccggcatcattg
gctctggcgccaccacctactacgccgattctgtgaagggcaga
ttcaccatcagccgggacaacagcaagaacaccctgaacctgca
gatgaacagcctgagagccgaggacaccgccatctactactgcg
tgaaggactggaacaccaccatgatcaccgagagaggccagggc
acactggtcaccgtgtcctctacaacaacaccggcgcctcggcc
tccaacaccagctcctacaatcgcgagtcagcccctgtctctca
gacccgaagcctgtagacctgctgctggcggagctgtgcatacc
agaggactggatttcgcctgcgacatctacatctgggctcctct
ggctggcacatgcggagttttgctgctgagcctggtcatcaccc
tgtactgtaagagaggcaggaagaagctgctgtatatcttcaag
cagcccttcatgagacccgtgcagaccacacaggaggaggacgg
ctgctcttgtaggttcccagaggaggaggagggaggatgcgagc
tgcgcgtgaagtttagccggtccgccgatgcacctgcatacaag
cagggacagaaccagctgtataacgagctgaatctgggccggag
agaggagtacgacgtgctggataagaggcggggccgggaccccg
agatgggaggcaagcctcggagaaagaacccacaggagggcctg
tacaatgagctgcaaaaggacaagatggccgaggcctattctga
gatcggcatgaagggagagaggcgccggggcaagggacacgatg
gcctgtaccagggcctgagcaccgccacaaaggacacctatgat
gccctgcacatgcaggccctgccccctagatga.

[0022] In certain embodiments of the VCARs of the disclosure, the VH comprises or consists of the amino acid sequence

(VH-C; SEQ ID NO: 18004)
malpvtalllplalllhaarpevqllesggglvqpgeslrlsca
asgftfsnyamnwvrqapgkglewvsgivggggtsyyadsvrgr
ftisrdnskntlylqmnslraedtavyycvkdwnttmitergqg
tlvtvsstttpaprpptpaptiasqplslrpeacrpaaggavht
rgldfacdiyiwaplagtcgvlllslvitlyckrgrkkllyifk
qpfmrpvqttqeedgcscrfpeeeeggcelrvkfsrsadapayk
qgqnqlynelnlgrreeydvldkrrgrdpemggkprrknpqegl
ynelqkdkmaeayseigmkgerrrgkghdglyqglstatkdtyd
alhmqalppr

or the VH comprises or consists of the nucleic acid sequence

(VH-C; SEQ ID NO: 18005)
atggctctgcctgtgacagctctgctgctgcctctggctctgct
tcttcatgcggcgcgccctgaagttcagctgcttgaatctggcg
gaggcctggttcagcctggcgaatctctgagactgagctgtgcc
gccagcggcttcaccttcagcaactacgccatgaactgggtccg
acaggcccctggcaaaggccttgaatgggtgtccggaatcgttg
gcggcggaggcacaagctactacgccgattctgtgcggggcaga
ttcaccatcagccgggacaacagcaagaacaccctgtacctgca
gatgaacagcctgagagccgaggacaccgccgtgtactactgcg
tgaaggactggaacaccaccatgatcaccgagagaggccagggc
acactggtcaccgtgtcctctacaacaacaccggcgcctcggcc
tccaacaccagctcctacaatcgcgagtcagcccctgtctctca
gacccgaagcctgtagacctgctgctggcggagctgtgcatacc
agaggactggatttcgcctgcgacatctacatctgggctcctct
ggctggcacatgcggagttttgctgctgagcctggtcatcaccc
tgtactgtaagagaggcaggaagaagctgctgtatatcttcaag
cagcccttcatgagacccgtgcagaccacacaggaggaggacgg
ctgctcttgtaggttcccagaggaggaggagggaggatgcgagc
tgcgcgtgaagtttagccggtccgccgatgcacctgcatacaag
cagggacagaaccagctgtataacgagctgaatctgggccggag
agaggagtacgacgtgctggataagaggcggggccgggaccccg
agatgggaggcaagcctcggagaaagaacccacaggagggcctg
tacaatgagctgcaaaaggacaagatggccgaggcctattctga
gatcggcatgaagggagagaggcgccggggcaagggacacgatg
gcctgtaccagggcctgagcaccgccacaaaggacacctatgat
gccctgcacatgcaggccctgccccctagatga.

[0023] In certain embodiments of the VCARs of the disclosure, the VH comprises or consists of the amino acid sequence

(VH-D; SEQ ID NO: 18006)
malpvtalllplalllhaarpevqllesggglvqpggslrlsca
asgftfsnyamtwirqapgkglewvsgitgdggstfyadsvkgr
ftisrdnskntlylqmnslraedtavyycvkdwnttmitergqg
tlvtvsstttpaprpptpaptiasqplslrpeacrpaaggavht
rgldfacdiyiwaplagtcgvlllslvitlyckrgrkkllyifk
qpfmrpvqttqeedgcscrfpeeeeggcelrvkfsrsadapayk
qgqnqlynelnlgrreeydvldkrrgrdpemggkprrknpqegl
ynelqkdkmaeayseigmkgerrrgkghdglyqglstatkdtyd
alhmqalppr

or the VH comprises or consists of the nucleic acid sequence

(VH-D; SEQ ID NO: 18007)
atggctctgcctgtgacagctctgctgctgcctctggctctgc
ttcttcatgcggcgcgccctgaagttcagctgcttgaatctgg
cggaggcctggttcaacctggcggatctctgagactgagctgt
gccgccagcggcttcaccttcagcaattacgccatgacctgga
tcagacaggcccctggcaaaggcctggaatgggtgtccggaat
tacaggcgacggcggcagcaccttttacgccgattctgtgaag
ggcagattcaccatcagccgggacaacagcaagaacaccctgt
acctgcagatgaacagcctgagagccgaggacaccgccgtgta
ctactgcgtgaaggactggaacaccaccatgatcaccgagaga
ggccagggcacactggtcaccgtgtcctctacaacaacaccgg
cgcctcggcctccaacaccagctcctacaatcgcgagtcagcc
cctgtctctcagacccgaagcctgtagacctgctgctggcgga
gctgtgcataccagaggactggatttcgcctgcgacatctaca
tctgggctcctctggctggcacatgcggagttttgctgctgag
cctggtcatcaccctgtactgtaagagaggcaggaagaagctg
ctgtatatcttcaagcagcccttcatgagacccgtgcagacca
cacaggaggaggacggctgctcttgtaggttcccagaggagga
ggagggaggatgcgagctgcgcgtgaagtttagccggtccgcc
gatgcacctgcatacaagcagggacagaaccagctgtataacg
agctgaatctgggccggagagaggagtacgacgtgctggataa
gaggcggggccgggaccccgagatgggaggcaagcctcggaga
aagaacccacaggagggcctgtacaatgagctgcaaaaggaca
agatggccgaggcctattctgagatcggcatgaagggagagag
gcgccggggcaagggacacgatggcctgtaccagggcctgagc
accgccacaaaggacacctatgatgccctgcacatgcaggccc
tgccccctagatga.

[0024] In certain embodiments of the VCARs of the disclosure, the VH comprises or consists of the amino acid sequence

(VH-E; SEQ ID NO: 18008)
malpvtalllplalllhaarpevqllesggglaqpggslrlscaasgftf
ssyamnwirqapgkglewvsgisgsggstyyadsvkgrftisrdnskntv
ylqmnslraedtavyycvkdwnttmitergqgtlvtvsstttpaprpptp
aptiasqplslrpeacrpaaggavhtrgldfacdiyiwaplagtcgvlll
slvitlyckrgrkkllyifkqpfmrpvqttqeedgccrfpeeeeggcelr
vkfsrsadapaykqgqnqlynelnlgrreeydvldkrrgrdpemggkprr
knpqeglynelqkdkmaeayseigmkgerrrgkghdglyqglstatkdty
dalhmqalppr

or the VH comprises or consists of the nucleic acid sequence

(VH-E; SEQ ID NO: 18009)
atggcactgcctgtgacagccctgctgctgcctctggccctg
ctgctgcacgcagcacggcccgaggtgcagctgctggagtcc
ggaggaggcctggcccagcctggcggcagcctgaggctgtcc
tgcgccgcctctggcttcacctttagctcctacgccatgaac
tggatcagacaggcccctggcaagggcctggagtgggtgtcc
ggcatctccggctctggaggctctacatactatgccgacagc
gtgaagggccggttcaccatcagcagagataactccaagaat
accgtgtacctccagatgaactctctgcgggccgaggacacc
gccgtgtactattgcgtgaaggattggaataccacaatgatc
acagagaggggccagggcaccctggtgacagtgtctagcacc
acaacccctgcccccagacctcccacacccgcccctaccatc
gcgagtcagccactgtccctgcggcctgaggcctgccggccc
gccgccggcggagcagtgcacacacggggcctggactttgcc
tgtgacatctacatatgggcaccactggcaggaacctgcggc
gtgctgctgctgagcctggtcatcaccctgtactgtaagaga
ggcaggaagaagctgctgtatatcttcaagcagcccttcatg
agacccgtgcagaccacacaggaggaggacggctgctcttgt
aggttcccagaggaggaggagggaggatgcgagctgcgcgtg
aagtttagccggtccgccgatgcacctgcatacaagcaggga
cagaaccagctgtataacgagctgaatctgggccggagagag
gagtacgacgtgctggataagaggcggggccgggaccccgag
atgggaggcaagcctcggagaaagaacccacaggagggcctg
tacaatgagctgcaaaaggacaagatggccgaggcctattct
gagatcggcatgaagggagagaggcgccggggcaagggacac
gatggcctgtaccagggcctgagcaccgccacaaaggacacc
tatgatgccctgcacatgcaggccctgccccctagatga.

[0025] In certain embodiments of the VCARs of the disclosure, the VH comprises or consists of the amino acid sequence

(VH-F; SEQ ID NO: 18010)
malpvtalllplalllhaarpevqllesggglvqpgrslrlscaasgftf
tnyamnwvrqapgkglewvsgisggggstyyadsvkgrftisrdnskntl
ylqmnslraedtavyycvkdwnttmitergqgtlvtvsstttpaprpptp
aptiasqplslrpeacrpaaggavhtrgldfacdiyiwaplagtcgvlll
slvitlyckrgrkkllyifkqpfmrpvqttqeedgcscrfpeeeeggcel
rvkfsrsadapaykqgqnqlynelnlgrreeydvldkrrgrdpemggkpr
rknpqeglynelqkdkmaeayseigmkgerrrgkghdglyqglstatkdt
ydalhmqalppr

or the VH comprises or consists of the nucleic acid sequence

(VH-F; SEQ ID NO: 18011)
atggcactgcctgtgacagccctgctgctgcctctggccctgctgctgca
cgcagcacggcccgaggtgcagctgctggagtctggaggaggcctggtgc
agcccggccggtccctgagactgtcttgcgccgccagcggcttcaccttt
acaaactacgccatgaattgggtgcggcaggcccctggcaagggcctgga
gtgggtgtctggcatcagcggaggaggaggcagcacctactatgcagact
ccgtgaagggcaggttcaccatctcccgcgataactctaagaatacactg
tacctccagatgaacagcctgagggcagaggacaccgccgtgtactattg
cgtgaaggattggaataccacaatgatcacagagaggggacagggcaccc
tggtgaccgtgagcagcaccacaacccctgcccccagacctcccacaccc
gcccctaccatcgcgagtcagccactgtccctgcggcctgaggcctgccg
gcccgccgccggcggagcagtgcacacacggggcctggactttgcctgtg
acatctacatatgggcaccactggcaggaacctgcggcgtgctgctgctg
agcctggtcatcaccctgtactgtaagagaggcaggaagaagctgctgta
tatcttcaagcagcccttcatgagacccgtgcagaccacacaggaggagg
acggctgctcttgtaggttcccagaggaggaggagggaggatgcgagctg
cgcgtgaagtttagccggtccgccgatgcacctgcatacaagcagggaca
gaaccagctgtataacgagctgaatctgggccggagagaggagtacgacg
tgctggataagaggcggggccgggaccccgagatgggaggcaagcctcgg
agaaagaacccacaggagggcctgtacaatgagctgcaaaaggacaagat
ggccgaggcctattctgagatcggcatgaagggagagaggcgccggggca
agggacacgatggcctgtaccagggcctgagcaccgccacaaaggacacc
tatgatgccctgcacatgcaggccctgccccctagatga.

[0026] In certain embodiments of the VCARs of the disclosure, the VCAR comprises a single domain antibody, VHH, VH or a combination thereof. In some embodiments, the single domain antibody, VHH or VH comprises or consists of a recombinant sequence and/or a chimeric sequence. In some embodiments, the single domain antibody, VHH or VH comprises or consists of a human sequence and/or a humanized sequence.

[0027] In certain embodiments of the VCARs of the disclosure, the VCAR comprises a single domain antibody. In some embodiments, the single domain antibody is a VHH or a VH antibody. In some embodiments, the VH antibody is a UniDab antibody. In some embodiments, VH antibody is not a fragment of a naturally occurring monoclonal antibody.

[0028] In certain embodiments of the VCARs of the disclosure, the signal peptide may comprise a sequence encoding a human CD2, CD3δ, CD3ε, CD3γ, CD3ξ, CD4, CD8α, CD19, CD28, 4-1BB or GM-CSFR signal peptide. In certain embodiments of the VCARs of the disclosure, the signal peptide may comprise a sequence encoding a human CD8a signal peptide. The human CD8a signal peptide may comprise an amino acid sequence comprising MALPVTALLLPLALLLHAARP (SEQ ID NO: 18012). The human CD8a signal peptide may comprise an amino acid sequence comprising MALPVTALLLPLALLLHAARP (SEQ ID NO: 18012) or a sequence having at least 70%, 80%, 90%, 95%, or 99% identity to the an amino acid sequence comprising MALPVTALLLPLALLLHAARP (SEQ ID NO: 18012). The human CD8a signal peptide may be encoded by a nucleic acid sequence comprising atggcactgccagtcaccgccctgctgctgcctctggctctgctgctgcacgcagctagacca (SEQ ID NO: 18013).

[0029] In certain embodiments of the VCARs of the disclosure, the transmembrane domain may comprise a sequence encoding a human CD2, CD3δ, CD3F, CD3γ, CD3ξ, CD4, CD8α, CD19, CD28, 4-1BB or GM-CSFR transmembrane domain. In certain embodiments of the VCARs of the disclosure, the transmembrane domain may comprise a sequence encoding a human CD8a transmembrane domain. The CD8a transmembrane domain may comprise an amino acid sequence comprising IYIWAPLAGTCGVLLLSLVITLYC (SEQ ID NO: 18014) or a sequence having at least 70%, 80%, 90%, 95%, or 99% identity to the amino acid sequence comprising IYIWAPLAGTCGVLLLSLVITLYC (SEQ ID NO: 18014). The CD8a transmembrane domain may be encoded by the nucleic acid sequence comprising atctacatttgggcaccactggccgggacctgtggagtgctgctgctgagcctggtcatcacactgtactgc (SEQ ID NO: 18015).

[0030] In certain embodiments of the VCARs of the disclosure, the endodomain may comprise a human CD3ξ endodomain.

[0031] In certain embodiments of the VCARs of the disclosure, the at least one costimulatory domain may comprise a human 4-1BB, CD28, CD40, ICOS, MyD88, OX-40 intracellular segment, or any combination thereof. In certain embodiments of the VCARs of the disclosure, the at least one costimulatory domain may comprise a CD28 and/or a 4-1BB costimulatory domain. The CD3zeta costimulatory domain may comprise an amino acid sequence comprising RVKFSRSADAPAYKQGQNQLYNELNLGRREEYDVLDKRRGRDPEMGGKPRRKNPQEGL YNELQKDKMAEAYSEIGMKGERRRGKGHDGLYQGLSTATKDTYDALHMQALPPR (SEQ ID NO: 18016) or a sequence having at least 70%, 80%, 90%, 95%, or 99% identity to the amino acid sequence comprising RVKFSRSADAPAYKQGQNQLYNELNLGRREEYDVLDKRRGRDPEMGGKPRRKNPQEGL YNELQKDKMAEAYSEIGMKGERRRGKGHDGLYQGLSTATKDTYDALHMQALPPR (SEQ ID NO: 18016). The CD3zeta costimulatory domain may be encoded by the nucleic acid sequence comprising cgcgtgaagtttagtcgatcagcagatgccccagcttacaaacagggacagaaccagctgtataacgagctgaatctgggccgccgagag gaatatgacgtgctggataagcggagaggacgcgaccccgaaatgggaggcaagcccaggcgcaaaaaccctcaggaaggcctgtat aacgagctgcagaaggacaaaatggcagaagcctattctgagatcggcatgaagggggagcgacggagaggcaaagggcacgatgg gctgtaccagggactgagcaccgccacaaaggacacctatgatgctctgcatatgcaggcactgcctccaagg (SEQ ID NO: 18017). The 4-1BB costimulatory domain may comprise an amino acid sequence comprising KRGRKKLLYIFKQPFMRPVQTTQEEDGCSCRFPEEEEGGCEL (SEQ ID NO: 18018) or a sequence having at least 70%, 80%, 90%, 95%, or 99% identity to the amino acid sequence comprising KRGRKKLLYIFKQPFMRPVQTTQEEDGCSCRFPEEEEGGCEL (SEQ ID NO: 18018). The 4-1BB costimulatory domain may be encoded by the nucleic acid sequence comprising aagagaggcaggaagaaactgctgtatattttcaaacagcccttcatgcgccccgtgcagactacccaggaggaagacgggtgctcctgtc gattccctgaggaagaggaaggcgggtgtgagctg (SEQ ID NO: 18019). The 4-1BB costimulatory domain may be located between the transmembrane domain and the CD28 costimulatory domain.

[0032] In certain embodiments of the VCARs of the disclosure, the hinge may comprise a sequence derived from a human CD8α, IgG4, and/or CD4 sequence. In certain embodiments of the VCARs of the disclosure, the hinge may comprise a sequence derived from a human CD8a sequence. The hinge may comprise a human CD8a amino acid sequence comprising TTTPAPRPPTPAPTIASQPLSLRPEACRPAAGGAVHTRGLDFACD (SEQ ID NO: 18020) or a sequence having at least 70%, 80%, 90%, 95%, or 99% identity to the amino acid sequence comprising TTTPAPRPPTPAPTIASQPLSLRPEACRPAAGGAVHTRGLDFACD (SEQ ID NO: 18020). The human CD8a hinge amino acid sequence may be encoded by the nucleic acid sequence comprising

(SEQ ID NO: 18021)
actaccacaccagcacctagaccaccaactccagctccaaccatcgcgag
tcagcccctgagtctgagacctgaggcctgcaggccagctgcaggaggag
ctgtgcacaccaggggcctggacttcgcctgcgac.

[0033] VHHs and/or VCARs of the disclosure may bind an antigen with at least one affinity selected from a K_{D} of less than or equal to 10⁻⁹M, less than or equal to 10⁻¹⁰M, less than or equal to 10⁻¹¹M, less than or equal to 10⁻¹²M, less than or equal to 10⁻¹³M, less than or equal to 10⁻¹⁴M, and less than or equal to 10⁻¹⁵M. The K_{D} may be determined by surface plasmon resonance.

[0034] The disclosure provides an anti-BCMA VCAR. The disclosure provides a composition comprising the VCAR of the disclosure and at least one pharmaceutically acceptable carrier.

[0035] The disclosure provides a transposon comprising the VCAR of the disclosure.

[0036] Transposons of the disclosure may comprise a selection gene for identification, enrichment and/or isolation of cells that express the transposon. Exemplary selection genes encode any gene product (e.g., transcript, protein, enzyme) essential for cell viability and survival. Exemplary selection genes encode any gene product (e.g., transcript, protein, enzyme) essential for conferring resistance to a drug challenge against which the cell is sensitive (or which could be lethal to the cell) in the absence of the gene product encoded by the selection gene. Exemplary selection genes encode any gene product (e.g., transcript, protein, enzyme) essential for viability and/or survival in a cell media lacking one or more nutrients essential for cell viability and/or survival in the absence of the selection gene. Exemplary selection genes include, but are not limited to, neo (conferring resistance to neomycin), DHFR (encoding Dihydrofolate Reductase and conferring resistance to Methotrexate), TYMS (encoding Thymidylate Synthetase), MGMT (encoding O(6)-methylguanine-DNA methyltransferase), multidrug resistance gene (MDR1), ALDH1 (encoding Aldehyde dehydrogenase 1 family, member A1), FRANCF, RAD51C (encoding RAD51 Paralog C), GCS (encoding glucosylceramide synthase), and NKX2.2 (encoding NK2 Homeobox 2).

[0037] Transposons of the disclosure may comprise an inducible proapoptotic polypeptide comprising (a) a ligand binding region, (b) a linker, and (c) a proapoptotic polypeptide, wherein the inducible proapoptotic polypeptide does not comprise a non-human sequence. In certain embodiments, the non-human sequence comprises a restriction site. In certain embodiments, the ligand binding region may be a multimeric ligand binding region. Inducible proapoptotic polypeptides of the disclosure may also be referred to as an “iC9 safety switch”. In certain embodiments, transposons of the disclosure may comprise an inducible caspase polypeptide comprising (a) a ligand binding region, (b) a linker, and (c) a caspase polypeptide, wherein the inducible proapoptotic polypeptide does not comprise a non-human sequence. In certain embodiments, transposons of the disclosure may comprise an inducible caspase polypeptide comprising (a) a ligand binding region, (b) a linker, and (c) a caspase polypeptide, wherein the inducible proapoptotic polypeptide does not comprise a non-human sequence. In certain embodiments, transposons of the disclosure may comprise an inducible caspase polypeptide comprising (a) a ligand-binding region, (b) a linker, and (c) a truncated caspase 9 polypeptide, wherein the inducible proapoptotic polypeptide does not comprise a non-human sequence. In certain embodiments of the inducible proapoptotic polypeptides, inducible caspase polypeptides or truncated caspase 9 polypeptides of the disclosure, the ligand binding region may comprise a FK506 binding protein 12 (FKBP12) polypeptide. In certain embodiments, the amino acid sequence of the ligand binding region that comprise a FK506 binding protein 12 (FKBP12) polypeptide may comprise a modification at position 36 of the sequence. The modification may be a substitution of valine (V) for phenylalanine (F) at position 36 (F36V). In certain embodiments, the FKBP12 polypeptide is encoded by an amino acid sequence comprising GVQVETISPGDGRTFPKRGQTCVVHYTGMLEDGKKVDSSRDRNKPFKFMLGKQEVIRG WEEGVAQMSVGQRAKLTISPDYAYGATGHPGIIPPHATLVFDVELLKLE (SEQ ID NO: 18022). In certain embodiments, the FKBP12 polypeptide is encoded by a nucleic acid sequence comprising GGGGTCCAGGTCGAGACTATTTCACCAGGGGATGGGCGAACATTTCCAAAAAGGGG CCAGACTTGCGTCGTGCATTACACCGGGATGCTGGAGGACGGGAAGAAAGTGGACA GCTCCAGGGATCGCAACAAGCCCTTCAAGTTCATGCTGGGAAAGCAGGAAGTGATC CGAGGATGGGAGGAAGGCGTGGCACAGATGTCAGTCGGCCAGCGGGCCAAACTGA CCATTAGCCCTGACTACGCTTATGGAGCAACAGGCCACCCAGGGATCATTCCCCCTC ATGCCACCCTGGTCTTCGAT GTGGAACTGCTGAAGCTGGAG (SEQ ID NO: 18023). In certain embodiments, the induction agent specific for the ligand binding region may comprise a FK506 binding protein 12 (FKBP12) polypeptide having a substitution of valine (V) for phenylalanine (F) at position 36 (F36V) comprises AP20187 and/or AP1903, both synthetic drugs.

[0038] In certain embodiments of the inducible proapoptotic polypeptides, inducible caspase polypeptides or truncated caspase 9 polypeptides of the disclosure, the linker region is encoded by an amino acid comprising GGGGS (SEQ ID NO: 18024) or a nucleic acid sequence comprising GGAGGAGGAGGATCC (SEQ ID NO: 18025). In certain embodiments, the nucleic acid sequence encoding the linker does not comprise a restriction site.

[0039] In certain embodiments of the truncated caspase 9 polypeptides of the disclosure, the truncated caspase 9 polypeptide is encoded by an amino acid sequence that does not comprise an arginine (R) at position 87 of the sequence. Alternatively, or in addition, in certain embodiments of the inducible proapoptotic polypeptides, inducible caspase polypeptides or truncated caspase 9 polypeptides of the disclosure, the truncated caspase 9 polypeptide is encoded by an amino acid sequence that does not comprise an alanine (A) at position 282 the sequence. In certain embodiments of the inducible proapoptotic polypeptides, inducible caspase polypeptides or truncated caspase 9 polypeptides of the disclosure, the truncated caspase 9 polypeptide is encoded by an amino acid comprising GFGDVGALESLRGNADLAYILSMEPCGHCLIINNVNFCRESGLRTRTGSNIDCEKLRRRF SSLHFMVEVKGDLTAKKMVLALLELAQQDHGALDCCVVVILSHGCQASHLQFPGAVY GTDGCPVSVEKIVNIFNGTSCPSLGGKPKLFFIQACGGEQKDHGFEVASTSPEDESPGSNP EPDATPFQEGLRTFDQLDAISSLPTPSDIFVSYSTFPGFVSWRDPKSGSWYVETLDDIFEQ WAHSEDLQSLLLRVANAVSVKGIYKQMPGCFNFLRKKLFFKTS (SEQ ID NO: 18026) or a nucleic acid sequence comprising

(SEQ ID NO: 18027)
TTTGGGGACGTGGGGGCCCTGGAGTCTCTGCGAGGAAATGCCGATCTGGC
TTACATCCTGAGCATGGAACCCTGCGGCCACTGTCTGATCATTAACAATG
TGAACTTCTGCAGAGAAAGCGGACTGCGAACACGGACTGGCTCCAATATT
GACTGTGAGAAGCTGCGGAGAAGGTTCTCTAGTCTGCACTTTATGGTCGA
AGTGAAAGGGGATCTGACCGCCAAGAAAATGGTGCTGGCCCTGCTGGAGC
TGGCTCAGCAGGACCATGGAGCTCTGGATTGCTGCGTGGTCGTGATCCTG
TCCCACGGGTGCCAGGCTTCTCATCTGCAGTTCCCCGGAGCAGTGTACGG
AACAGACGGCTGTCCTGTCAGCGTGGAGAAGATCGTCAACATCTTCAACG
GCACTTCTTGCCCTAGTCTGGGGGGAAAGCCAAAACTGTTCTTTATCCAG
GCCTGTGGCGGGGAACAGAAAGATCACGGCTTCGAGGTGGCCAGCACCAG
CCCTGAGGACGAATCACCAGGGAGCAACCCTGAACCAGATGCAACTCCAT
TCCAGGAGGGACTGAGGACCTTTGACCAGCTGGATGCTATCTCAAGCCTG
CCCACTCCTAGTGACATTTTCGTGTCTTACAGTACCTTCCCAGGCTTTGT
CTCATGGCGCGATCCCAAGTCAGGGAGCTGGTACGTGGAGACACTGGACG
ACATCTTTGAACAGTGGGCCCATTCAGAGGACCTGCAGAGCCTGCTGCTG
CGAGTGGCAAACGCTGTCTCTGTGAAGGGCATCTACAAACAGATGCCCGG
GTGCTTCAATTTTCTGAGAAAGAAACTGTTCTTTAAGACTTCC.

[0040] In certain embodiments of the inducible proapoptotic polypeptides, wherein the polypeptide comprises a truncated caspase 9 polypeptide, the inducible proapoptotic polypeptide is encoded by an amino acid sequence comprising GVQVETISPGDGRTFPKRGQTCVVHYTGMLEDGKKVDSSRDRNKPFKFMLGKQEVIRG WEEGVAQMSVGQRAKLTISPDYAYGATGHPGIIPPHATLVFDVELLKLEGGGGSGFGDV GALESLRGNADLAYILSMEPCGHCLIINNVNFCRESGLRTRTGSNIDCEKLRRRFSSLHF MVEVKGDLTAKKMVLALLELAQQDHGALDCCVVVILSHGCQASHLQFPGAVYGTDGC PVSVEKIVNIFNGTSCPSLGGKPKLFFIQACGGEQKDHGFEVASTSPEDESPGSNPEPDAT PFQEGLRTFDQLDAISSLPTPSDIFVSYSTFPGFVSWRDPKSGSWYVETLDDIFEQWAHSE DLQSLLLRVANAVSVKGIYKQMPGCFNFLRKKLFFKTS (SEQ ID NO: 18028) or the nucleic acid sequence comprising

(SEQ ID NO: 18029)
ggggtccaggtcgagactatttcaccaggggatgggcgaacatttccaaa
aaggggccagacttgcgtcgtgcattacaccgggatgctggaggacggga
agaaagtggacagctccagggatcgcaacaagcccttcaagttcatgctg
ggaaagcaggaagtgatccgaggatgggaggaaggcgtggcacagatgtc
agtcggccagcgggccaaactgaccattagccctgactacgcttatggag
caacaggccacccagggatcattccccctcatgccaccctggtcttcgat
gtggaactgctgaagctggagggaggaggaggatccggatttggggacgt
gggggccctggagtctctgcgaggaaatgccgatctggcttacatcctga
gcatggaaccctgcggccactgtctgatcattaacaatgtgaacttctgc
agagaaagcggactgcgaacacggactggctccaatattgactgtgagaa
gctgcggagaaggttctctagtctgcactttatggtcgaagtgaaagggg
atctgaccgccaagaaaatggtgctggccctgctggagctggctcagcag
gaccatggagctctggattgctgcgtggtcgtgatcctgtcccacgggtg
ccaggcttctcatctgcagttccccggagcagtgtacggaacagacggct
gtcctgtcagcgtggagaagatcgtcaacatcttcaacggcacttcttgc
cctagtctggggggaaagccaaaactgttctttatccaggcctgtggcgg
ggaacagaaagatcacggcttcgaggtggccagcaccagccctgaggacg
aatcaccagggagcaaccctgaaccagatgcaactccattccaggaggga
ctgaggacctttgaccagctggatgctatctcaagcctgcccactcctag
tgacattttcgtgtcttacagtaccttcccaggctttgtctcatggcgcg
atcccaagtcagggagctggtacgtggagacactggacgacatctttgaa
cagtgggcccattcagaggacctgcagagcctgctgctgcgagtggcaaa
cgctgtctctgtgaagggcatctacaaacagatgcccgggtgcttcaatt
ttctgagaaagaaactgttctttaagacttcc.

[0041] Transposons of the disclosure may comprise at least one self-cleaving peptide(s) located, for example, between one or more VHH(s) or VCAR(s) of the disclosure and a selection gene of the disclosure. Transposons of the disclosure may comprise at least one self-cleaving peptide(s) located, for example, between one or more VHH(s) or VCAR(s) of the disclosure and an inducible proapoptotic polypeptide of the disclosure. Transposons of the disclosure may comprise at least two self-cleaving peptide(s), a first self-cleaving peptide located, for example, upstream or immediately upstream of an inducible proapoptotic polypeptide of the disclosure and a second first self-cleaving peptide located, for example, downstream or immediately upstream of an inducible proapoptotic polypeptide of the disclosure.

[0042] The at least one self-cleaving peptide may comprise, for example, a T2A peptide, GSG-T2A peptide, an E2A peptide, a GSG-E2A peptide, an F2A peptide, a GSG-F2A peptide, a P2A peptide, or a GSG-P2A peptide. A T2A peptide may comprise an amino acid sequence comprising EGRGSLLTCGDVEENPGP (SEQ ID NO: 18030) or a sequence having at least 70%, 80%, 90%, 95%, or 99% identity to the amino acid sequence comprising EGRGSLLTCGDVEENPGP (SEQ ID NO: 18030). A GSG-T2A peptide may comprise an amino acid sequence comprising GSGEGRGSLLTCGDVEENPGP (SEQ ID NO: 18031) or a sequence having at least 70%, 80%, 90%, 95%, or 99% identity to the amino acid sequence comprising GSGEGRGSLLTCGDVEENPGP (SEQ ID NO: 18031). A GSG-T2A peptide may comprise a nucleic acid sequence comprising ggatctggagagggaaggggaagcctgctgacctgtggagacgtggaggaaaacccaggacca (SEQ ID NO: 18032). An E2A peptide may comprise an amino acid sequence comprising QCTNYALLKLAGDVESNPGP (SEQ ID NO: 18033) or a sequence having at least 70%, 80%, 90%, 95%, or 99% identity to the amino acid sequence comprising QCTNYALLKLAGDVESNPGP (SEQ ID NO: 18033). A GSG-E2A peptide may comprise an amino acid sequence comprising GSGQCTNYALLKLAGDVESNPGP (SEQ ID NO: 18034) or a sequence having at least 70%, 80%, 90%, 95%, or 99% identity to the amino acid sequence comprising GSGQCTNYALLKLAGDVESNPGP (SEQ ID NO: 18034). An F2A peptide may comprise an amino acid sequence comprising VKQTLNFDLLKLAGDVESNPGP (SEQ ID NO: 18035) or a sequence having at least 70%, 80%, 90%, 95%, or 99% identity to the amino acid sequence comprising VKQTLNFDLLKLAGDVESNPGP (SEQ ID NO: 18035). A GSG-F2A peptide may comprise an amino acid sequence comprising GSGVKQTLNFDLLKLAGDVESNPGP (SEQ ID NO: 18036) or a sequence having at least 70%, 80%, 90%, 95%, or 99% identity to the amino acid sequence comprising GSGVKQTLNFDLLKLAGDVESNPGP (SEQ ID NO: 18036). A P2A peptide may comprise an amino acid sequence comprising ATNFSLLKQAGDVEENPGP (SEQ ID NO: 18037) or a sequence having at least 70%, 80%, 90%, 95%, or 99% identity to the amino acid sequence comprising ATNFSLLKQAGDVEENPGP (SEQ ID NO: 18037). A GSG-P2A peptide may comprise an amino acid sequence comprising GSGATNFSLLKQAGDVEENPGP (SEQ ID NO: 18038) or a sequence having at least 70%, 80%, 90%, 95%, or 99% identity to the amino acid sequence comprising GSGATNFSLLKQAGDVEENPGP (SEQ ID NO: 18038).

[0043] Transposons of the disclosure may comprise a first and a second self-cleaving peptide, the first self-cleaving peptide located, for example, upstream of one or more VHH(s) or VCAR(s) of the disclosure the second self-cleaving peptide located, for example, downstream of the one or more VHH(s) or VCAR(s) of the disclosure. The first and/or the second self-cleaving peptide may comprise, for example, a T2A peptide, GSG-T2A peptide, an E2A peptide, a GSG-E2A peptide, an F2A peptide, a GSG-F2A peptide, a P2A peptide, or a GSG-P2A peptide. A T2A peptide may comprise an amino acid sequence comprising EGRGSLLTCGDVEENPGP (SEQ ID NO: 18030) or a sequence having at least 70%, 80%, 90%, 95%, or 99% identity to the amino acid sequence comprising EGRGSLLTCGDVEENPGP (SEQ ID NO: 18030). A GSG-T2A peptide may comprise an amino acid sequence comprising GSGEGRGSLLTCGDVEENPGP (SEQ ID NO: 18031) or a sequence having at least 70%, 80%, 90%, 95%, or 99% identity to the amino acid sequence comprising GSGEGRGSLLTCGDVEENPGP (SEQ ID NO: 18031). A GSG-T2A peptide may comprise a nucleic acid sequence comprising ggatctggagagggaaggggaagcctgctgacctgtggagacgtggaggaaaacccaggacca (SEQ ID NO: 18032). An E2A peptide may comprise an amino acid sequence comprising QCTNYALLKLAGDVESNPGP (SEQ ID NO: 18033) or a sequence having at least 70%, 80%, 90%, 95%, or 99% identity to the amino acid sequence comprising QCTNYALLKLAGDVESNPGP (SEQ ID NO: 18033). A GSG-E2A peptide may comprise an amino acid sequence comprising GSGQCTNYALLKLAGDVESNPGP (SEQ ID NO: 18034) or a sequence having at least 70%, 80%, 90%, 95%, or 99% identity to the amino acid sequence comprising GSGQCTNYALLKLAGDVESNPGP (SEQ ID NO: 18034). An F2A peptide may comprise an amino acid sequence comprising VKQTLNFDLLKLAGDVESNPGP (SEQ ID NO: 18035) or a sequence having at least 70%, 80%, 90%, 95%, or 99% identity to the amino acid sequence comprising VKQTLNFDLLKLAGDVESNPGP (SEQ ID NO: 18035). A GSG-F2A peptide may comprise an amino acid sequence comprising GSGVKQTLNFDLLKLAGDVESNPGP (SEQ ID NO: 18036) or a sequence having at least 70%, 80%, 90%, 95%, or 99% identity to the amino acid sequence comprising GSGVKQTLNFDLLKLAGDVESNPGP (SEQ ID NO: 18036). A P2A peptide may comprise an amino acid sequence comprising ATNFSLLKQAGDVEENPGP (SEQ ID NO: 18037) or a sequence having at least 70%, 80%, 90%, 95%, or 99% identity to the amino acid sequence comprising ATNFSLLKQAGDVEENPGP (SEQ ID NO: 18037). A GSG-P2A peptide may comprise an amino acid sequence comprising GSGATNFSLLKQAGDVEENPGP (SEQ ID NO: 18038) or a sequence having at least 70%, 80%, 90%, 95%, or 99% identity to the amino acid sequence comprising GSGATNFSLLKQAGDVEENPGP (SEQ ID NO: 18038).

[0044] The disclosure provides a composition comprising the transposon the disclosure. In certain embodiments, the composition may further comprise a plasmid comprising a sequence encoding a transposase enzyme. The sequence encoding a transposase enzyme may be an mRNA sequence.

[0045] Transposons of the disclosure may comprise piggyBac transposons. In certain embodiments of this method, the transposon is a plasmid DNA transposon with a sequence encoding the chimeric antigen receptor flanked by two cis-regulatory insulator elements. In certain embodiments, the transposon is a piggyBac transposon. Transposase enzymes of the disclosure may include piggyBac transposases or compatible enzymes. In certain embodiments, and, in particular, those embodiments wherein the transposon is a piggyBac transposon, the transposase is a piggyBac or a Super piggyBac (SPB) transposase. In certain embodiments, and, in particular, those embodiments wherein the transposase is a Super piggyBac (SPB) transposase, the sequence encoding the transposase is an mRNA sequence.

[0046] In certain embodiments of the methods of the disclosure, the transposase enzyme is a piggyBac (PB) transposase enzyme. The piggyBac (PB) transposase enzyme may comprise or consist of an amino acid sequence at least 75%, 80%, 85%, 90%, 95%, 99% or any percentage in between identical to:

```
(SEQ ID NO: 14487)
    1 MGSSLDDEHI LSALLQSDDE LVGEDSDSEI SDHVSEDDVQ SDTEEAFIDE VHEVQPTSSG
  61 SEILDEQNVI EQPGSSLASN RILTLPQRTI RGKNKHCWST SKSTRRSRVS ALNIVRSQRG
121 PTRMCRNIYD PLLCFKLFFT DEIISEIVKW TNAEISLKRR ESMTGATFRD TNEDEIYAFF
181 GILVMTAVRK DNHMSTDDLF DRSLSMVYVS VMSRDRFDFL IRCLRMDDKS IRPTLRENDV
241 FTPVRKIWDL FIHQCIQNYT PGAHLTIDEQ LLGFRGRCPF RMYIPNKPSK YGIKILMMCD
301 SGTKYMINGM PYLGRGTQTN GVPLGEYYVK ELSKPVHGSC RNITCDNWFT SIPLAKNLLQ
361 EPYKLTIVGT VRSNKREIPE VLKNSRSRPV GTSMFCFDGP LTLVSYKPKP AKMVYLLSSC
421 DEDASINEST GKPQMVMYYN QTKGGVDTLD QMCSVMTCSR KTNRWPMALL YGMINIACIN
481 SFIIYSHNVS SKGEKVQSRK KFMRNLYMSL TSSFMRKRLE APTLKRYLRD NISNILPNEV
541 PGTSDDSTEE PVMKKRTYCT YCPSKIRRKA NASCKKCKKV ICREHNIDMC QSCF.
```

[0047] In certain embodiments of the methods of the disclosure, the transposase enzyme is a piggyBac (PB) transposase enzyme that comprises or consists of an amino acid sequence having an amino acid substitution at one or more of positions 30, 165, 282, or 538 of the sequence:

```
(SEQ ID NO: 14487)
    1 MGSSLDDEHI LSALLQSDDE LVGEDSDSEI SDHVSEDDVQ SDTEEAFIDE VHEVQPTSSG
  61 SEILDEQNVI EQPGSSLASN RILTLPQRTI RGKNKHCWST SKSTRRSRVS ALNIVRSQRG
121 PTRMCRNIYD PLLCFKLFFT DEIISEIVKW TNAEISLKRR ESMTGATFRD TNEDEIYAFF
181 GILVMTAVRK DNHMSTDDLF DRSLSMVYVS VMSRDRFDFL IRCLRMDDKS IRPTLRENDV
241 FTPVRKIWDL FIHQCIQNYT PGAHLTIDEQ LLGFRGRCPF RMYIPNKPSK YGIKILMMCD
301 SGTKYMINGM PYLGRGTQTN GVPLGEYYVK ELSKPVHGSC RNITCDNWFT SIPLAKNLLQ
361 EPYKLTIVGT VRSNKREIPE VLKNSRSRPV GTSMFCFDGP LTLVSYKPKP AKMVYLLSSC
421 DEDASINEST GKPQMVMYYN QTKGGVDTLD QMCSVMTCSR KTNRWPMALL YGMINIACIN
481 SFIIYSHNVS SKGEKVQSRK KFMRNLYMSL TSSFMRKRLE APTLKRYLRD NISNILPNEV
541 PGTSDDSTEE PVMKKRTYCT YCPSKIRRKA NASCKKCKKV ICREHNIDMC QSCF.
```

[0048] In certain embodiments, the transposase enzyme is a piggyBac (PB) transposase enzyme that comprises or consists of an amino acid sequence having an amino acid substitution at two or more of positions 30, 165, 282, or 538 of the sequence of SEQ ID NO: 14487. In certain embodiments, the transposase enzyme is a piggyBac (PB) transposase enzyme that comprises or consists of an amino acid sequence having an amino acid substitution at three or more of positions 30, 165, 282, or 538 of the sequence of SEQ ID NO: 14487. In certain embodiments, the transposase enzyme is a piggyBac (PB) transposase enzyme that comprises or consists of an amino acid sequence having an amino acid substitution at each of the following positions 30, 165, 282, and 538 of the sequence of SEQ ID NO: 14487. In certain embodiments, the amino acid substitution at position 30 of the sequence of SEQ ID NO: 14487 is a substitution of a valine (V) for an isoleucine (I). In certain embodiments, the amino acid substitution at position 165 of the sequence of SEQ ID NO: 14487 is a substitution of a serine (S) for a glycine (G). In certain embodiments, the amino acid substitution at position 282 of the sequence of SEQ ID NO: 14487 is a substitution of a valine (V) for a methionine (M). In certain embodiments, the amino acid substitution at position 538 of the sequence of SEQ ID NO: 14487 is a substitution of a lysine (K) for an asparagine (N).

[0049] In certain embodiments of the methods of the disclosure, the transposase enzyme is a Super piggyBac (SPB) transposase enzyme. In certain embodiments, the Super piggyBac (SPB) transposase enzymes of the disclosure may comprise or consist of the amino acid sequence of the sequence of SEQ ID NO: 14487 wherein the amino acid substitution at position 30 is a substitution of a valine (V) for an isoleucine (I), the amino acid substitution at position 165 is a substitution of a serine (S) for a glycine (G), the amino acid substitution at position 282 is a substitution of a valine (V) for a methionine (M), and the amino acid substitution at position 538 is a substitution of a lysine (K) for an asparagine (N). In certain embodiments, the Super piggyBac (SPB) transposase enzyme may comprise or consist of an amino acid sequence at least 75%, 80%, 85%, 90%, 95%, 99% or any percentage in between identical to:

```
(SEQ ID NO: 14484)
    1 MGSSLDDEHI LSALLQSDDE LVGEDSDSEV SDHVSEDDVQ SDTEEAFIDE VHEVQPTSSG
  61 SEILDEQNVI EQPGSSLASN RILTLPQRTI RGKNKHCWST SKSTRRSRVS ALNIVRSQRG
121 PTRMCRNIYD PLLCFKLFFT DEIISEIVKW TNAEISLKRR ESMTSATFRD TNEDEIYAFF
181 GILVMTAVRK DNHMSTDDLF DRSLSMVYVS VMSRDRFDFL IRCLRMDDKS IRPTLRENDV
241 FTPVRKIWDL FIHQCIQNYT PGAHLTIDEQ LLGFRGRCPF RVYIPNKPSK YGIKILMMCD
301 SGTKYMINGM PYLGRGTQTN GVPLGEYYVK ELSKPVHGSC RNITCDNWFT SIPLAKNLLQ
361 EPYKLTIVGT VRSNKREIPE VLKNSRSRPV GTSMFCFDGP LTLVSYKPKP AKMVYLLSSC
421 DEDASINEST GKPQMVMYYN QTKGGVDTLD QMCSVMTCSR KTNRWPMALL YGMINIACIN
481 SFIIYSHNVS SKGEKVQSRK KFMRNLYMSL TSSFMRKRLE APTLKRYLRD NISNILPKEV
541 PGTSDDSTEE PVMKKRTYCT YCPSKIRRKA NASCKKCKKV ICREHNIDMC QSCF.
```

[0050] The disclosure provides a vector comprising the VCAR of the disclosure. In certain embodiments, the vector is a viral vector. The vector may be a recombinant vector.

[0051] Viral vectors of the disclosure may comprise a sequence isolated or derived from a retrovirus, a lentivirus, an adenovirus, an adeno-associated virus or any combination thereof. The viral vector may comprise a sequence isolated or derived from an adeno-associated virus (AAV). The viral vector may comprise a recombinant AAV (rAAV). Exemplary adeno-associated viruses and recombinant adeno-associated viruses of the disclosure comprise two or more inverted terminal repeat (ITR) sequences located in cis next to a sequence encoding a VHH or VCAR of the disclosure. Exemplary adeno-associated viruses and recombinant adeno-associated viruses of the disclosure include, but are not limited to all serotypes (e.g., AAV1, AAV2, AAV3, AAV4, AAV5, AAV6, AAV7, AAV8, and AAV9). Exemplary adeno-associated viruses and recombinant adeno-associated viruses of the disclosure include, but are not limited to, self-complementary AAV (scAAV) and AAV hybrids containing the genome of one serotype and the capsid of another serotype (e.g., AAV2/5, AAV-DJ and AAV-DJ8). Exemplary adeno-associated viruses and recombinant adeno-associated viruses of the disclosure include, but are not limited to, rAAV-LK03.

[0052] Viral vectors of the disclosure may comprise a selection gene. The selection gene may encode a gene product essential for cell viability and survival. The selection gene may encode a gene product essential for cell viability and survival when challenged by selective cell culture conditions. Selective cell culture conditions may comprise a compound harmful to cell viability or survival and wherein the gene product confers resistance to the compound. Exemplary selection genes of the disclosure may include, but are not limited to, neo (conferring resistance to neomycin), DHFR (encoding Dihydrofolate Reductase and conferring resistance to Methotrexate), TYMS (encoding Thymidylate Synthetase), MGMT (encoding 0(6)-methylguanine-DNA methyltransferase), multidrug resistance gene (MDR1), ALDH1 (encoding Aldehyde dehydrogenase 1 family, member A1), FRANCF, RAD51C (encoding RAD51 Paralog C), GCS (encoding glucosylceramide synthase), NKX2.2 (encoding NK2 Homeobox 2) or any combination thereof.

[0053] Viral vectors of the disclosure may comprise an inducible proapoptotic polypeptide comprising (a) a ligand binding region, (b) a linker, and (c) a proapoptotic polypeptide, wherein the inducible proapoptotic polypeptide does not comprise a non-human sequence. In certain embodiments, the non-human sequence comprises a restriction site. In certain embodiments, the ligand binding region may be a multimeric ligand binding region. Inducible proapoptotic polypeptides of the disclosure may also be referred to as an “iC9 safety switch”. In certain embodiments, viral vectors of the disclosure may comprise an inducible caspase polypeptide comprising (a) a ligand binding region, (b) a linker, and (c) a caspase polypeptide, wherein the inducible proapoptotic polypeptide does not comprise a non-human sequence. In certain embodiments, viral vectors of the disclosure may comprise an inducible caspase polypeptide comprising (a) a ligand binding region, (b) a linker, and (c) a caspase polypeptide, wherein the inducible proapoptotic polypeptide does not comprise a non-human sequence. In certain embodiments, viral vectors of the disclosure may comprise an inducible caspase polypeptide comprising (a) a ligand binding region, (b) a linker, and (c) a truncated caspase 9 polypeptide, wherein the inducible proapoptotic polypeptide does not comprise a non-human sequence. In certain embodiments of the inducible proapoptotic polypeptides, inducible caspase polypeptides or truncated caspase 9 polypeptides of the disclosure, the ligand binding region may comprise a FK506 binding protein 12 (FKBP12) polypeptide. In certain embodiments, the amino acid sequence of the ligand binding region that comprise a FK506 binding protein 12 (FKBP12) polypeptide may comprise a modification at position 36 of the sequence. The modification may be a substitution of valine (V) for phenylalanine (F) at position 36 (F36V). In certain embodiments, the FKBP12 polypeptide is encoded by an amino acid sequence comprising GVQVETISPGDGRTFPKRGQTCVVHYTGMLEDGKKVDSSRDRNKPFKFMLGKQEVIRG WEEGVAQMSVGQRAKLTISPDYAYGATGHPGIIPPHATLVFDVELLKLE (SEQ ID NO: 18022). In certain embodiments, the FKBP12 polypeptide is encoded by a nucleic acid sequence comprising GGGGTCCAGGTCGAGACTATTTCACCAGGGGATGGGCGAACATTTCCAAAAAGGGG CCAGACTTGCGTCGTGCATTACACCGGGATGCTGGAGGACGGGAAGAAAGTGGACA GCTCCAGGGATCGCAACAAGCCCTTCAAGTTCATGCTGGGAAAGCAGGAAGTGATC CGAGGATGGGAGGAAGGCGTGGCACAGATGTCAGTCGGCCAGCGGGCCAAACTGA CCATTAGCCCTGACTACGCTTATGGAGCAACAGGCCACCCAGGGATCATTCCCCCTC ATGCCACCCTGGTCTTCGAT GTGGAACTGCTGAAGCTGGAG (SEQ ID NO: 18023). In certain embodiments, the induction agent specific for the ligand binding region may comprise a FK506 binding protein 12 (FKBP12) polypeptide having a substitution of valine (V) for phenylalanine (F) at position 36 (F36V) comprises AP20187 and/or AP1903, both synthetic drugs.

[0054] In certain embodiments of the inducible proapoptotic polypeptides, inducible caspase polypeptides or truncated caspase 9 polypeptides of the disclosure, the linker region is encoded by an amino acid comprising GGGGS (SEQ ID NO: 18024) or a nucleic acid sequence comprising GGAGGAGGAGGATCC (SEQ ID NO: 18025). In certain embodiments, the nucleic acid sequence encoding the linker does not comprise a restriction site.

[0055] In certain embodiments of the truncated caspase 9 polypeptides of the disclosure, the truncated caspase 9 polypeptide is encoded by an amino acid sequence that does not comprise an arginine (R) at position 87 of the sequence. Alternatively, or in addition, in certain embodiments of the inducible proapoptotic polypeptides, inducible caspase polypeptides or truncated caspase 9 polypeptides of the disclosure, the truncated caspase 9 polypeptide is encoded by an amino acid sequence that does not comprise an alanine (A) at position 282 the sequence. In certain embodiments of the inducible proapoptotic polypeptides, inducible caspase polypeptides or truncated caspase 9 polypeptides of the disclosure, the truncated caspase 9 polypeptide is encoded by an amino acid comprising GFGDVGALESLRGNADLAYILSMEPCGHCLIINNVNFCRESGLRTRTGSNIDCEKLRRRF SSLHFMVEVKGDLTAKKMVLALLELAQQDHGALDCCVVVILSHGCQASHLQFPGAVY GTDGCPVSVEKIVNIFNGTSCPSLGGKPKLFFIQACGGEQKDHGFEVASTSPEDESPGSNP EPDATPFQEGLRTFDQLDAISSLPTPSDIFVSYSTFPGFVSWRDPKSGSWYVETLDDIFEQ WAHSEDLQSLLLRVANAVSVKGIYKQMPGCFNFLRKKLFFKTS (SEQ ID NO: 18026) or a nucleic acid sequence comprising

(SEQ ID NO: 18027)
TTTGGGGACGTGGGGGCCCTGGAGTCTCTGCGAGGAAATGCCGATCTGGC
TTACATCCTGAGCATGGAACCCTGCGGCCACTGTCTGATCATTAACAATG
TGAACTTCTGCAGAGAAAGCGGACTGCGAACACGGACTGGCTCCAATATT
GACTGTGAGAAGCTGCGGAGAAGGTTCTCTAGTCTGCACTTTATGGTCGA
AGTGAAAGGGGATCTGACCGCCAAGAAAATGGTGCTGGCCCTGCTGGAGC
TGGCTCAGCAGGACCATGGAGCTCTGGATTGCTGCGTGGTCGTGATCCTG
TCCCACGGGTGCCAGGCTTCTCATCTGCAGTTCCCCGGAGCAGTGTACGG
AACAGACGGCTGTCCTGTCAGCGTGGAGAAGATCGTCAACATCTTCAACG
GCACTTCTTGCCCTAGTCTGGGGGGAAAGCCAAAACTGTTCTTTATCCAG
GCCTGTGGCGGGGAACAGAAAGATCACGGCTTCGAGGTGGCCAGCACCAG
CCCTGAGGACGAATCACCAGGGAGCAACCCTGAACCAGATGCAACTCCAT
TCCAGGAGGGACTGAGGACCTTTGACCAGCTGGATGCTATCTCAAGCCTG
CCCACTCCTAGTGACATTTTCGTGTCTTACAGTACCTTCCCAGGCTTTGT
CTCATGGCGCGATCCCAAGTCAGGGAGCTGGTACGTGGAGACACTGGACG
ACATCTTTGAACAGTGGGCCCATTCAGAGGACCTGCAGAGCCTGCTGCTG
CGAGTGGCAAACGCTGTCTCTGTGAAGGGCATCTACAAACAGATGCCCGG
GTGCTTCAATTTTCTGAGAAAGAAACTGTTCTTTAAGACTTCC.

[0056] In certain embodiments of the inducible proapoptotic polypeptides, wherein the polypeptide comprises a truncated caspase 9 polypeptide, the inducible proapoptotic polypeptide is encoded by an amino acid sequence comprising GVQVETISPGDGRTFPKRGQTCVVHYTGMLEDGKKVDSSRDRNKPFKFMLGKQEVIRG WEEGVAQMSVGQRAKLTISPDYAYGATGHPGIIPPHATLVFDVELLKLEGGGGSGFGDV GALESLRGNADLAYILSMEPCGHCLIINNVNFCRESGLRTRTGSNIDCEKLRRRFSSLHF MVEVKGDLTAKKMVLALLELAQQDHGALDCCVVVILSHGCQASHLQFPGAVYGTDGC PVSVEKIVNIFNGTSCPSLGGKPKLFFIQACGGEQKDHGFEVASTSPEDESPGSNPEPDAT PFQEGLRTFDQLDAISSLPTPSDIFVSYSTFPGFVSWRDPKSGSWYVETLDDIFEQWAHSE DLQSLLLRVANAVSVKGIYKQMPGCFNFLRKKLFFKTS (SEQ ID NO: 18028) or the nucleic acid sequence comprising

(SEQ ID NO: 18029)
ggggtccaggtcgagactatttcaccaggggatgggcgaacatttccaaa
aaggggccagacttgcgtcgtgcattacaccgggatgctggaggacggga
agaaagtggacagctccagggatcgcaacaagcccttcaagttcatgctg
ggaaagcaggaagtgatccgaggatgggaggaaggcgtggcacagatgtc
agtcggccagcgggccaaactgaccattagccctgactacgcttatggag
caacaggccacccagggatcattccccctcatgccaccctggtcttcgat
gtggaactgctgaagctggagggaggaggaggatccggatttggggacgt
gggggccctggagtctctgcgaggaaatgccgatctggcttacatcctga
gcatggaaccctgcggccactgtctgatcattaacaatgtgaacttctgc
agagaaagcggactgcgaacacggactggctccaatattgactgtgagaa
gctgcggagaaggttctctagtctgcactttatggtcgaagtgaaagggg
atctgaccgccaagaaaatggtgctggccctgctggagctggctcagcag
gaccatggagctctggattgctgcgtggtcgtgatcctgtcccacgggtg
ccaggcttctcatctgcagttccccggagcagtgtacggaacagacggct
gtcctgtcagcgtggagaagatcgtcaacatcttcaacggcacttcttgc
cctagtctggggggaaagccaaaactgttctttatccaggcctgtggcgg
ggaacagaaagatcacggcttcgaggtggccagcaccagccctgaggacg
aatcaccagggagcaaccctgaaccagatgcaactccattccaggaggga
ctgaggacctttgaccagctggatgctatctcaagcctgcccactcctag
tgacattttcgtgtcttacagtaccttcccaggctttgtctcatggcgcg
atcccaagtcagggagctggtacgtggagacactggacgacatctttgaa
cagtgggcccattcagaggacctgcagagcctgctgctgcgagtggcaaa
cgctgtctctgtgaagggcatctacaaacagatgcccgggtgcttcaatt
ttctgagaaagaaactgttctttaagacttcc.

[0057] Viral vectors of the disclosure may comprise at least one self-cleaving peptide. In some embodiments, the vector may comprise at least one self-cleaving peptide and wherein a self-cleaving peptide is located between a CAR and a selection gene. In some embodiments, the vector may comprise at least one self-cleaving peptide and wherein a first self-cleaving peptide is located upstream of a CAR and a second self-cleaving peptide is located downstream of a CAR. Viral vectors of the disclosure may comprise at least one self-cleaving peptide(s) located, for example, between one or more of a VCAR, VCAR or VCAR of the disclosure and an inducible proapoptotic polypeptide of the disclosure. Viral vectors of the disclosure may comprise at least two self-cleaving peptide(s), a first self-cleaving peptide located, for example, upstream or immediately upstream of an inducible proapoptotic polypeptide of the disclosure and a second first self-cleaving peptide located, for example, downstream or immediately upstream of an inducible proapoptotic polypeptide of the disclosure. The self-cleaving peptide may comprise, for example, a T2A peptide, GSG-T2A peptide, an E2A peptide, a GSG-E2A peptide, an F2A peptide, a GSG-F2A peptide, a P2A peptide, or a GSG-P2A peptide. A T2A peptide may comprise an amino acid sequence comprising EGRGSLLTCGDVEENPGP (SEQ ID NO: 18030) or a sequence having at least 70%, 80%, 90%, 95%, or 99% identity to the amino acid sequence comprising EGRGSLLTCGDVEENPGP (SEQ ID NO: 18030). A GSG-T2A peptide may comprise an amino acid sequence comprising GSGEGRGSLLTCGDVEENPGP (SEQ ID NO: 18031) or a sequence having at least 70%, 80%, 90%, 95%, or 99% identity to the amino acid sequence comprising GSGEGRGSLLTCGDVEENPGP (SEQ ID NO: 18031). A GSG-T2A peptide may comprise a nucleic acid sequence comprising ggatctggagagggaaggggaagcctgctgacctgtggagacgtggaggaaaacccaggacca (SEQ ID NO: 18032). An E2A peptide may comprise an amino acid sequence comprising QCTNYALLKLAGDVESNPGP (SEQ ID NO: 18033) or a sequence having at least 70%, 80%, 90%, 95%, or 99% identity to the amino acid sequence comprising QCTNYALLKLAGDVESNPGP (SEQ ID NO: 18033). A GSG-E2A peptide may comprise an amino acid sequence comprising GSGQCTNYALLKLAGDVESNPGP (SEQ ID NO: 18034) or a sequence having at least 70%, 80%, 90%, 95%, or 99% identity to the amino acid sequence comprising GSGQCTNYALLKLAGDVESNPGP (SEQ ID NO: 18034). An F2A peptide may comprise an amino acid sequence comprising VKQTLNFDLLKLAGDVESNPGP (SEQ ID NO: 18035) or a sequence having at least 70%, 80%, 90%, 95%, or 99% identity to the amino acid sequence comprising VKQTLNFDLLKLAGDVESNPGP (SEQ ID NO: 18035). A GSG-F2A peptide may comprise an amino acid sequence comprising GSGVKQTLNFDLLKLAGDVESNPGP (SEQ ID NO: 18036) or a sequence having at least 70%, 80%, 90%, 95%, or 99% identity to the amino acid sequence comprising GSGVKQTLNFDLLKLAGDVESNPGP (SEQ ID NO: 18036). A P2A peptide may comprise an amino acid sequence comprising ATNFSLLKQAGDVEENPGP (SEQ ID NO: 18037) or a sequence having at least 70%, 80%, 90%, 95%, or 99% identity to the amino acid sequence comprising ATNFSLLKQAGDVEENPGP (SEQ ID NO: 18037). A GSG-P2A peptide may comprise an amino acid sequence comprising GSGATNFSLLKQAGDVEENPGP (SEQ ID NO: 18038) or a sequence having at least 70%, 80%, 90%, 95%, or 99% identity to the amino acid sequence comprising GSGATNFSLLKQAGDVEENPGP (SEQ ID NO: 18038).

[0058] The disclosure provides a vector comprising the VCAR of the disclosure. In certain embodiments, the vector is a nanoparticle. Exemplary nanoparticle vectors of the disclosure include, but are not limited to, nucleic acids (e.g., RNA, DNA, synthetic nucleotides, modified nucleotides or any combination thereof), amino acids (L-amino acids, D-amino acids, synthetic amino acids, modified amino acids, or any combination thereof), polymers (e.g., polymersomes), micelles, lipids (e.g., liposomes), organic molecules (e.g., carbon atoms, sheets, fibers, tubes), inorganic molecules (e.g., calcium phosphate or gold) or any combination thereof. A nanoparticle vector may be passively or actively transported across a cell membrane.

[0059] Nanoparticle vectors of the disclosure may comprise a selection gene. The selection gene may encode a gene product essential for cell viability and survival. The selection gene may encode a gene product essential for cell viability and survival when challenged by selective cell culture conditions. Selective cell culture conditions may comprise a compound harmful to cell viability or survival and wherein the gene product confers resistance to the compound. Exemplary selection genes of the disclosure may include, but are not limited to, neo (conferring resistance to neomycin), DHFR (encoding Dihydrofolate Reductase and conferring resistance to Methotrexate), TYMS (encoding Thymidylate Synthetase), MGMT (encoding 0(6)-methylguanine-DNA methyltransferase), multidrug resistance gene (MDR1), ALDH1 (encoding Aldehyde dehydrogenase 1 family, member A1), FRANCF, RAD51C (encoding RAD51 Paralog C), GCS (encoding glucosylceramide synthase), NKX2.2 (encoding NK2 Homeobox 2) or any combination thereof.

[0060] Nanoparticle vectors of the disclosure may comprise an inducible proapoptotic polypeptide comprising (a) a ligand binding region, (b) a linker, and (c) a proapoptotic polypeptide, wherein the inducible proapoptotic polypeptide does not comprise a non-human sequence. In certain embodiments, the non-human sequence comprises a restriction site. In certain embodiments, the ligand binding region may be a multimeric ligand binding region. Inducible proapoptotic polypeptides of the disclosure may also be referred to as an “iC9 safety switch”. In certain embodiments, nanoparticle vectors of the disclosure may comprise an inducible caspase polypeptide comprising (a) a ligand binding region, (b) a linker, and (c) a caspase polypeptide, wherein the inducible proapoptotic polypeptide does not comprise a non-human sequence. In certain embodiments, nanoparticle vectors of the disclosure may comprise an inducible caspase polypeptide comprising (a) a ligand binding region, (b) a linker, and (c) a caspase polypeptide, wherein the inducible proapoptotic polypeptide does not comprise a non-human sequence. In certain embodiments, nanoparticle vectors of the disclosure may comprise an inducible caspase polypeptide comprising (a) a ligand binding region, (b) a linker, and (c) a truncated caspase 9 polypeptide, wherein the inducible proapoptotic polypeptide does not comprise a non-human sequence. In certain embodiments of the inducible proapoptotic polypeptides, inducible caspase polypeptides or truncated caspase 9 polypeptides of the disclosure, the ligand binding region may comprise a FK506 binding protein 12 (FKBP12) polypeptide. In certain embodiments, the amino acid sequence of the ligand binding region that comprise a FK506 binding protein 12 (FKBP12) polypeptide may comprise a modification at position 36 of the sequence. The modification may be a substitution of valine (V) for phenylalanine (F) at position 36 (F36V). In certain embodiments, the FKBP12 polypeptide is encoded by an amino acid sequence comprising GVQVETISPGDGRTFPKRGQTCVVHYTGMLEDGKKVDSSRDRNKPFKFMLGKQEVIRG WEEGVAQMSVGQRAKLTISPDYAYGATGHPGIIPPHATLVFDVELLKLE (SEQ ID NO: 18022). In certain embodiments, the FKBP12 polypeptide is encoded by a nucleic acid sequence comprising GGGGTCCAGGTCGAGACTATTTCACCAGGGGATGGGCGAACATTTCCAAAAAGGGG CCAGACTTGCGTCGTGCATTACACCGGGATGCTGGAGGACGGGAAGAAAGTGGACA GCTCCAGGGATCGCAACAAGCCCTTCAAGTTCATGCTGGGAAAGCAGGAAGTGATC CGAGGATGGGAGGAAGGCGTGGCACAGATGTCAGTCGGCCAGCGGGCCAAACTGA CCATTAGCCCTGACTACGCTTATGGAGCAACAGGCCACCCAGGGATCATTCCCCCTC ATGCCACCCTGGTCTTCGAT GTGGAACTGCTGAAGCTGGAG (SEQ ID NO: 18023). In certain embodiments, the induction agent specific for the ligand binding region may comprise a FK506 binding protein 12 (FKBP12) polypeptide having a substitution of valine (V) for phenylalanine (F) at position 36 (F36V) comprises AP20187 and/or AP1903, both synthetic drugs.

[0061] In certain embodiments of the inducible proapoptotic polypeptides, inducible caspase polypeptides or truncated caspase 9 polypeptides of the disclosure, the linker region is encoded by an amino acid comprising GGGGS (SEQ ID NO: 18024) or a nucleic acid sequence comprising GGAGGAGGAGGATCC (SEQ ID NO: 18025). In certain embodiments, the nucleic acid sequence encoding the linker does not comprise a restriction site.

[0062] In certain embodiments of the truncated caspase 9 polypeptides of the disclosure, the truncated caspase 9 polypeptide is encoded by an amino acid sequence that does not comprise an arginine (R) at position 87 of the sequence. Alternatively, or in addition, in certain embodiments of the inducible proapoptotic polypeptides, inducible caspase polypeptides or truncated caspase 9 polypeptides of the disclosure, the truncated caspase 9 polypeptide is encoded by an amino acid sequence that does not comprise an alanine (A) at position 282 the sequence. In certain embodiments of the inducible proapoptotic polypeptides, inducible caspase polypeptides or truncated caspase 9 polypeptides of the disclosure, the truncated caspase 9 polypeptide is encoded by an amino acid comprising GFGDVGALESLRGNADLAYILSMEPCGHCLIINNVNFCRESGLRTRTGSNIDCEKLRRRF SSLHFMVEVKGDLTAKKMVLALLELAQQDHGALDCCVVVILSHGCQASHLQFPGAVY GTDGCPVSVEKIVNIFNGTSCPSLGGKPKLFFIQACGGEQKDHGFEVASTSPEDESPGSNP EPDATPFQEGLRTFDQLDAISSLPTPSDIFVSYSTFPGFVSWRDPKSGSWYVETLDDIFEQ WAHSEDLQSLLLRVANAVSVKGIYKQMPGCFNFLRKKLFFKTS (SEQ ID NO: 18026) or a nucleic acid sequence comprising

(SEQ ID NO: 18027)
TTTGGGGACGTGGGGGCCCTGGAGTCTCTGCGAGGAAATGCCGATCTGGC
TTACATCCTGAGCATGGAACCCTGCGGCCACTGTCTGATCATTAACAATG
TGAACTTCTGCAGAGAAAGCGGACTGCGAACACGGACTGGCTCCAATATT
GACTGTGAGAAGCTGCGGAGAAGGTTCTCTAGTCTGCACTTTATGGTCGA
AGTGAAAGGGGATCTGACCGCCAAGAAAATGGTGCTGGCCCTGCTGGAGC
TGGCTCAGCAGGACCATGGAGCTCTGGATTGCTGCGTGGTCGTGATCCTG
TCCCACGGGTGCCAGGCTTCTCATCTGCAGTTCCCCGGAGCAGTGTACGG
AACAGACGGCTGTCCTGTCAGCGTGGAGAAGATCGTCAACATCTTCAACG
GCACTTCTTGCCCTAGTCTGGGGGGAAAGCCAAAACTGTTCTTTATCCAG
GCCTGTGGCGGGGAACAGAAAGATCACGGCTTCGAGGTGGCCAGCACCAG
CCCTGAGGACGAATCACCAGGGAGCAACCCTGAACCAGATGCAACTCCAT
TCCAGGAGGGACTGAGGACCTTTGACCAGCTGGATGCTATCTCAAGCCTG
CCCACTCCTAGTGACATTTTCGTGTCTTACAGTACCTTCCCAGGCTTTGT
CTCATGGCGCGATCCCAAGTCAGGGAGCTGGTACGTGGAGACACTGGACG
ACATCTTTGAACAGTGGGCCCATTCAGAGGACCTGCAGAGCCTGCTGCTG
CGAGTGGCAAACGCTGTCTCTGTGAAGGGCATCTACAAACAGATGCCCGG
GTGCTTCAATTTTCTGAGAAAGAAACTGTTCTTTAAGACTTCC.

[0063] In certain embodiments of the inducible proapoptotic polypeptides, wherein the polypeptide comprises a truncated caspase 9 polypeptide, the inducible proapoptotic polypeptide is encoded by an amino acid sequence comprising GVQVETISPGDGRTFPKRGQTCVVHYTGMLEDGKKVDSSRDRNKPFKFMLGKQEVIRG WEEGVAQMSVGQRAKLTISPDYAYGATGHPGIIPPHATLVFDVELLKLEGGGGSGFGDV GALESLRGNADLAYILSMEPCGHCLIINNVNFCRESGLRTRTGSNIDCEKLRRRFSSLHF MVEVKGDLTAKKMVLALLELAQQDHGALDCCVVVILSHGCQASHLQFPGAVYGTDGC PVSVEKIVNIFNGTSCPSLGGKPKLFFIQACGGEQKDHGFEVASTSPEDESPGSNPEPDAT PFQEGLRTFDQLDAISSLPTPSDIFVSYSTFPGFVSWRDPKSGSWYVETLDDIFEQWAHSE DLQSLLLRVANAVSVKGIYKQMPGCFNFLRKKLFFKTS (SEQ ID NO: 18028) or the nucleic acid sequence comprising

(SEQ ID NO: 18029)
ggggtccaggtcgagactatttcaccaggggatgggcgaacatttccaaa
aaggggccagacttgcgtcgtgcattacaccgggatgctggaggacggga
agaaagtggacagctccagggatcgcaacaagcccttcaagttcatgctg
ggaaagcaggaagtgatccgaggatgggaggaaggcgtggcacagatgtc
agtcggccagcgggccaaactgaccattagccctgactacgcttatggag
caacaggccacccagggatcattccccctcatgccaccctggtcttcgat
gtggaactgctgaagctggagggaggaggaggatccggatttggggacgt
gggggccctggagtctctgcgaggaaatgccgatctggcttacatcctga
gcatggaaccctgcggccactgtctgatcattaacaatgtgaacttctgc
agagaaagcggactgcgaacacggactggctccaatattgactgtgagaa
gctgcggagaaggttctctagtctgcactttatggtcgaagtgaaagggg
atctgaccgccaagaaaatggtgctggccctgctggagctggctcagcag
gaccatggagctctggattgctgcgtggtcgtgatcctgtcccacgggtg
ccaggcttctcatctgcagttccccggagcagtgtacggaacagacggct
gtcctgtcagcgtggagaagatcgtcaacatcttcaacggcacttcttgc
cctagtctggggggaaagccaaaactgttctttatccaggcctgtggcgg
ggaacagaaagatcacggcttcgaggtggccagcaccagccctgaggacg
aatcaccagggagcaaccctgaaccagatgcaactccattccaggaggga
ctgaggacctttgaccagctggatgctatctcaagcctgcccactcctag
tgacattttcgtgtcttacagtaccttcccaggctttgtctcatggcgcg
atcccaagtcagggagctggtacgtggagacactggacgacatctttgaa
cagtgggcccattcagaggacctgcagagcctgctgctgcgagtggcaaa
cgctgtctctgtgaagggcatctacaaacagatgcccgggtgcttcaatt
ttctgagaaagaaactgttctttaagacttcc.

[0064] Nanoparticle vectors of the disclosure may comprise at least one self-cleaving peptide. In some embodiments, the nanoparticle vector may comprise at least one self-cleaving peptide and wherein a self-cleaving peptide is located between a VCAR and the nanoparticle. In some embodiments, the nanoparticle vector may comprise at least one self-cleaving peptide and wherein a first self-cleaving peptide is located upstream of a VCAR and a second self-cleaving peptide is located downstream of a VCAR. In some embodiments, the nanoparticle vector may comprise at least one self-cleaving peptide and wherein a first self-cleaving peptide is located between a VCAR and the nanoparticle and a second self-cleaving peptide is located downstream of the VCAR. In some embodiments, the nanoparticle vector may comprise at least one self-cleaving peptide and wherein a first self-cleaving peptide is located between a VCAR and the nanoparticle and a second self-cleaving peptide is located downstream of the VCAR, for example, between the VCAR and a selection gene.

[0065] Nanoparticle vectors of the disclosure may comprise at least one self-cleaving peptide(s) located, for example, between one or more VHH(s) or VCAR(s) of the disclosure and an inducible proapoptotic polypeptide of the disclosure. Nanoparticle vectors of the disclosure may comprise at least two self-cleaving peptide(s), a first self-cleaving peptide located, for example, upstream or immediately upstream of an inducible proapoptotic polypeptide of the disclosure and a second first self-cleaving peptide located, for example, downstream or immediately upstream of an inducible proapoptotic polypeptide of the disclosure. The self-cleaving peptide may comprise, for example, a T2A peptide, GSG-T2A peptide, an E2A peptide, a GSG-E2A peptide, an F2A peptide, a GSG-F2A peptide, a P2A peptide, or a GSG-P2A peptide. A T2A peptide may comprise an amino acid sequence comprising EGRGSLLTCGDVEENPGP (SEQ ID NO: 18030) or a sequence having at least 70%, 80%, 90%, 95%, or 99% identity to the amino acid sequence comprising EGRGSLLTCGDVEENPGP (SEQ ID NO: 18030). A GSG-T2A peptide may comprise an amino acid sequence comprising GSGEGRGSLLTCGDVEENPGP (SEQ ID NO: 18031) or a sequence having at least 70%, 80%, 90%, 95%, or 99% identity to the amino acid sequence comprising GSGEGRGSLLTCGDVEENPGP (SEQ ID NO: 18031). A GSG-T2A peptide may comprise a nucleic acid sequence comprising ggatctggagagggaaggggaagcctgctgacctgtggagacgtggaggaaaacccaggacca (SEQ ID NO: 18032). An E2A peptide may comprise an amino acid sequence comprising QCTNYALLKLAGDVESNPGP (SEQ ID NO: 18033) or a sequence having at least 70%, 80%, 90%, 95%, or 99% identity to the amino acid sequence comprising QCTNYALLKLAGDVESNPGP (SEQ ID NO: 18033). A GSG-E2A peptide may comprise an amino acid sequence comprising GSGQCTNYALLKLAGDVESNPGP (SEQ ID NO: 18034) or a sequence having at least 70%, 80%, 90%, 95%, or 99% identity to the amino acid sequence comprising GSGQCTNYALLKLAGDVESNPGP (SEQ ID NO: 18034). An F2A peptide may comprise an amino acid sequence comprising VKQTLNFDLLKLAGDVESNPGP (SEQ ID NO: 18035) or a sequence having at least 70%, 80%, 90%, 95%, or 99% identity to the amino acid sequence comprising VKQTLNFDLLKLAGDVESNPGP (SEQ ID NO: 18035). A GSG-F2A peptide may comprise an amino acid sequence comprising GSGVKQTLNFDLLKLAGDVESNPGP (SEQ ID NO: 18036) or a sequence having at least 70%, 80%, 90%, 95%, or 99% identity to the amino acid sequence comprising GSGVKQTLNFDLLKLAGDVESNPGP (SEQ ID NO: 18036). A P2A peptide may comprise an amino acid sequence comprising ATNFSLLKQAGDVEENPGP (SEQ ID NO: 18037) or a sequence having at least 70%, 80%, 90%, 95%, or 99% identity to the amino acid sequence comprising ATNFSLLKQAGDVEENPGP (SEQ ID NO: 18037). A GSG-P2A peptide may comprise an amino acid sequence comprising GSGATNFSLLKQAGDVEENPGP (SEQ ID NO: 18038) or a sequence having at least 70%, 80%, 90%, 95%, or 99% identity to the amino acid sequence comprising GSGATNFSLLKQAGDVEENPGP (SEQ ID NO: 18038).

[0066] The disclosure provides a composition comprising a vector of the disclosure.

[0067] The disclosure provides a cell comprising a VCAR of the disclosure. The disclosure provides a cell comprising a transposon of the disclosure. In certain embodiments, the cell comprising a VCAR, a transposon, or a vector of the disclosure may express a VCAR on the cell surface. The cell may be any type of cell. Preferably, the cell is an immune cell. The immune cell may be a T-cell, a Natural Killer (NK) cell, a Natural Killer (NK)-like cell, a Cytokine Induced Killer (CIK) cell, a hematopoeitic progenitor cell, a peripheral blood (PB) derived T cell or an umbilical cord blood (UCB) derived T-cell. Preferably, the immune cell is a T-cell. The T-cell may be an early memory cell, a stem-like T-cell, a T_{SCM}-like cell, a T_{SCM} or a T_{CM}. The T-cell may be a T_{SCM}. The cell may be an artificial antigen presenting cell, which, optionally, may be used to stimulate and expand a modified immune cell or T cell of the disclosure. The cell may be a tumor cell, which, optionally, may be used as an artificial or modified antigen presenting cell.

[0068] Modified cells of the disclosure that may be used for adoptive therapy may be autologous or allogeneic.

[0069] The disclosure provides a method for expressing a VCAR on the surface of a cell, comprising: (a) obtaining a cell population; (b) contacting the cell population to a composition comprising a VCAR of the disclosure or a sequence encoding the VCAR, under conditions sufficient to transfer the VCAR across a cell membrane of at least one cell in the cell population, thereby generating a modified cell population; (c) culturing the modified cell population under conditions suitable for integration of the transposon; and (d) expanding and/or selecting at least one cell from the modified cell population that express the VCAR on the cell surface.

[0070] In certain embodiments of this method of expressing a VCAR, the cell population may comprise leukocytes and/or CD4+ and CD8+ leukocytes. The cell population may comprise CD4+ and CD8+ leukocytes in an optimized ratio. The optimized ratio of CD4+ to CD8+ leukocytes does not naturally occur in vivo. The cell population may comprise a tumor cell.

[0071] In certain embodiments of this method of expressing a VCAR, a transposon or vector comprises the VCAR or the sequence encoding the VCAR.

[0072] In certain embodiments of this method of expressing a VCAR, the conditions sufficient to transfer the sequence encoding the VCAR across a cell membrane of at least one cell in the cell population comprise nucleofection.

[0073] In certain embodiments of this method of expressing a VCAR, wherein the conditions sufficient to transfer the sequence encoding the VCAR across a cell membrane of at least one cell in the cell population comprise at least one of an application of one or more pulses of electricity at a specified voltage, a buffer, and one or more supplemental factor(s). In certain embodiments, the buffer may comprise PBS, HBSS, OptiMEM, BTXpress, Amaxa Nucleofector, Human T cell nucleofection buffer or any combination thereof. In certain embodiments, the one or more supplemental factor(s) may comprise (a) a recombinant human cytokine, a chemokine, an interleukin or any combination thereof; (b) a salt, a mineral, a metabolite or any combination thereof; (c) a cell medium; (d) an inhibitor of cellular DNA sensing, metabolism, differentiation, signal transduction, one or more apoptotic pathway(s) or combinations thereof; and (e) a reagent that modifies or stabilizes one or more nucleic acids. The recombinant human cytokine, the chemokine, the interleukin or any combination thereof may comprise IL2, IL7, IL12, IL15, IL21, IL1, IL3, IL4, IL5, IL6, IL8, CXCL8, IL9, IL10, IL11, IL13, IL14, IL16, IL17, IL18, IL19, IL20, IL22, IL23, IL25, IL26, IL27, IL28, IL29, IL30, IL31, IL32, IL33, IL35, IL36, GM-CSF, IFN-gamma, IL-1 alpha/IL-1F1, IL-1 beta/IL-1F2, IL-12 p70, IL-12/IL-35 p35, IL-13, IL-17/IL-17A, IL-17A/F Heterodimer, IL-17F, IL-18/IL-1F4, IL-23, IL-24, IL-32, IL-32 beta, IL-32 gamma, IL-33, LAP (TGF-beta 1), Lymphotoxin-alpha/TNF-beta, TGF-beta, TNF-alpha, TRANCE/TNFSF11/RANK L or any combination thereof. The salt, the mineral, the metabolite or any combination thereof may comprise HEPES, Nicotinamide, Heparin, Sodium Pyruvate, L-Glutamine, MEM Non-Essential Amino Acid Solution, Ascorbic Acid, Nucleosides, FBS/FCS, Human serum, serum-substitute, anti-biotics, pH adjusters, Earle's Salts, 2-Mercaptoethanol, Human transferrin, Recombinant human insulin, Human serum albumin, Nucleofector PLUS Supplement, KCL, MgCl2, Na2HPO4, NAH2PO4, Sodium lactobionate, Manitol, Sodium succinate, Sodium Chloride, CINa, Glucose, Ca(NO₃)2, Tris/HCl, K2HPO4, KH2PO4, Polyethylenimine, Poly-ethylene-glycol, Poloxamer 188, Poloxamer 181, Poloxamer 407, Poly-vinylpyrrolidone, Pop313, Crown-5, or any combination thereof. The cell medium may comprise PBS, HBSS, OptiMEM, DMEM, RPMI 1640, AIM-V, X-VIVO 15, CellGro DC Medium, CTS OpTimizer T Cell Expansion SFM, TexMACS Medium, PRIME-XV T Cell Expansion Medium, ImmunoCult-XF T Cell Expansion Medium or any combination thereof. The inhibitor of cellular DNA sensing, metabolism, differentiation, signal transduction, one or more apoptotic pathway(s) or combinations thereof comprise inhibitors of TLR9, MyD88, IRAK, TRAF6, TRAF3, IRF-7, NF-KB, Type 1 Interferons, pro-inflammatory cytokines, cGAS, STING, Sec5, TBK1, IRF-3, RNA pol III, RIG-1, IPS-1, FADD, RIP1, TRAF3, AIM2, ASC, Caspasel, Pro-IL1B, PI3K, Akt, Wnt3A, inhibitors of glycogen synthase kinase-30 (GSK-3 3) (e.g., TWS119), Bafilomycin, Chloroquine, Quinacrine, AC-YVAD-CMK, Z-VAD-FMK, Z-IETD-FMK or any combination thereof. The reagent that modifies or stabilizes one or more nucleic acids comprises a pH modifier, a DNA-binding protein, a lipid, a phospholipid, CaPO4, a net neutral charge DNA binding peptide with or without a NLS sequence, a TREX1 enzyme or any combination thereof.

[0074] In certain embodiments of this method of expressing a VCAR, the conditions suitable for integration of the VCAR or a sequence encoding the VCAR of the disclosure comprise at least one of a buffer and one or more supplemental factor(s). In certain embodiments, a transposon or vector of the disclosure comprise the VCAR or a sequence encoding the VCAR of the disclosure. In certain embodiments, the buffer may comprise PBS, HBSS, OptiMEM, BTXpress, Amaxa Nucleofector, Human T cell nucleofection buffer or any combination thereof. In certain embodiments, the one or more supplemental factor(s) may comprise (a) a recombinant human cytokine, a chemokine, an interleukin or any combination thereof; (b) a salt, a mineral, a metabolite or any combination thereof; (c) a cell medium; (d) an inhibitor of cellular DNA sensing, metabolism, differentiation, signal transduction, one or more apoptotic pathway(s) or combinations thereof; and (e) a reagent that modifies or stabilizes one or more nucleic acids. The recombinant human cytokine, the chemokine, the interleukin or any combination thereof may comprise IL2, IL7, IL12, IL15, IL21, IL1, IL3, IL4, IL5, IL6, IL8, CXCL8, IL9, IL10, IL11, IL13, IL14, IL16, IL17, IL18, IL19, IL20, IL22, IL23, IL25, IL26, IL27, IL28, IL29, IL30, IL31, IL32, IL33, IL35, IL36, GM-CSF, IFN-gamma, IL-1 alpha/IL-1F1, IL-1 beta/IL-1F2, IL-12 p70, IL-12/IL-35 p35, IL-13, IL-17/IL-17A, IL-17A/F Heterodimer, IL-17F, IL-18/IL-1F4, IL-23, IL-24, IL-32, IL-32 beta, IL-32 gamma, IL-33, LAP (TGF-beta 1), Lymphotoxin-alpha/TNF-beta, TGF-beta, TNF-alpha, TRANCE/TNFSF11/RANK L or any combination thereof. The salt, the mineral, the metabolite or any combination thereof may comprise HEPES, Nicotinamide, Heparin, Sodium Pyruvate, L-Glutamine, MEM Non-Essential Amino Acid Solution, Ascorbic Acid, Nucleosides, FBS/FCS, Human serum, serum-substitute, anti-biotics, pH adjusters, Earle's Salts, 2-Mercaptoethanol, Human transferrin, Recombinant human insulin, Human serum albumin, Nucleofector PLUS Supplement, KCL, MgCl2, Na2HPO4, NAH2PO4, Sodium lactobionate, Manitol, Sodium succinate, Sodium Chloride, CINa, Glucose, Ca(NO₃)2, Tris/HCl, K2HPO4, KH2PO4, Polyethylenimine, Poly-ethylene-glycol, Poloxamer 188, Poloxamer 181, Poloxamer 407, Poly-vinylpyrrolidone, Pop313, Crown-5, or any combination thereof. The cell medium may comprise PBS, HBSS, OptiMEM, DMEM, RPMI 1640, AIM-V, X-VIVO 15, CellGro DC Medium, CTS OpTimizer T Cell Expansion SFM, TexMACS Medium, PRIME-XV T Cell Expansion Medium, ImmunoCult-XF T Cell Expansion Medium or any combination thereof. The inhibitor of cellular DNA sensing, metabolism, differentiation, signal transduction, one or more apoptotic pathway(s) or combinations thereof comprise inhibitors of TLR9, MyD88, IRAK, TRAF6, TRAF3, IRF-7, NF-KB, Type 1 Interferons, pro-inflammatory cytokines, cGAS, STING, Sec5, TBK1, IRF-3, RNA pol III, RIG-1, IPS-1, FADD, RIP1, TRAF3, AIM2, ASC, Caspasel, Pro-IL1B, PI3K, Akt, Wnt3A, inhibitors of glycogen synthase kinase-30 (GSK-3 3) (e.g., TWS119), Bafilomycin, Chloroquine, Quinacrine, AC-YVAD-CMK, Z-VAD-FMK, Z-IETD-FMK or any combination thereof. The reagent that modifies or stabilizes one or more nucleic acids comprises a pH modifier, a DNA-binding protein, a lipid, a phospholipid, CaPO4, a net neutral charge DNA binding peptide with or without a NLS sequence, a TREX1 enzyme or any combination thereof.

[0075] In certain embodiments of this method of expressing a VCAR, the expansion and selection steps occur sequentially. The expansion may occur prior to selection. The expansion may occur following selection, and, optionally, a further (i.e. second) selection may occur following expansion.

[0076] In certain embodiments of this method of expressing a VCAR, the expansion and selection steps may occur simultaneously.

[0077] In certain embodiments of this method of expressing a VCAR, the expansion may comprise contacting at least one cell of the modified cell population with an antigen to stimulate the at least one cell through the VCAR, thereby generating an expanded cell population. The antigen may be presented on the surface of a substrate. The substrate may have any form, including, but not limited to a surface, a well, a bead or a plurality thereof, and a matrix. The substrate may further comprise a paramagnetic or magnetic component. In certain embodiments of this method of expressing a VCAR, the antigen may be presented on the surface of a substrate, wherein the substrate is a magnetic bead, and wherein a magnet may be used to remove or separate the magnetic beads from the modified and expanded cell population. The antigen may be presented on the surface of a cell or an artificial antigen presenting cell. Artificial antigen presenting cells of the disclosure may include, but are not limited to, tumor cells and stem cells.

[0078] In certain embodiments of this method of expressing a VCAR, wherein the transposon or vector comprises a selection gene and wherein the selection step comprises contacting at least one cell of the modified cell population with a compound to which the selection gene confers resistance, thereby identifying a cell expressing the selection gene as surviving the selection and identifying a cell failing to express the selection gene as failing to survive the selection step.

[0079] In certain embodiments of this method of expressing a VCAR, the expansion and/or selection steps may proceed for a period of 10 to 14 days, inclusive of the endpoints.

[0080] The disclosure provides a composition comprising the modified, expanded and selected cell population of the methods of the disclosure.

[0081] The disclosure provides a method of treating cancer in a subject in need thereof, comprising administering to the subject a composition of the disclosure, wherein the VCAR specifically binds to an antigen on a tumor cell. In certain embodiments, the tumor cell may be a malignant tumor cell. In certain embodiments, comprising administering to the subject the composition comprising a modified cell or cell population of the disclosure, the cell or cell population may be autologous. In certain embodiments, comprising administering to the subject the composition comprising a modified cell or cell population of the disclosure, the cell or cell population may be allogeneic.

[0082] The disclosure provides a method of treating an autoimmune condition in a subject in need thereof, comprising administering to the subject a composition of the disclosure, wherein the VCAR specifically binds to an antigen on an autoimmune cell of the subject. In certain embodiments, the autoimmune cell may be a lymphocyte that specifically binds to a self-antigen on a target cell of the subject. In certain embodiments, the autoimmune cell may be a B lymphocyte (i.e. a B cell). In certain embodiments, the autoimmune cell may be a T lymphocyte (i.e. a T cell). In certain embodiments, comprising administering to the subject the composition comprising a modified cell or cell population of the disclosure, the cell or cell population may be autologous. In certain embodiments, comprising administering to the subject the composition comprising a modified cell or cell population of the disclosure, the cell or cell population may be allogeneic.

[0083] The disclosure provides a method of treating an infection in a subject in need thereof, comprising administering to the subject a composition of the disclosure, wherein the VCAR specifically binds to an antigen on a cell comprising an infectious agent, a cell in communication with an infectious agent or a cell exposed to an infection agent. In some embodiments, a cell in communication with an infectious agent may be in air communication (e.g., the infectious agent is airborne or inhaled) or fluid communication (e.g., the infectious agent is carried in an aqueous or a biological fluid) with the infectious agent. The infectious agent causing the infection of the host cell may be a bacterium, a virus, a yeast, or a microbe. The infectious agent may induce in the cell or the cell's host organism (the subject), exemplary conditions including, but not limited to, a viral infection, an immunodeficiency condition, an inflammatory condition and a proliferative disorder. In certain embodiments, the infection causes tuberculosis, microencephaly, neurodegeneration or malaria. In certain embodiments, the infection causes microencephaly in a fetus of the subject. In certain embodiments, including those wherein the infection causes microencephaly in a fetus of the subject, the infectious agent is a virus and wherein the virus is a Zika virus. In certain embodiments, the immunodeficiency condition is acquired immune deficiency syndrome (AIDS). In certain embodiments, the proliferative disorder is a cancer. In certain embodiments, the cancer is cervical cancer and wherein the infectious agent is a human papilloma virus (HPV). In certain embodiments, comprising administering to the subject the composition comprising a modified cell or cell population of the disclosure, the cell or cell population may be autologous. In certain embodiments, comprising administering to the subject the composition comprising a modified cell or cell population of the disclosure, the cell or cell population may be allogeneic.

[0084] The disclosure provides a method of treating a mast cell disease in a subject in need thereof, comprising administering to the subject a composition of the disclosure, wherein the VCAR specifically binds to an antigen on a mast cell. In certain embodiments, the VCAR specifically binds to an antigen on a mast cell of the subject. In certain embodiments, the mast cell disease may include, but is not limited to, disorders associated with an excessive proliferation of mast cells, disorders associated with mast cells having abnormal activity, and disorders associated with both abnormal numbers of mast cells and abnormal mast cell activity. Exemplary disorders associated with an excessive proliferation of mast cells include, but are not limited to, mastocytosis, cutaneous mastocytosis (e.g., urticaria pigmentosa or maculopapular cutaneous mastocytosis), systemic mastocytosis (including mast cell leukaemia), and localized mast cell proliferations. Exemplary disorders associated with mast cells having abnormal activity, include, but are not limited to, mast cell activation syndrome (MCAS) or mast cell activation disorder (MCAD), allergic disease (including anaphylaxis), asthma, inflammatory disease (including autoimmune related inflammation of, for example, joint tissues, arthritis, etc.), or any combination thereof. In certain embodiments, comprising administering to the subject the composition comprising a modified cell or cell population of the disclosure, the cell or cell population may be autologous. In certain embodiments, comprising administering to the subject the composition comprising a modified cell or cell population of the disclosure, the cell or cell population may be allogeneic. The disclosure provides a method of treating a degenerative disease in a subject in need thereof, comprising administering to the subject a composition of the disclosure, wherein the VCAR specifically binds to an antigen on a deleterious cell or an aged cell. In certain embodiments, the VCAR specifically binds to an antigen on a deleterious cell or an aged cell of the subject. In certain embodiments, the degenerative disease may include, but is not limited to, a neurodegenerative disorder, a metabolic disorder, a vascular disorder and aging. Exemplary neurodegenerative disorders include, but are not limited to, disorders associated with a loss of a function or efficacy of one or more of a neuron, a glial cell or a microglia. Exemplary neurodegenerative disorders include, but are not limited to, disorders associated with an accumulation of one or more of a signaling molecule, a protein, or a prion that interferes with a function or decreases an efficacy of one or more of a neuron, a glial cell or a microglia. Exemplary metabolic disorders include, but are not limited to, disorders associated with mitochondrial disorders, interruptions of the electron transport chain, interruptions of cellular production of ATP, a loss of a function or a decreased efficacy of one or more mitochondria of one or more of a neuron, a glial cell or a microglia. Exemplary metabolic disorders include, but are not limited to, disorders associated with a loss of circulating blood flow or a decreased blood flow to a neuron, a glial cell or a microglia (e.g., a stroke); a transient or permanent state of hypoxia in a neuron, a glial cell or a microglia (for example, sufficient to release free radicals in a cell); a loss of circulating CNS or a decreased CNS flow to a neuron, a glial cell or a microglia during a sleep state of the subject sufficient to decrease efficacy of removal of a waste product of a neuron, a glial cell or a microglia during that sleep state. Exemplary aging disorders include, but are not limited to, disorders associated with an increased shortened or shortened telomeres on one or more chromosomes of a neuron, a glial cell or a microglia; a loss of a function or a decreased efficacy of telomerase in a neuron, a glial cell or a microglia; or a loss of a function or a decreased efficacy of a DNA repair mechanism in a neuron, a glial cell or a microglia. In certain embodiments, the deleterious cell or the aged cell interferes with a function or decreases an efficacy of another cell in a network comprising the deleterious cell or the aged cell and the targeted removal of the deleterious cell or the aged cell improves or restores a function or increases an efficacy of the network. In certain embodiments, the deleterious cell or the aged cell may transform the function or efficacy of a second cell and the targeted removal of the deleterious cell or the aged cell prevents the transformation of the second cell. In certain embodiments, the degenerative disease is a neurodegenerative disorder and the deleterious cell or the aged cell is a stem cell, an immune cell, a neuron, a glia or a microglia. In certain embodiments, the degenerative disease is a metabolic disorder and the deleterious cell or the aged cell is a stem cell, a somatic cell, a neuron, a glia or a microglia. In certain embodiments, the degenerative disease is a vascular disorder and the deleterious cell or the aged cell is a stem cell, a somatic cell, an immune cell, an endothelial cell, a neuron, a glia or a microglia. In certain embodiments, the degenerative disease is aging and the deleterious cell or the aged cell is an oocyte, a sperm, a stem cell, a somatic cell, an immune cell, an endothelial cell, a neuron, a glia or a microglia. In certain embodiments, comprising administering to the subject the composition comprising a modified cell or cell population of the disclosure, the cell or cell population may be autologous. In certain embodiments, comprising administering to the subject the composition comprising a modified cell or cell population of the disclosure, the cell or cell population may be allogeneic.

[0085] The disclosure provides a method of modifying a cell therapy in a subject in need thereof, comprising administering to the subject a composition comprising a cell comprising a transposon or vector of the composition comprising an inducible proapoptotic polypeptide, wherein apoptosis may be selectively induced in the cell by contacting the cell with an induction agent. In certain embodiments, the cell is autologous. In certain embodiments, the cell is allogeneic. In certain embodiments of this method, the cell therapy is an adoptive cell therapy. In certain embodiments of this method, modifying the cell therapy comprises a termination of the cell therapy. In certain embodiments of this method, modifying the cell therapy comprises a depletion of a portion of the cells provided in the cell therapy. In certain embodiments, the method further comprises the step of administering an inhibitor of the induction agent to inhibit modification of the cell therapy, thereby restoring the function and/or efficacy of the cell therapy.

[0086] Methods of modifying a cell therapy of the disclosure may be used to terminate or dampen a therapy in response to, for example, a sign of recovery or a sign of decreasing disease severity/progression, a sign of disease remission/cessation, and/or the occurrence of an adverse event. Cell therapies of the disclosure may be resumed by inhibiting the induction agent should a sign or symptom of the disease reappear or increase in severity and/or an adverse event is resolved.

### BRIEF DESCRIPTION OF THE DRAWINGS

[0087] FIG. 1 is a plot showing weight change versus days post treatment for VCARs of the disclosure.

[0088] FIG. 2 is a plot showing tumor burden versus days post treatment in for VCARs of the disclosure.

[0089] FIG. 3 is a plot showing percent survival versus days post treatment for VCARs of the disclosure.

[0090] FIG. 4 is a plot of tumor burden as shown by bioluminescence signal versus days post treatment of VH-A (triangles), an irrelevant CAR (squares) or no tumor/no CAR-T (circles).

[0091] FIG. 5 is a plot of tumor burden as shown by bioluminescence signal versus days post treatment of VH-B (triangles), an irrelevant CAR (squares) or no tumor/no CAR-T (circles).

[0092] FIG. 6 is a plot of tumor burden as shown by bioluminescence signal versus days post treatment of VH-C(triangles), an irrelevant CAR (squares) or no tumor/no CAR-T (circles).

[0093] FIG. 7 is a plot of tumor burden as shown by bioluminescence signal versus days post treatment of VH-D (triangles), an irrelevant CAR (squares) or no tumor/no CAR-T (circles).

[0094] FIG. 8 a plot of tumor burden as shown by bioluminescence signal versus days post treatment of VH-E (triangles), an irrelevant CAR (squares) or no tumor/no CAR-T (circles).

[0095] FIG. 9 a plot of tumor burden as shown by bioluminescence signal versus days post treatment of VH-F (triangles), an irrelevant CAR (squares) or no tumor/no CAR-T (circles).

[0096] FIG. 10A is a table providing consensus sequences of framework and CDR sequences for exemplary VHs of the disclosure.

[0097] FIG. 10B is an alignment of exemplary VHs of the disclosure. From top to bottom, the sequences correspond with the consensus sequences of the frameworks VH-B (SEQ ID NO: 18050), VH-D (SEQ ID NO: 18051), VH-A (SEQ ID NO: 18052), VH-E (SEQ ID NO: 18053), VH-F (SEQ ID NO: 18054) and VH-C(SEQ ID NO: 18055).

[0098] FIG. 11 is a bar graph depicting the knock out efficiency of checkpoint signaling proteins on armored T-cells. Primary human T-cells are typically in resting state when isolated from normal healthy donors. Cas-CLOVER was used to knockout the checkpoint receptors, PD-1, TGFBR2, LAG-3, TIM-3 and CTLA-4. Percent knock-out is shown on the y-axis. Gene editing resulted in 30-70% loss of protein expression at the cell surface as measured by flow cytometry.

[0099] FIG. 12 are schematic diagrams of wildtype, null and switch receptors and their effects on intracellular signaling, either inhibitory or stimulatory, in primary T-cells. Binding of the wildtype inhibitory receptor expressed endogenously on a T-cell with its endogenous ligand results in transmission of an inhibitory signal which, in part, reduces T-cell effector function. However, mutation (Mutated null) or deletion (Truncated null) of the intracellular domain (ICD) of a checkpoint receptor protein, such as PD1 (top panel) or TGFβRII (bottom panel), reduces or eliminates its signaling capability when cognate ligand(s) is bound. Thus, expression of engineered mutated or truncated null receptors on the surface of modified T cells results in a competition with endogenously-expressed wildtype receptors for binding of the free endogenous ligand(s), effectively reducing or eliminating delivery of inhibitory signals by endogenously-expressed wildtype receptors. Specifically, any binding by a mutated or null receptor sequesters the endogenous ligand(s) from binding the wildtype receptor and results in dilution of the overall level of checkpoint signaling effectively delivered to the modified T-cell, thereby reducing or blocking checkpoint inhibition and functional exhaustion of the modified T cells. A switch receptor is created by replacement of the wildtype ICD with an ICD from either a co-stimulatory molecule (such as CD3z, CD28, 4-1BB) or a different inhibitory molecule (such as CTLA4, PD1, Lag3). In the former case, binding of the endogenous ligand(s) by the modified switch receptor results in the delivery of a positive signal to the T-cells, thereby helping to enhance stimulation of the modified T cell and potentially enhance target tumor cell killing. In the latter case, binding of the endogenous ligand(s) by the modified switch receptor results in the delivery of a negative signal to the T-cells, thereby eliminating stimulation of the modified T cell and potentially reducing target tumor cell killing. The signal peptide (purple arrow), extracellular domain (ECD) (bright green), transmembrane domain (yellow), intracellular signaling domain (ICD)(orange), and replacement ICD (green) are displayed in the receptor diagrams. “*” indicates a mutated ICD. “+” indicates the presence of a checkpoint signal. “−” indicates the absence of a checkpoint signal.

[0100] FIG. 13 is a schematic diagram showing the design of PD1 and TGFβRII null receptors. The signal peptide domain (SP), transmembrane domain™ and extracellular domain (ECD) of truncated null receptors for PD1 (top panel) and TGFβRII (bottom panel) are shown. The first of the top four molecules is the wildtype PD-1 receptor, which encodes the wildtype PD-1 SP and TM. For the PD1 null receptor, replacement of PD1 wildtype SP or TM domain (green; light green) with the SP or TM domain of a human T cell CD8a receptor (red) is depicted. The second molecule encodes the CD8a SP along with the native PD-1 TM, the third encodes the wildtype PD-1 SP and the alternative CD8a TM, and the fourth encodes both the alternative CD8a SP and TM. Similarly, for the null receptor of TGFβRII, replacement of the wildtype TGFβRII SP (pink) with a SP domain of a human T cell CD8a receptor (red). The names of the constructs and the amino acid lengths (aa) of each construct protein is listed on the left of the diagram.

[0101] FIG. 14 is a series of histograms depicting the expression of the PD1 and TGFβRII null Receptors on the surface of primary human T cells determined by flow cytometry. Each of the six truncated null constructs from FIG. 13 were expressed on the surface of primary human T cells. T cells were stained with either anti-PD1 (top; blue histograms) or anti-TGFβRII (bottom; blue histograms), or isotype control or secondary only (gray histograms). Cells staining positive for PD-1 or TGFβRII expression were gated (frequency shown above gate) and mean fluorescence intensity (MFI) value is displayed above each positive histogram. The names of the null receptor constructs are depicted above each plot. Both null receptor gene strategies, replacement of the wildtype SP with the alternative CD8a were successfully expressed. 02.8aSP-PD-1 and 02.8aSP-TGFβRII resulted in the highest level of expression at the T-cell surface. 02.8aSP-PD-1 null receptor exhibited an MFI of 43,680, which is 177-fold higher than endogenous T cell PD-1 expression and 2.8-fold higher than the wildtype PD-1 null receptor. 02.8aSP-TGFβRII null receptor exhibited an MFI of 13,809, which is 102-fold higher than endogenous T cell TGFβRII expression and 1.8-fold higher than the wildtype TGFβRII null receptor. Replacement of wildtype SP with the alternative CD8a SP for both PD1 and TGRBRII results in enhanced surface expression of the null or Switch receptor, which helps to maximize checkpoint inhibition or co-stimulation, respectively, upon binding of the endogenous ligand(s).

[0102] FIG. 15A-B is a pair of schematic diagrams depicting NF-KB inducible vectors for expression in T-cells. Two T cell activation NF-KB inducible vectors were developed; one with the gene expression system (GES) in the forward orientation (A) and the other in the complementary direction (B), both preceding the constitutive EF1a promoter. These vectors also direct expression of a CAR molecule and a DHFR selection gene, separated by a T2A sequence. Both the conditional NF-KB inducible system and the EF1a directed genes are a part of a piggyBac transposon that can be permanently integrated into T cells using electroporation (EP). Once integrated into the genome, the T cells will constitutively express the CAR on the membrane surface and the DHFR within the cell, while expression of the NF-KB inducible gene, GFP, will be expressed to the highest level only upon T cell activation.

[0103] FIG. 16 is a pair of graphs depicting NF-KB inducible expression of GFP in activated T cells. T cells were nucleofected with a piggyBac vector expressing an anti-BCMA CAR and a DHFR mutein gene under control of an EF1a promoter along with the absence (No GES control) or presence of an NF-KB inducible expression system driving GFP expression in either the forward (pNFKB-GFP forward) or reverse orientation (pNFKB-GFP reverse). Cells were cultured in the presence of methotrexate selection until the cells were almost completely resting (Day 19) and GFP expression was assessed at Day 5 and Day 19. At Day 5, all T cells are proliferating and highly stimulated, with cells harboring the NF-KB inducible expression cassette producing high levels of GFP due to strong NFxB activity. The No GES control cells did not express detectable levels of GFP. By Day 19, the GES T cells were almost fully resting and GFP expression was significantly lower than Day 5 (~1/8 MFI), since NFxB activity is lower. GFP expression is still observed at Day 19, which may due to the long half-life of GFP protein (~30 hr), or, basal level of NFxB activity through, for example, a TCR, a CAR, a cytokine receptor, or a growth factor receptor signal.

[0104] FIG. 17 is a series of graphs depicting anti-BCMA CAR-mediated activation of NF-KB inducible expression of GFP in presence of BCMA+ tumor cells. T cells were either unmodified (Mock T cells) or nucleofected with a piggyBac vector expressing an anti-BCMA CAR and a DHFR mutein gene under control of an EF1a promoter along with the absence (No GES control) or presence of an NF-KB inducible expression system driving GFP expression in either the forward (pNFKB-GFP forward) or reverse orientation (pNFKB-GFP reverse). All cells were cultured for 22 days, either with or without methotrexate selection (Mock T cells), until the cells were almost completely resting. Cells were then stimulated for 3 days in the absence (No stimulation) or presence of BCMA- (K562), BMCA+(RPMI 8226), or positive control anti-CD3 anti-CD28 activation reagent (CD3/28 stimulation). GFP expression was undetectable under all conditions with the No GES control or Mock T cells. However, while pNFKB-GFP forward- and reverse-transposed cells exhibited little GFP expression over the No stimulation control when cultured with BCMA- K562 cells, they both demonstrated dramatic upregulation of gene expression either in the presence of BCMA+ tumor cells or under positive control conditions. Little difference in GFP expression was observed between the pNFKB-GFP forward- and reverse-transposed cells that were cocultured with BCMA+ tumor cells.

[0105] FIG. 18 is a series of graphs demonstrating that the Expression level of inducible gene can be regulated by number of response elements preceding the promoter T cells were nucleofected with a piggyBac vector encoding an anti-BCMA CARTyrin followed by a selection gene, both under control of a human EF1a promoter. Further, vectors either additionally encoded the conditional NF-KB inducible gene expression system driving expression of a truncated CD19 protein (dCD19) and included a number of NFKB response elements (RE) varying from 0-5, no GES (No GES), or received an electroporation pulse but no piggyBac nucleic acid (Mock). Data are shown for only the GES in the reverse (opposite) direction/orientation. All cells were cultured for 18 days and included selection for piggyBac-modified T cells using methotrexate addition. Cells were then stimulated for 3 days using anti-CD3 anti-CD28 bead activation reagent and dCD19 surface expression was assessed by FACS at Days 0, 3 and 18, and data are shown as FACS histograms and MFI of target protein staining. Surface dCD19 expression was detected at low levels at Day 0 in all T cells transposed with vectors encoding the GES. At 3 days post-stimulation, dramatic upregulation of dCD19 expression was observed for all T cells expressing the GES, with a greater fold increase in surface expression in those with higher numbers of REs. Thus, surface dCD19 expression was directly proportional with the number of REs encoded in the GES. No dCD19 was detected on the surface of T cells that did not harbor the GES: No GES and Mock controls.

[0106] FIG. 19 is a schematic depiction of the Csy4-T2A-Clo051-G4Slinker-dCas9 construct map (Embodiment 2).

[0107] FIG. 20 is a schematic depiction of the pRT1-Clo051-dCas9 Double NLS construct map (Embodiment 1).

[0108] FIG. 21 is a pair of graphs comparing the efficacy of knocking out expression of either B2M in Pan T-cells (left) or the α-chain of the T-cell Receptor in Jurkat cells (right) for either Embodiment 1 (pRT1-Clo051-dCas9 Double NLS, as shown in FIG. 20) or Embodiment 2 (Csy4-T2A-Clo051-G4Slinker-dCas9, as shown in FIG. 19) of a Cas-Clover fusion protein of the disclosure. For the right-hand graph, the fusion protein is provided at either 10 μg or 20 μg, as indicated.

[0109] FIG. 22 is a photograph of a gel electrophoresis analysis of mRNA in the presence of each of Embodiment 1 (pRT1-Clo051-dCas9 Double NLS, as shown in FIG. 20) and Embodiment 2 (Csy4-T2A-Clo051-G4Slinker-dCas9, as shown in FIG. 19). As shown, both are effective at knocking down mRNA expression.

[0110] FIG. 23 is a diagram of the UniRat™ Human Heavy Chain Antibody production platform.

[0111] FIG. 24 is a diagram of the pipeline of immunization, B-cell isolation, mRNA purification, Next Generation Sequencing (NGS), bioinformatics analysis, high-throughput vector assembly and high-throughput expression and screening used to identify the full antigen-specific repertoire of heavy-chain antibodies generated by the UniRat™ after immunization. Unique gene assembly methods convert the antibody repertoire sequence information into large collections of fully human heavy chain antibodies that can be screened for a variety of functions.

[0112] FIG. 25 is a pair of heat maps showing how next generation sequencing (NGS) analysis reveals expanded VH sequence lineages. The degree of red (high) or blue (low) in the heatmap indicates expanded VH sequence families due to immunization. Some highly ranked VH sequences are unique to a single animal. Other highly ranked VH sequences appear in more than one anitmal suggesting convergent selection of those sequence families.

[0113] FIG. 26 is a series of flow cytometry plots showing that a CAR-T population expressing P-PSMA-101 and comprising a mixture of T_{SCM}/T_{CM}, give rise to CAR+ T_{CM}, T_{EM}, and Teff to attack solid tumor. After solid tumor elimination, a population of CAR-T+ T_{SCM}persists. Although demonstrated with a CARTyrin, this principle shown here applies to VCAR+T_{SCM} and VCAR+ T_{CM} populations of the disclosure. Specifically, a murine xenograft model using a luciferase-expressing LNCaP cell line (LNCaP.luc) injected subcutaneously (SC) into NSG mice was utilized to assess in vivo anti-tumor efficacy of a CAR (P-PSMA5-101 and P-PSMA8-101) at a ‘stress’ dose (4×10\hat{ }6) total CAR-T cells. For these in vivo studies, all CAR-T cells were produced using PB delivery of either the P-PSMA5-101 or P-PSMA8-101 plasmid using the Poseida manufacturing process. Mice were injected in the axilla with LNCaP and treated when tumors were established (100-300 mm³ by caliper measurement). Mice were treated with a ‘stress’ dose (4×10\hat{ }6) of P-PSMA-101 by IV injection in order to tease out any possible differences in efficacy between the PSMA5 and the PSMA8 CARs. Anti-tumor activity was evaluated by survival, CD8+ T cell expansion and detection in the blood, tumor volume assessment by caliper measurement, and bioluminescence of LNCaP tumor. P-PSMA5-101 and P-PSMA8-101 at a ‘stress’ dose demonstrated significantly enhanced anti-tumor efficacy and survival in comparison to the T cells (no CAR) control mice against established SC LNCaP.luc solid tumors in NSG mice. Specifically, there was no survival in T cells (no CAR) control animals, 25% survival in the P-BCMA-101 treated group, 75% survival in the P-PSMA5-101 treated group, and 100% survival in animals treated with a ‘stress’ dose of P-PSMA8-101. In the peripheral blood, P-PSMA5-101 and P-PSMA8-101 expanded and gave rise to differentiated effector CARTyrin+ T-cells that were concomitant with a decrease in tumor burden below detectable caliper and bioluminescent imaging limits. These cells then contracted, yet persisted in the peripheral blood.

### DETAILED DESCRIPTION

[0114] The disclosure provides chimeric antigen receptors (CARs) comprising at least one VHH (VCAR). Chimeric antigen receptors of the disclosure may comprise more than one VHH. For example, a bi-specific VCAR may comprise two VHHs that specifically bind two distinct antigens.

[0115] VHH proteins of the disclosure specifically bind to an antigen. Chimeric antigen receptors of the disclosure comprising one or more VHHs that specifically bind an antigen may be used to direct the specificity of a cell, (e.g., a cytotoxic immune cell) towards the specific antigen.

[0116] The disclosure provides chimeric antigen receptors (CARs) an antigen recognition region comprising a single domain antibody (VCARs). In some embodiments, the single domain antibody is a VHH antibody. In some embodiments, the single domain antibody is a VH antibody.

[0117] Chimeric antigen receptors of the disclosure may comprise a signal peptide of human CD2, CD3δ, CD3ε, CD3γ, CD3ξ, CD4, CD8α, CD19, CD28, 4-1BBor GM-CSFR. A hinge/spacer domain of the disclosure may comprise a hinge/spacer/stalk of human CD8α, IgG4, and/or CD4. An intracellular domain or endodomain of the disclosure may comprise an intracellular signaling domain of human CD3ξ and may further comprise human 4-1BB, CD28, CD40, ICOS, MyD88, OX-40 intracellular segment, or any combination thereof. Exemplary transmembrane domains include, but are not limited to a human CD2, CD3δ, CD3ε, CD3γ, CD3ξ, CD4, CD8α, CD19, CD28, 4-1BBor GM-CSFR transmembrane domain.

[0118] The disclosure provides genetically modified cells, such as T cells, NK cells, hematopoietic progenitor cells, peripheral blood (PB) derived T cells (including T cells from G-CSF-mobilized peripheral blood), umbilical cord blood (UCB) derived T cells rendered specific for one or more antigens by introducing to these cells a VCAR of the disclosure. Cells of the disclosure may be modified by electrotransfer of a transposon encoding a VCAR of the disclosure and a plasmid comprising a sequence encoding a transposase of the disclosure (preferably, the sequence encoding a transposase of the disclosure is an mRNA sequence).

### VHs of the Disclosure

[0119] The disclosure provides chimeric antigen receptors (CARs) comprising a single domain antibody (VCARs). In some embodiments, the single domain antibody comprises a VH. In some embodiments, the VH is isolated or derived from a human sequence. In some embodiments, VH comprises a human CDR sequence and/or a human framework sequence and a non-human or humanized sequence (e.g., a rat Fc domain). In some embodiments, the VH is a fully humanized VH. In some embodiments, the VH s neither a naturally occurring antibody nor a fragment of a naturally occurring antibody. In some embodiments, the VH is not a fragment of a monoclonal antibody. In some embodiments, the VH is a UniDab™ antibody (TeneoBio).

[0120] In some embodiments, the VH is fully engineered using the UniRat™ (TeneoBio) system and “NGS-based Discovery” to produce the VH. Using this method, the specific VH are not naturally-occurring and are generated using fully engineered systems. The VH are not derived from naturally-occurring monoclonal antibodies (mAbs) that were either isolated directly from the host (for example, a mouse, rat or human) or directly from a single clone of cells or cell line (hybridoma). These VHs were not subsequently cloned from said cell lines. Instead, VH sequences are fully-engineered using the UniRat™ system as transgenes that comprise human variable regions (VH domains) with a rat Fc domain, and are thus human/rat chimeras without a light chain and are unlike the standard mAb format. The native rat genes are knocked out and the only antibodies expressed in the rat are from transgenes with VH domains linked to a Rat Fc (UniAbs). These are the exclusive Abs expressed in the UniRat. Next generation sequencing (NGS) and bioinformatics are used to identify the full antigen-specific repertoire of the heavy-chain antibodies generated by UniRat™ after immunization. Then, a unique gene assembly method is used to convert the antibody repertoire sequence information into large collections of fully-human heavy-chain antibodies that can be screened in vitro for a variety of functions. In some embodiments, fully humanized VH are generated by fusing the human VH domains with human Fcs in vitro (to generate a non-naturally occurring recombinant VH antibody). In some embodiments, the VH are fully humanized, but they are expressed in vivo as human/rat chimera (human VH, rat Fc) without a light chain. Fully humanized VHs are expressed in vivo as human/rat chimera (human VH, rat Fc) without a light chain are about 80 kDa (vs 150 kDa).

[0121] VCARs of the disclosure may comprise at least one VH of the disclosure. In some embodiments, the VH of the disclosure may be modified to remove an Fc domain or a portion thereof. In some embodiments, a framework sequence of the VH of the disclosure may be modified to, for example, improve expression, decrease immunogenicity or to improve function.

### Exemplary VCARs of the Disclosure

[0122] In some embodiments of the VCARs of the disclosure, the VCAR comprises at least one of an amino acid sequence of at least 95%, at least 96%, at least 97%, at least 98% or at least 99% identity to the amino acid sequence of:

VH-A:
(SEQ ID NO: 18000)
malpvtalllplalllhaarpevqllesggglvqpggslrlscaasgftf
ssyamnwvrqapgkglewvagiigsggstyyadsvkgrfsisrdnskntl
dlqmnslraedtavyycvkdwnttmitergqgtlvtvsstttpaprpptp
aptiasqplslrpeacrpaaggavhtrgldfacdiyiwaplagtcgvlll
slvitlyckrgrkkllyifkqpfmrpvqttqeedgcscrfpeeeeggcel
rvkfsrsadapaykqgqnqlynelnlgrreeydvldkrrgrdpemggkpr
rknpqeglynelqkdkmaeayseigmkgerrrgkghdglyqglstatkdt
ydalhmqalppr.

[0123] In some embodiments of the VCARs of the disclosure, the amino acid sequence of the VCAR is encoded by a nucleotide sequence comprising a sequence of at least 95%, at least 96%, at least 97%, at least 98% or at least 99% identity to the nucleotide sequence of:

VH-A:
(SEQ ID NO: 18001)
atggctctgcctgtgacagctctgctgctgcctctggctctgcttcttca
tgcggcgcgccctgaagttcagctgcttgaatctggcggaggcctggttc
aacctggcggatctctgagactgagctgtgccgccagcggcttcaccttt
agcagctacgccatgaactgggtccgacaggcccctggcaaaggactgga
atgggtggccggaatcatcggcagcggcggcagcacatattacgccgatt
ctgtgaagggccgcttcagcatcagccgggacaacagcaagaacaccctg
gacctgcagatgaacagcctgagagccgaggataccgccgtgtactactg
cgtgaaggattggaacaccaccatgatcaccgagagaggccagggcacac
tggtcaccgtgtcctctacaacaacaccggcgcctcggcctccaacacca
gctcctacaatcgcgagtcagcccctgtctctcagacccgaagcctgtag
acctgctgctggcggagctgtgcataccagaggactggatttcgcctgcg
acatctacatctgggctcctctggctggcacatgcggagttttgctgctg
agcctggtcatcaccctgtactgtaagagaggcaggaagaagctgctgta
tatcttcaagcagcccttcatgagacccgtgcagaccacacaggaggagg
acggctgctcttgtaggttcccagaggaggaggagggaggatgcgagctg
cgcgtgaagtttagccggtccgccgatgcacctgcatacaagcagggaca
gaaccagctgtataacgagctgaatctgggccggagagaggagtacgacg
tgctggataagaggcggggccgggaccccgagatgggaggcaagcctcgg
agaaagaacccacaggagggcctgtacaatgagctgcaaaaggacaagat
ggccgaggcctattctgagatcggcatgaagggagagaggcgccggggca
agggacacgatggcctgtaccagggcctgagcaccgccacaaaggacacc
tatgatgccctgcacatgcaggccctgccccctagatga.

[0124] In some embodiments of the VCARs of the disclosure, the VCAR comprises at least one of an amino acid sequence of at least 95%, at least 96%, at least 97%, at least 98% or at least 99% identity to the amino acid sequence of:

VH-B:
(SEQ ID NO: 18002)
malpvtalllplalllhaarpevqllesggglyqpggsltlscaasgftf
snyamnwvrqapgkglewysgiigsgattyyadsvkgrftisrdnskntl
nlqmnslraedtaiyycvkdwnttmitergqgtlvtvsstttpaprpptp
aptiasqplslrpeacrpaaggavhtrgldfacdiyiwaplagtcgvlll
slvitlyckrgrkkllyifkqpfmrpvqttqeedgcscrfpeeeeggcel
rvkfsrsadapaykqgqnqlynelnlgrreeydvldkrrgrdpemggkpr
rknpqeglynelqkdkmaeayseigmkgerrrgkghdglyqglstatkdt
ydalhmqalppr.

[0125] In some embodiments of the VCARs of the disclosure, the amino acid sequence of the VCAR is encoded by a nucleotide sequence comprising a sequence of at least 95%, at least 96%, at least 97%, at least 98% or at least 99% identity to the nucleotide sequence of:

VH-B
(SEQ ID NO: 18003)
atggctctgcctgtgacagctctgctgctgcctctggctctgcttcttca
tgcggcgcgccctgaagttcagctgcttgaatctggcggaggcctggttc
aacctggcggatctctgacactgagctgtgccgccagcggcttcaccttc
agcaactacgccatgaactgggtccgacaggcccctggcaaaggccttga
atgggtgtccggcatcattggctctggcgccaccacctactacgccgatt
ctgtgaagggcagattcaccatcagccgggacaacagcaagaacaccctg
aacctgcagatgaacagcctgagagccgaggacaccgccatctactactg
cgtgaaggactggaacaccaccatgatcaccgagagaggccagggcacac
tggtcaccgtgtcctctacaacaacaccggcgcctcggcctccaacacca
gctcctacaatcgcgagtcagcccctgtctctcagacccgaagcctgtag
acctgctgctggcggagctgtgcataccagaggactggatttcgcctgcg
acatctacatctgggctcctctggctggcacatgcggagttttgctgctg
agcctggtcatcaccctgtactgtaagagaggcaggaagaagctgctgta
tatcttcaagcagccatcatgagacccgtgcagaccacacaggaggagga
cggctgctcttgtaggttcccagaggaggaggagggaggatgcgagctgc
gcgtgaagtttagccggtccgccgatgcacctgcatacaagcagggacag
aaccagctgtataacgagctgaatctgggccggagagaggagtacgacgt
gctggataagaggcggggccgggaccccgagatgggaggcaagcctcgga
gaaagaacccacaggagggcctgtacaatgagctgcaaaaggacaagatg
gccgaggcctattctgagatcggcatgaagggagagaggcgccggggcaa
gggacacgatggcctgtaccagggcctgagcaccgccacaaaggacacct
atgatgccctgcacatgcaggccctgccccctagatgac.

[0126] In some embodiments of the VCARs of the disclosure, the VCAR comprises at least one of an amino acid sequence of at least 95%, at least 96%, at least 97%, at least 98% or at least 99% identity to the amino acid sequence of:

VH-C:
(SEQ ID NO: 18004)
malpvtalllplalllhaarpevqllesggglvqpgeslrlscaasgftf
snyamnwvrqapgkglewvsgivggggtsyyadsvrgrftisrdnskntl
ylqmnslraedtavyycvkdwnttmitergqgtlvtvsstttpaprpptp
aptiasqplslrpeacrpaaggavhtrgldfacdiyiwaplagtcgvlll
slvitlyckrgrkkllyifkqpfmrpvqttqeedgcscrfpeeeeggcel
rvkfsrsadapaykqgqnqlynelnlgrreeydvldkrrgrdpemggkpr
rknpqeglynelqkdkmaeayseigmkgerrrgkghdglyqglstatkdt
ydalhmqalppr.

[0127] In some embodiments of the VCARs of the disclosure, the amino acid sequence of the VCAR is encoded by a nucleotide sequence comprising a sequence of at least 95%, at least 96%, at least 97%, at least 98% or at least 99% identity to the nucleotide sequence of VH-C:

VH-C:
(SEQ ID NO: 18005)
atggctctgcctgtgacagctctgctgctgcctctggctctgcttcttca
tgcggcgcgccctgaagttcagctgcttgaatctggcggaggcctggttc
agcctggcgaatctctgagactgagctgtgccgccagcggatcaccttca
gcaactacgccatgaactgggtccgacaggcccctggcaaaggccttgaa
tgggtgtccggaatcgttggcggcggaggcacaagctactacgccgattc
tgtgcggggcagattcaccatcagccgggacaacagcaagaacaccctgt
acctgcagatgaacagcctgagagccgaggacaccgccgtgtactactgc
gtgaaggactggaacaccaccatgatcaccgagagaggccagggcacact
ggtcaccgtgtcctctacaacaacaccggcgcctcggcctccaacaccag
ctcctacaatcgcgagtcagcccctgtctctcagacccgaagcctgtaga
cctgctgctggcggagctgtgcataccagaggactggatttcgcctgcga
catctacatctgggctcctctggctggcacatgcggagttttgctgctga
gcctggtcatcaccctgtactgtaagagaggcaggaagaagctgctgtat
atcttcaagcagccatcatgagacccgtgcagaccacacaggaggaggac
ggctgctcttgtaggttcccagaggaggaggagggaggatgcgagctgcg
cgtgaagtttagccggtccgccgatgcacctgcatacaagcagggacaga
accagctgtataacgagctgaatctgggccggagagaggagtacgacgtg
ctggataagaggcggggccgggaccccgagatgggaggcaagcctcggag
aaagaacccacaggagggcctgtacaatgagctgcaaaaggacaagatgg
ccgaggcctattctgagatcggcatgaagggagagaggcgccggggcaag
ggacacgatggcctgtaccagggcctgagcaccgccacaaaggacaccta
tgatgccctgcacatgcaggccctgccccctagatga.

[0128] In some embodiments of the VCARs of the disclosure, the VCAR comprises at least one of an amino acid sequence of at least 95%, at least 96%, at least 97%, at least 98% or at least 99% identity to the amino acid sequence of:

VH-D:
(SEQ ID NO: 18006)
malpvtalllplalllhaarpevqllesggglvqpggslrlscaasgftf
snyamtwirqapgkglewvsgitgdggstfyadsvkgrftisrdnskntl
ylqmnslraedtavyycvkdwnttmitergqgtlvtvsstttpaprpptp
aptiasqplslrpeacrpaaggavhtrgldfacdiyiwaplagtcgvlll
slvitlyckrgrkkllyifkqpfmrpvqttqeedgcscrfpeeeeggcel
rvkfsrsadapaykqgqnqlynelnlgrreeydvldkrrgrdpemggkpr
rknpqeglynelqkdkmaeayseigmkgerrrgkghdglyqglstatkdt
ydalhmqalppr.

[0129] In some embodiments of the VCARs of the disclosure, the amino acid sequence of the VCAR is encoded by a nucleotide sequence comprising a sequence of at least 95%, at least 96%, at least 97%, at least 98% or at least 99% identity to the nucleotide sequence of:

VH-D
(SEQ ID NO: 18007)
atggctctgcctgtgacagctctgctgctgcctctggctctgcttcttca
tgcggcgcgccctgaagttcagctgcttgaatctggcggaggcctggttc
aacctggcggatctctgagactgagctgtgccgccagcggcttcaccttc
agcaattacgccatgacctggatcagacaggcccctggcaaaggcctgga
atgggtgtccggaattacaggcgacggcggcagcaccttttacgccgatt
ctgtgaagggcagattcaccatcagccgggacaacagcaagaacaccctg
tacctgcagatgaacagcctgagagccgaggacaccgccgtgtactactg
cgtgaaggactggaacaccaccatgatcaccgagagaggccagggcacac
tggtcaccgtgtcctctacaacaacaccggcgcctcggcctccaacacca
gctcctacaatcgcgagtcagcccctgtctctcagacccgaagcctgtag
acctgctgctggcggagctgtgcataccagaggactggatttcgcctgcg
acatctacatctgggctcctctggctggcacatgcggagttttgctgctg
agcctggtcatcaccctgtactgtaagagaggcaggaagaagctgctgta
tatcttcaagcagccatcatgagacccgtgcagaccacacaggaggagga
cggctgctcttgtaggttcccagaggaggaggagggaggatgcgagctgc
gcgtgaagtttagccggtccgccgatgcacctgcatacaagcagggacag
aaccagctgtataacgagctgaatctgggccggagagaggagtacgacgt
gctggataagaggcggggccgggaccccgagatgggaggcaagcctcgga
gaaagaacccacaggagggcctgtacaatgagctgcaaaaggacaagatg
gccgaggcctattctgagatcggcatgaagggagagaggcgccggggcaa
gggacacgatggcctgtaccagggcctgagcaccgccacaaaggacacct
atgatgccctgcacatgcaggccctgccccctagatga.

[0130] In some embodiments of the VCARs of the disclosure, the VCAR comprises at least one of an amino acid sequence of at least 95%, at least 96%, at least 97%, at least 98% or at least 99% identity to the amino acid sequence of:

VH-E:
(SEQ ID NO: 18008)
malpvtalllplalllhaarpevqllesggglaqpggslrlscaasgftf
ssyamnwirqapgkglewvsgisgsggstyyadsvkgrftisrdnskntv
ylqmnslraedtavyycvkdwnttmitergqgtlvtvsstttpaprpptp
aptiasqplslrpeacrpaaggavhtrgldfacdiyiwaplagtcgvlll
slvitlyckrgrkkllyifkqpfmrpvqttqeedgcscrfpeeeeggcel
rvkfsrsadapaykqgqnqlynelnlgrreeydvldkrrgrdpemggkpr
rknpqeglynelqkdkmaeayseigmkgerrrgkghdglyqglstatkdt
ydalhmqalppr.

[0131] In some embodiments of the VCARs of the disclosure, the amino acid sequence of the VCAR is encoded by a nucleotide sequence comprising a sequence of at least 95%, at least 96%, at least 97%, at least 98% or at least 99% identity to the nucleotide sequence of:

VH-E
(SEQ ID NO: 18009)
atggcactgcctgtgacagccctgctgctgcctctggccctgctgctgca
cgcagcacggcccgaggtgcagctgctggagtccggaggaggcctggccc
agcctggcggcagcctgaggctgtcctgcgccgcctctggcttcaccttt
agctcctacgccatgaactggatcagacaggcccctggcaagggcctgga
gtgggtgtccggcatctccggctctggaggctctacatactatgccgaca
gcgtgaagggccggttcaccatcagcagagataactccaagaataccgtg
tacctccagatgaactctctgcgggccgaggacaccgccgtgtactattg
cgtgaaggattggaataccacaatgatcacagagaggggccagggcaccc
tggtgacagtgtctagcaccacaacccctgcccccagacctcccacaccc
gcccctaccatcgcgagtcagccactgtccctgcggcctgaggcctgccg
gcccgccgccggcggagcagtgcacacacggggcctggactttgcctgtg
acatctacatatgggcaccactggcaggaacctgcggcgtgctgctgctg
agcctggtcatcaccctgtactgtaagagaggcaggaagaagctgagtat
atcttcaagcagcccttcatgagacccgtgcagaccacacaggaggagga
cggctgacttgtaggttcccagaggaggaggagggaggatgcgagagcgc
gtgaagtttagccggtccgccgatgcacctgcatacaagcagggacagaa
ccagagtataacgagctgaatctgggccggagagaggagtacgacgtgct
ggataagaggcggggccgggaccccgagatgggaggcaagcctcggagaa
agaacccacaggagggcctgtacaatgagagcaaaaggacaagatggccg
aggcctattctgagatcggcatgaagggagagaggcgccggggcaaggga
cacgatggcctgtaccagggcctgagcaccgccacaaaggacacctatga
tgccagcacatgcaggccagccccctagatga.

[0132] In some embodiments of the VCARs of the disclosure, the VCAR at least one of comprises an amino acid sequence of at least 95%, at least 96%, at least 97%, at least 98% or at least 99% identity to the amino acid sequence of:

VH-F:
(SEQ ID NO: 18010)
malpvtalllplalllhaarpevqllesggglvqpgrslrlscaasgftf
tnyamnwvrqapgkglewvsgisggggstyyadsvkgrftisrdnskntl
ylqmnslraedtavyycvkdwnttmitergqgtlvtvsstttpaprpptp
aptiasqplslrpeacrpaaggavhtrgldfacdiyiwaplagtcgvlll
slvitlyckrgrkkllyifkqpfmrpvqttqeedgcscrfpeeeeggcel
rvkfsrsadapaykqgqnqlynelnlgrreeydvldkrrgrdpemggkpr
rknpqeglynelqkdkmaeayseigmkgerrrgkghdglyqglstatkdt
ydalhmqalppr.

[0133] In some embodiments of the VCARs of the disclosure, the amino acid sequence of the VCAR is encoded by a nucleotide sequence comprising a sequence of at least 95%, at least 96%, at least 97%, at least 98% or at least 99% identity to the nucleotide sequence of:

VH-F
(SEQ ID NO: 18011)
atggcactgcctgtgacagccctgctgctgcctctggccctgctgctgca
cgcagcacggcccgaggtgcagctgctggagtctggaggaggcctggtgc
agcccggccggtccctgagactgtcttgcgccgccagcggcttcaccttt
acaaactacgccatgaattgggtgcggcaggcccctggcaagggcctgga
gtgggtgtctggcatcagcggaggaggaggcagcacctactatgcagact
ccgtgaagggcaggttcaccatctcccgcgataactctaagaatacactg
tacctccagatgaacagcctgagggcagaggacaccgccgtgtactattg
cgtgaaggattggaataccacaatgatcacagagaggggacagggcaccc
tggtgaccgtgagcagcaccacaacccctgcccccagacctcccacaccc
gcccctaccatcgcgagtcagccactgtccctgcggcctgaggcctgccg
gcccgccgccggcggagcagtgcacacacggggcctggactttgcctgtg
acatctacatatgggcaccactggcaggaacctgcggcgtgctgctgctg
agcctggtcatcaccctgtactgtaagagaggcaggaagaagctgctgta
tatcttcaagcagcccttcatgagacccgtgcagaccacacaggaggagg
acggctgctcttgtaggttcccagaggaggaggagggaggatgcgagctg
cgcgtgaagtttagccggtccgccgatgcacctgcatacaagcagggaca
gaaccagctgtataacgagctgaatctgggccggagagaggagtacgacg
tgctggataagaggcggggccgggaccccgagatgggaggcaagcctcgg
agaaagaacccacaggagggcctgtacaatgagctgcaaaaggacaagat
ggccgaggcctattctgagatcggcatgaagggagagaggcgccggggca
agggacacgatggcctgtaccagggcctgagcaccgccacaaaggacacc
tatgatgccagcacatgcaggccagccccctagatga.

[0134] In some embodiments of the VCARs of the disclosure, the VCAR comprises a sequence encoding VH-A, VH-B, VH-C, VH-D, VH-E, or VH-F. In some embodiments of the VCARs of the disclosure, the VCAR comprises two sequences encoding en VH-A, VH-B, VH-C, VH-D, VH-E, or VH-F.

### Immune and Immune Precursor Cells

[0135] In certain embodiments, immune cells of the disclosure comprise lymphoid progenitor cells, natural killer (NK) cells, T lymphocytes (T-cell), stem memory T cells (T_{SCM} cells), central memory T cells (T_{CM}), stem cell-like T cells, B lymphocytes (B-cells), myeloid progenitor cells, neutrophils, basophils, eosinophils, monocytes, macrophages, platelets, erythrocytes, red blood cells (RBCs), megakaryocytes or osteoclasts.

[0136] In certain embodiments, immune precursor cells comprise any cells which can differentiate into one or more types of immune cells. In certain embodiments, immune precursor cells comprise multipotent stem cells that can self renew and develop into immune cells. In certain embodiments, immune precursor cells comprise hematopoietic stem cells (HSCs) or descendants thereof. In certain embodiments, immune precursor cells comprise precursor cells that can develop into immune cells. In certain embodiments, the immune precursor cells comprise hematopoietic progenitor cells (HPCs).

### Hematopoietic Stem Cells (HSCs)

[0137] Hematopoietic stem cells (HSCs) are multipotent, self-renewing cells. All differentiated blood cells from the lymphoid and myeloid lineages arise from HSCs. HSCs can be found in adult bone marrow, peripheral blood, mobilized peripheral blood, peritoneal dialysis effluent and umbilical cord blood.

[0138] HSCs of the disclosure may be isolated or derived from a primary or cultured stem cell. HSCs of the disclosure may be isolated or derived from an embryonic stem cell, a multipotent stem cell, a pluripotent stem cell, an adult stem cell, or an induced pluripotent stem cell (iPSC).

[0139] Immune precursor cells of the disclosure may comprise an HSC or an HSC descendent cell. Exemplary HSC descendent cells of the disclosure include, but are not limited to, multipotent stem cells, lymphoid progenitor cells, natural killer (NK) cells, T lymphocyte cells (T-cells), B lymphocyte cells (B-cells), myeloid progenitor cells, neutrophils, basophils, eosinophils, monocytes, and macrophages.

[0140] HSCs produced by the methods of the disclosure may retain features of “primitive” stem cells that, while isolated or derived from an adult stem cell and while committed to a single lineage, share characteristics of embryonic stem cells. For example, the “primitive” HSCs produced by the methods of the disclosure retain their “stemness” following division and do not differentiate. Consequently, as an adoptive cell therapy, the “primitive” HSCs produced by the methods of the disclosure not only replenish their numbers, but expand in vivo. “Primitive” HSCs produced by the methods of the disclosure may be therapeutically-effective when administered as a single dose. In some embodiments, primitive HSCs of the disclosure are CD34+. In some embodiments, primitive HSCs of the disclosure are CD34+ and CD3δ−. In some embodiments, primitive HSCs of the disclosure are CD34+, CD3δ− and CD90+. In some embodiments, primitive HSCs of the disclosure are CD34+, CD3δ−, CD90+ and CD45RA−. In some embodiments, primitive HSCs of the disclosure are CD34+, CD3δ−, CD90+, CD45RA−, and CD49f+. In some embodiments, the most primitive HSCs of the disclosure are CD34+, CD3δ−, CD90+, CD45RA−, and CD49f+.

[0141] In some embodiments of the disclosure, primitive HSCs, HSCs, and/or HSC descendent cells may be modified according to the methods of the disclosure to express an exogenous sequence (e.g., a chimeric antigen receptor or therapeutic protein). In some embodiments of the disclosure, modified primitive HSCs, modified HSCs, and/or modified HSC descendent cells may be forward differentiated to produce a modified immune cell including, but not limited to, a modified T cell, a modified natural killer cell and/or a modified B-cell of the disclosure.

### T Cells

[0142] Modified T cells of the disclosure may be derived from modified hematopoietic stem and progenitor cells (HSPCs) or modified HSCs.

[0143] Unlike traditional biologics and chemotherapeutics, modified-T cells of the disclosure possess the capacity to rapidly reproduce upon antigen recognition, thereby potentially obviating the need for repeat treatments. To achieve this, in some embodiments, modified-T cells of the disclosure not only drive an initial response, but also persist in the patient as a stable population of viable memory T cells to prevent potential relapses. Alternatively, in some embodiments, when it is not desired, modified-T cells of the disclosure do not persist in the patient.

[0144] Intensive efforts have been focused on the development of antigen receptor molecules that do not cause T cell exhaustion through antigen-independent (tonic) signaling, as well as of a modified-T cell product containing early memory T cells, especially stem cell memory (T_{SCM}) or stem cell-like T cells. Stem cell-like modified-T cells of the disclosure exhibit the greatest capacity for self-renewal and multipotent capacity to derive central memory (T_{CM}) T cells or T_{CM} like cells, effector memory (T_{EM}) and effector T cells (T_{E}), thereby producing better tumor eradication and long-term modified-T cell engraftment. A linear pathway of differentiation may be responsible for generating these cells: Naïve T cells (TN)>T_{SCM}>T_{CM}>T_{EM}>T_{E}>T_{TE}, whereby TN is the parent precursor cell that directly gives rise to T_{SCM}, which then, in turn, directly gives rise to T_{CM}, etc. Compositions of T cells of the disclosure may comprise one or more of each parental T cell subset with T_{SCM} or T_{CM} cells being the most abundant (e.g., T_{SCM}>T_{CM}>T_{EM}>T_{E}>T_{TE}).

[0145] In some embodiments of the methods of the disclosure, the immune cell precursor is differentiated into or is capable of differentiating into an early memory T cell, a stem cell like T-cell, a Naïve T cells (TN), a T_{SCM}, a T_{CM}, a T_{EM}, a T_{E}, or a T_{TE}. In some embodiments, the immune cell precursor is a primitive HSC, an HSC, or a HSC descendent cell of the disclosure.

[0146] In some embodiments of the methods of the disclosure, the immune cell is an early memory T cell, a stem cell like T-cell, a Naïve T cells (TN), a T_{SCM}, a T_{CM}, a T_{EM}, a T_{E}, or a T_{TE}.

[0147] In some embodiments of the methods of the disclosure, the immune cell is an early memory T cell.

[0148] In some embodiments of the methods of the disclosure, the immune cell is a stem cell like T-cell.

[0149] In some embodiments of the methods of the disclosure, the immune cell is a T_{SCM}.

[0150] In some embodiments of the methods of the disclosure, the immune cell is a T_{CM}.

[0151] In some embodiments of the methods of the disclosure, the methods modify and/or the methods produce a plurality of modified T cells, wherein at least 2%, 5%, 10%, 15%, 20%, 25%, 30%, 35%, 40%, 45%, 50%, 60%, 65%, 70%, 75%, 80%, 85%, 90%, 95%, 99% or any percentage in between of the plurality of modified T cells expresses one or more cell-surface marker(s) of an early memory T cell. In certain embodiments, the plurality of modified early memory T cells comprises at least one modified stem cell-like T cell. In certain embodiments, the plurality of modified early memory T cells comprises at least one modified T_{SCM}. In certain embodiments, the plurality of modified early memory T cells comprises at least one modified T_{CM}.

[0152] In some embodiments of the methods of the disclosure, the methods modify and/or the methods produce a plurality of modified T cells, wherein at least 2%, 5%, 10%, 15%, 20%, 25%, 30%, 35%, 40%, 45%, 50%, 60%, 65%, 70%, 75%, 80%, 85%, 90%, 95%, 99% or any percentage in between of the plurality of modified T cells expresses one or more cell-surface marker(s) of a stem cell-like T cell. In certain embodiments, the plurality of modified stem cell-like T cells comprises at least one modified T_{SCM}. In certain embodiments, the plurality of modified stem cell-like T cells comprises at least one modified T_{CM}.

[0153] In some embodiments of the methods of the disclosure, the methods modify and/or the methods produce a plurality of modified T cells, wherein at least 2%, 5%, 10%, 15%, 20%, 25%, 30%, 35%, 40%, 45%, 50%, 60%, 65%, 70%, 75%, 80%, 85%, 90%, 95%, 99% or any percentage in between of the plurality of modified T cells expresses one or more cell-surface marker(s) of a stem memory T cell (T_{SCM}). In certain embodiments, the cell-surface markers comprise CD62L and CD45RA. In certain embodiments, the cell-surface markers comprise one or more of CD62L, CD45RA, CD28, CCR7, CD127, CD45RO, CD95, CD95 and IL-2Rβ. In certain embodiments, the cell-surface markers comprise one or more of CD45RA, CD95, IL-2Rβ, CCR7, and CD62L.

[0154] In some embodiments of the methods of the disclosure, the methods modify and/or the methods produce a plurality of modified T cells, wherein at least 2%, 5%, 10%, 15%, 20%, 25%, 30%, 35%, 40%, 45%, 50%, 60%, 65%, 70%, 75%, 80%, 85%, 90%, 95%, 99% or any percentage in between of the plurality of modified T cells expresses one or more cell-surface marker(s) of a central memory T cell (T_{CM}). In certain embodiments, the cell-surface markers comprise one or more of CD45RO, CD95, IL-2Rβ, CCR7, and CD62L.

[0155] In some embodiments of the methods of the disclosure, the methods modify and/or the methods produce a plurality of modified T cells, wherein at least 2%, 5%, 10%, 15%, 20%, 25%, 30%, 35%, 40%, 45%, 50%, 60%, 65%, 70%, 75%, 80%, 85%, 90%, 95%, 99% or any percentage in between of the plurality of modified T cells expresses one or more cell-surface marker(s) of a naïve T cell (T_{N}). In certain embodiments, the cell-surface markers comprise one or more of CD45RA, CCR7 and CD62L.

[0156] In some embodiments of the methods of the disclosure, the methods modify and/or the methods produce a plurality of modified T cells, wherein at least 2%, 5%, 10%, 15%, 20%, 25%, 30%, 35%, 40%, 45%, 50%, 60%, 65%, 70%, 75%, 80%, 85%, 90%, 95%, 99% or any percentage in between of the plurality of modified T cells expresses one or more cell-surface marker(s) of an effector T-cell (modified T_{EFF}). In certain embodiments, the cell-surface markers comprise one or more of CD45RA, CD95, and IL-2Rβ.

[0157] In some embodiments of the methods of the disclosure, the methods modify and/or the methods produce a plurality of modified T cells, wherein at least 2%, 5%, 10%, 15%, 20%, 25%, 30%, 35%, 40%, 45%, 50%, 60%, 65%, 70%, 75%, 80%, 85%, 90%, 95%, 99% or any percentage in between of the plurality of modified T cells expresses one or more cell-surface marker(s) of a stem cell-like T cell, a stem memory T cell (T_{SCM}) or a central memory T cell (T_{CM}).

[0158] In some embodiments of the methods of the disclosure, a buffer comprises the immune cell or precursor thereof. The buffer maintains or enhances a level of cell viability and/or a stem-like phenotype of the immune cell or precursor thereof, including T-cells. In certain embodiments, the buffer maintains or enhances a level of cell viability and/or a stem-like phenotype of the primary human T cells prior to the nucleofection. In certain embodiments, the buffer maintains or enhances a level of cell viability and/or a stem-like phenotype of the primary human T cells during the nucleofection. In certain embodiments, the buffer maintains or enhances a level of cell viability and/or a stem-like phenotype of the primary human T cells following the nucleofection. In certain embodiments, the buffer comprises one or more of KCl, MgCl₂, ClNa, Glucose and Ca(NO₃)₂ in any absolute or relative abundance or concentration, and, optionally, the buffer further comprises a supplement selected from the group consisting of HEPES, Tris/HCl, and a phosphate buffer. In certain embodiments, the buffer comprises 5 mM KCl, 15 mM MgCl₂, 90 mM ClNa, 10 mM Glucose and 0.4 mM Ca(NO₃)₂. In certain embodiments, the buffer comprises 5 mM KCl, 15 mM MgCl₂, 90 mM ClNa, 10 mM Glucose and 0.4 mM Ca(NO₃)₂ and a supplement comprising 20 mM HEPES and 75 mM Tris/HCl. In certain embodiments, the buffer comprises 5 mM KCl, 15 mM MgCl₂, 90 mM ClNa, 10 mM Glucose and 0.4 mM Ca(NO₃)₂ and a supplement comprising 40 mM Na₂HPO₄/NaH₂PO₄ at pH 7.2. In certain embodiments, the composition comprising primary human T cells comprises 100 l of the buffer and between 5×10⁶ and 25×10⁶ cells. In certain embodiments, the composition comprises a scalable ratio of 250×10⁶ primary human T cells per milliliter of buffer or other media during the introduction step.

[0159] In some embodiments of the methods of the disclosure, the methods comprise contacting an immune cell of the disclosure, including a T cell of the disclosure, and a T-cell expansion composition. In some embodiments of the methods of the disclosure, the step of introducing a transposon and/or transposase of the disclosure into an immune cell of the disclosure may further comprise contacting the immune cell and a T-cell expansion composition. In some embodiments, including those in which the introducing step of the methods comprises an electroporation or a nucleofection step, the electroporation or a nucleofection step may be performed with the immune cell contacting T-cell expansion composition of the disclosure.

[0160] In some embodiments of the methods of the disclosure, the T-cell expansion composition comprises, consists essentially of or consists of phosphorus; one or more of an octanoic acid, a palmitic acid, a linoleic acid, and an oleic acid; a sterol; and an alkane.

[0161] In certain embodiments of the methods of producing a modified T cell of the disclosure, the expansion supplement comprises one or more cytokine(s). The one or more cytokine(s) may comprise any cytokine, including but not limited to, lymphokines. Exemplary lympokines include, but are not limited to, interleukin-2 (IL-2), interleukin-3 (IL-3), interleukin-4 (IL-4), interleukin-5 (IL-5), interleukin-6 (IL-6), interleukin-7 (IL-7), interleukin-15 (IL-15), interleukin-21 (IL-21), granulocyte-macrophage colony-stimulating factor (GM-CSF) and interferon-gamma (INFγ). The one or more cytokine(s) may comprise IL-2.

[0162] In some embodiments of the methods of the disclosure, the T-cell expansion composition comprises human serum albumin, recombinant human insulin, human transferrin, 2-Mercaptoethanol, and an expansion supplement. In certain embodiments of this method, the T-cell expansion composition further comprises one or more of octanoic acid, nicotinamide, 2,4,7,9-tetramethyl-5-decyn-4,7-diol (TMDD), diisopropyl adipate (DIPA), n-butyl-benzenesulfonamide, 1,2-benzenedicarboxylic acid, bis(2-methylpropyl) ester, palmitic acid, linoleic acid, oleic acid, stearic acid hydrazide, oleamide, a sterol and an alkane. In certain embodiments of this method, the T-cell expansion composition further comprises one or more of octanoic acid, palmitic acid, linoleic acid, oleic acid and a sterol. In certain embodiments of this method, the T-cell expansion composition further comprises one or more of octanoic acid at a concentration of between 0.9 mg/kg to 90 mg/kg, inclusive of the endpoints; palmitic acid at a concentration of between 0.2 mg/kg to 20 mg/kg, inclusive of the endpoints; linoleic acid at a concentration of between 0.2 mg/kg to 20 mg/kg, inclusive of the endpoints; oleic acid at a concentration of 0.2 mg/kg to 20 mg/kg, inclusive of the endpoints; and a sterol at a concentration of about 0.1 mg/kg to 10 mg/kg, inclusive of the endpoints. In certain embodiments of this method, the T-cell expansion composition further comprises one or more of octanoic acid at a concentration of about 9 mg/kg, palmitic acid at a concentration of about 2 mg/kg, linoleic acid at a concentration of about 2 mg/kg, oleic acid at a concentration of about 2 mg/kg and a sterol at a concentration of about 1 mg/kg. In certain embodiments of this method, the T-cell expansion composition further comprises one or more of octanoic acid at a concentration of between 6.4 μmol/kg and 640 μmol/kg, inclusive of the endpoints; palmitic acid at a concentration of between 0.7 μmol/kg and 70 μmol/kg, inclusive of the endpoints; linoleic acid at a concentration of between 0.75 μmol/kg and 75 μmol/kg, inclusive of the endpoints; oleic acid at a concentration of between 0.75 μmol/kg and 75 μmol/kg, inclusive of the endpoints; and a sterol at a concentration of between 0.25 μmol/kg and 25 μmol/kg, inclusive of the endpoints. In certain embodiments of this method, the T-cell expansion composition further comprises one or more of octanoic acid at a concentration of about 64 μmol/kg, palmitic acid at a concentration of about 7 μmol/kg, linoleic acid at a concentration of about 7.5 μmol/kg, oleic acid at a concentration of about 7.5 μmol/kg and a sterol at a concentration of about 2.5 μmol/kg.

[0163] In certain embodiments, the T-cell expansion composition comprises one or more of human serum albumin, recombinant human insulin, human transferrin, 2-Mercaptoethanol, and an expansion supplement to produce a plurality of expanded modified T-cells, wherein at least 2% of the plurality of modified T-cells expresses one or more cell-surface marker(s) of an early memory T cell, a stem cell-like T cell, a stem memory T cell (T_{SCM}) and/or a central memory T cell (T_{CM}). In certain embodiments, the T-cell expansion composition comprises or further comprises one or more of octanoic acid, nicotinamide, 2,4,7,9-tetramethyl-5-decyn-4,7-diol (TMDD), diisopropyl adipate (DIPA), n-butyl-benzenesulfonamide, 1,2-benzenedicarboxylic acid, bis(2-methylpropyl) ester, palmitic acid, linoleic acid, oleic acid, stearic acid hydrazide, oleamide, a sterol and an alkane. In certain embodiments, the T-cell expansion composition comprises one or more of octanoic acid, palmitic acid, linoleic acid, oleic acid and a sterol (e.g., cholesterol). In certain embodiments, the T-cell expansion composition comprises one or more of octanoic acid at a concentration of between 0.9 mg/kg to 90 mg/kg, inclusive of the endpoints; palmitic acid at a concentration of between 0.2 mg/kg to 20 mg/kg, inclusive of the endpoints; linoleic acid at a concentration of between 0.2 mg/kg to 20 mg/kg, inclusive of the endpoints; oleic acid at a concentration of 0.2 mg/kg to 20 mg/kg, inclusive of the endpoints; and a sterol at a concentration of about 0.1 mg/kg to 10 mg/kg, inclusive of the endpoints (wherein mg/kg=parts per million). In certain embodiments, the T-cell expansion composition comprises one or more of octanoic acid at a concentration of about 9 mg/kg, palmitic acid at a concentration of about 2 mg/kg, linoleic acid at a concentration of about 2 mg/kg, oleic acid at a concentration of about 2 mg/kg, and a sterol at a concentration of about 1 mg/kg (wherein mg/kg=parts per million). In certain embodiments, the T-cell expansion composition comprises one or more of octanoic acid at a concentration of 9.19 mg/kg, palmitic acid at a concentration of 1.86 mg/kg, linoleic acid at a concentration of about 2.12 mg/kg, oleic acid at a concentration of about 2.13 mg/kg, and a sterol at a concentration of about 1.01 mg/kg (wherein mg/kg=parts per million). In certain embodiments, the T-cell expansion composition comprises octanoic acid at a concentration of 9.19 mg/kg, palmitic acid at a concentration of 1.86 mg/kg, linoleic acid at a concentration of 2.12 mg/kg, oleic acid at a concentration of about 2.13 mg/kg, and a sterol at a concentration of 1.01 mg/kg (wherein mg/kg=parts per million). In certain embodiments, the T-cell expansion composition comprises one or more of octanoic acid at a concentration of between 6.4 μmol/kg and 640 μmol/kg, inclusive of the endpoints; palmitic acid at a concentration of between 0.7 μmol/kg and 70 μmol/kg, inclusive of the endpoints; linoleic acid at a concentration of between 0.75 μmol/kg and 75 μmol/kg, inclusive of the endpoints; oleic acid at a concentration of between 0.75 μmol/kg and 75 μmol/kg, inclusive of the endpoints; and a sterol at a concentration of between 0.25 μmol/kg and 25 μmol/kg, inclusive of the endpoints. In certain embodiments, the T-cell expansion composition comprises one or more of octanoic acid at a concentration of about 64 μmol/kg, palmitic acid at a concentration of about 7 μmol/kg, linoleic acid at a concentration of about 7.5 μmol/kg, oleic acid at a concentration of about 7.5 μmol/kg and a sterol at a concentration of about 2.5 μmol/kg. In certain embodiments, the T-cell expansion composition comprises one or more of octanoic acid at a concentration of about 63.75 μmol/kg, palmitic acid at a concentration of about 7.27 μmol/kg, linoleic acid at a concentration of about 7.57 μmol/kg, oleic acid at a concentration of about 7.56 μmol/kg and a sterol at a concentration of about 2.61 μmol/kg. In certain embodiments, the T-cell expansion composition comprises octanoic acid at a concentration of about 63.75 μmol/kg, palmitic acid at a concentration of about 7.27 μmol/kg, linoleic acid at a concentration of about 7.57 μmol/kg, oleic acid at a concentration of 7.56 μmol/kg and a sterol at a concentration of 2.61 μmol/kg.

[0164] As used herein, the terms “supplemented T-cell expansion composition” or “T-cell expansion composition” may be used interchangeably with a media comprising one or more of human serum albumin, recombinant human insulin, human transferrin, 2-Mercaptoethanol, and an expansion supplement at 37° C. Alternatively, or in addition, the terms “supplemented T-cell expansion composition” or “T-cell expansion composition” may be used interchangeably with a media comprising one or more of phosphorus, an octanoic fatty acid, a palmitic fatty acid, a linoleic fatty acid and an oleic acid. In certain embodiments, the media comprises an amount of phosphorus that is 10-fold higher than may be found in, for example, Iscove's Modified Dulbecco's Medium ((IMDM); available at ThermoFisher Scientific as Catalog number 12440053).

[0165] As used herein, the terms “supplemented T-cell expansion composition” or “T-cell expansion composition” may be used interchangeably with a media comprising one or more of human serum albumin, recombinant human insulin, human transferrin, 2-Mercaptoethanol, Iscove's MDM, and an expansion supplement at 37° C. Alternatively, or in addition, the terms “supplemented T-cell expansion composition” or “T-cell expansion composition” may be used interchangeably with a media comprising one or more of the following elements: boron, sodium, magnesium, phosphorus, potassium, and calcium. In certain embodiments, the terms “supplemented T-cell expansion composition” or “T-cell expansion composition” may be used interchangeably with a media comprising one or more of the following elements present in the corresponding average concentrations: boron at 3.7 mg/L, sodium at 3000 mg/L, magnesium at 18 mg/L, phosphorus at 29 mg/L, potassium at 15 mg/L and calcium at 4 mg/L.

[0166] As used herein, the terms “supplemented T-cell expansion composition” or “T-cell expansion composition” may be used interchangeably with a media comprising one or more of human serum albumin, recombinant human insulin, human transferrin, 2-Mercaptoethanol, and an expansion supplement at 37° C. Alternatively, or in addition, the terms “supplemented T-cell expansion composition” or “T-cell expansion composition” may be used interchangeably with a media comprising one or more of the following components: octanoic acid (CAS No. 124-07-2), nicotinamide (CAS No. 98-92-0), 2,4,7,9-tetramethyl-5-decyn-4,7-diol (TMDD) (CAS No. 126-86-3), diisopropyl adipate (DIPA) (CAS No. 6938-94-9), n-butyl-benzenesulfonamide (CAS No. 3622-84-2), 1,2-benzenedicarboxylic acid, bis(2-methylpropyl) ester (CAS No. 84-69-5), palmitic acid (CAS No. 57-10⁻³), linoleic acid (CAS No. 60-33-3), oleic acid (CAS No. 112-80-1), stearic acid hydrazide (CAS No. 4130-54-5), oleamide (CAS No. 3322-62-1), sterol (e.g., cholesterol) (CAS No. 57-88-5), and alkanes (e.g., nonadecane) (CAS No. 629-92-5). In certain embodiments, the terms “supplemented T-cell expansion composition” or “T-cell expansion composition” may be used interchangeably with a media comprising one or more of the following components: octanoic acid (CAS No. 124-07-2), nicotinamide (CAS No. 98-92-0), 2,4,7,9-tetramethyl-5-decyn-4,7-diol (TMDD) (CAS No. 126-86-3), diisopropyl adipate (DIPA) (CAS No. 6938-94-9), n-butyl-benzenesulfonamide (CAS No. 3622-84-2), 1,2-benzenedicarboxylic acid, bis(2-methylpropyl) ester (CAS No. 84-69-5), palmitic acid (CAS No. 57-10⁻³), linoleic acid (CAS No. 60-33-3), oleic acid (CAS No. 112-80-1), stearic acid hydrazide (CAS No. 4130-54-5), oleamide (CAS No. 3322-62-1), sterol (e.g., cholesterol) (CAS No. 57-88-5), alkanes (e.g., nonadecane) (CAS No. 629-92-5), and phenol red (CAS No. 143-74-8). In certain embodiments, the terms “supplemented T-cell expansion composition” or “T-cell expansion composition” may be used interchangeably with a media comprising one or more of the following components: octanoic acid (CAS No. 124-07-2), nicotinamide (CAS No. 98-92-0), 2,4,7,9-tetramethyl-5-decyn-4,7-diol (TMDD) (CAS No. 126-86-3), diisopropyl adipate (DIPA) (CAS No. 6938-94-9), n-butyl-benzenesulfonamide (CAS No. 3622-84-2), 1,2-benzenedicarboxylic acid, bis(2-methylpropyl) ester (CAS No. 84-69-5), palmitic acid (CAS No. 57-10⁻³), linoleic acid (CAS No. 60-33-3), oleic acid (CAS No. 112-80-1), stearic acid hydrazide (CAS No. 4130-54-5), oleamide (CAS No. 3322-62-1), phenol red (CAS No. 143-74-8) and lanolin alcohol.

[0167] In certain embodiments, the terms “supplemented T-cell expansion composition” or “T-cell expansion composition” may be used interchangeably with a media comprising one or more of human serum albumin, recombinant human insulin, human transferrin, 2-Mercaptoethanol, and an expansion supplement at 37° C. Alternatively, or in addition, the terms “supplemented T-cell expansion composition” or “T-cell expansion composition” may be used interchangeably with a media comprising one or more of the following ions: sodium, ammonium, potassium, magnesium, calcium, chloride, sulfate and phosphate.

[0168] As used herein, the terms “supplemented T-cell expansion composition” or “T-cell expansion composition” may be used interchangeably with a media comprising one or more of human serum albumin, recombinant human insulin, human transferrin, 2-Mercaptoethanol, and an expansion supplement at 37° C. Alternatively, or in addition, the terms “supplemented T-cell expansion composition” or “T-cell expansion composition” may be used interchangeably with a media comprising one or more of the following free amino acids: histidine, asparagine, serine, glutamate, arginine, glycine, aspartic acid, glutamic acid, threonine, alanine, proline, cysteine, lysine, tyrosine, methionine, valine, isoleucine, leucine, phenylalanine and tryptophan. In certain embodiments, the terms “supplemented T-cell expansion composition” or “T-cell expansion composition” may be used interchangeably with a media comprising one or more of the following free amino acids in the corresponding average mole percentages: histidine (about 1%), asparagine (about 0.5%), serine (about 1.5%), glutamine (about 67%), arginine (about 1.5%), glycine (about 1.5%), aspartic acid (about 1%), glutamic acid (about 2%), threonine (about 2%), alanine (about 1%), proline (about 1.5%), cysteine (about 1.5%), lysine (about 3%), tyrosine (about 1.5%), methionine (about 1%), valine (about 3.5%), isoleucine (about 3%), leucine (about 3.5%), phenylalanine (about 1.5%) and tryptophan (about 0.5%). In certain embodiments, the terms “supplemented T-cell expansion composition” or “T-cell expansion composition” may be used interchangeably with a media comprising one or more of the following free amino acids in the corresponding average mole percentages: histidine (about 0.78%), asparagine (about 0.4%), serine (about 1.6%), glutamine (about 67.01%), arginine (about 1.67%), glycine (about 1.72%), aspartic acid (about 1.00%), glutamic acid (about 1.93%), threonine (about 2.38%), alanine (about 1.11%), proline (about 1.49%), cysteine (about 1.65%), lysine (about 2.84%), tyrosine (about 1.62%), methionine (about 0.85%), valine (about 3.45%), isoleucine (about 3.14%), leucine (about 3.3%), phenylalanine (about 1.64%) and tryptophan (about 0.37%).

[0169] As used herein, the terms “supplemented T-cell expansion composition” or “T-cell expansion composition” may be used interchangeably with a media comprising one or more of human serum albumin, recombinant human insulin, human transferrin, 2-Mercaptoethanol, Iscove's MDM, and an expansion supplement at 37° C. Alternatively, or in addition, the terms “supplemented T-cell expansion composition” or “T-cell expansion composition” may be used interchangeably with a media comprising one or more of phosphorus, an octanoic fatty acid, a palmitic fatty acid, a linoleic fatty acid and an oleic acid. In certain embodiments, the media comprises an amount of phosphorus that is 10-fold higher than may be found in, for example, Iscove's Modified Dulbecco's Medium ((IMDM); available at ThermoFisher Scientific as Catalog number 12440053).

[0170] In certain embodiments, the terms “supplemented T-cell expansion composition” or “T-cell expansion composition” may be used interchangeably with a media comprising one or more of octanoic acid, palmitic acid, linoleic acid, oleic acid and a sterol (e.g., cholesterol). In certain embodiments, the terms “supplemented T-cell expansion composition” or “T-cell expansion composition” may be used interchangeably with a media comprising one or more of octanoic acid at a concentration of between 0.9 mg/kg to 90 mg/kg, inclusive of the endpoints; palmitic acid at a concentration of between 0.2 mg/kg to 20 mg/kg, inclusive of the endpoints; linoleic acid at a concentration of between 0.2 mg/kg to 20 mg/kg, inclusive of the endpoints; oleic acid at a concentration of 0.2 mg/kg to 20 mg/kg, inclusive of the endpoints; and a sterol at a concentration of about 0.1 mg/kg to 10 mg/kg, inclusive of the endpoints (wherein mg/kg=parts per million). In certain embodiments, the terms “supplemented T-cell expansion composition” or “T-cell expansion composition” may be used interchangeably with a media comprising one or more of octanoic acid at a concentration of about 9 mg/kg, palmitic acid at a concentration of about 2 mg/kg, linoleic acid at a concentration of about 2 mg/kg, oleic acid at a concentration of about 2 mg/kg, and a sterol at a concentration of about 1 mg/kg (wherein mg/kg=parts per million). In certain embodiments, the terms “supplemented T-cell expansion composition” or “T-cell expansion composition” may be used interchangeably with a media comprising one or more of octanoic acid at a concentration of 9.19 mg/kg, palmitic acid at a concentration of 1.86 mg/kg, linoleic acid at a concentration of about 2.12 mg/kg, oleic acid at a concentration of about 2.13 mg/kg, and a sterol at a concentration of about 1.01 mg/kg (wherein mg/kg=parts per million). In certain embodiments, the terms “supplemented T-cell expansion composition” or “T-cell expansion composition” may be used interchangeably with a media comprising one or more of octanoic acid at a concentration of 9.19 mg/kg, palmitic acid at a concentration of 1.86 mg/kg, linoleic acid at a concentration of 2.12 mg/kg, oleic acid at a concentration of about 2.13 mg/kg, and a sterol at a concentration of 1.01 mg/kg (wherein mg/kg=parts per million). In certain embodiments, the terms “supplemented T-cell expansion composition” or “T-cell expansion composition” may be used interchangeably with a media comprising one or more of octanoic acid at a concentration of between 6.4 μmol/kg and 640 μmol/kg, inclusive of the endpoints; palmitic acid at a concentration of between 0.7 μmol/kg and 70 μmol/kg, inclusive of the endpoints; linoleic acid at a concentration of between 0.75 μmol/kg and 75 μmol/kg, inclusive of the endpoints; oleic acid at a concentration of between 0.75 μmol/kg and 75 μmol/kg, inclusive of the endpoints; and a sterol at a concentration of between 0.25 μmol/kg and 25 μmol/kg, inclusive of the endpoints. In certain embodiments, the terms “supplemented T-cell expansion composition” or “T-cell expansion composition” may be used interchangeably with a media comprising one or more of octanoic acid at a concentration of about 64 μmol/kg, palmitic acid at a concentration of about 7 μmol/kg, linoleic acid at a concentration of about 7.5 μmol/kg, oleic acid at a concentration of about 7.5 μmol/kg and a sterol at a concentration of about 2.5 μmol/kg.

[0171] In certain embodiments, the terms “supplemented T-cell expansion composition” or “T-cell expansion composition” may be used interchangeably with a media comprising one or more of octanoic acid at a concentration of about 63.75 μmol/kg, palmitic acid at a concentration of about 7.27 μmol/kg, linoleic acid at a concentration of about 7.57 μmol/kg, oleic acid at a concentration of about 7.56 μmol/kg and a sterol at a concentration of about 2.61 μmol/kg. In certain embodiments, the terms “supplemented T-cell expansion composition” or “T-cell expansion composition” may be used interchangeably with a media comprising one or more of octanoic acid at a concentration of about 63.75 μmol/kg, palmitic acid at a concentration of about 7.27 μmol/kg, linoleic acid at a concentration of about 7.57 μmol/kg, oleic acid at a concentration of 7.56 μmol/kg and a sterol at a concentration of 2.61 μmol/kg.

[0172] In certain embodiments of the methods of producing a modified T cell (e.g., a stem cell-like T cell, a T_{SCM} and/or a T_{CM}) of the disclosure, the method comprises contacting a modified T cell and an inhibitor of the P13K-Akt-mTOR pathway. Modified T-cells of the disclosure, including modified stem cell-like T cells, T_{SCM} and/or T_{CM} of the disclosure, may be incubated, cultured, grown, stored, or otherwise, combined at any step in the methods of the procedure with a growth medium comprising one or more inhibitors a component of a PI3K pathway. Exemplary inhibitors a component of a PI3K pathway include, but are not limited to, an inhibitor of GSK30 such as TWS119 (also known as GSK 3B inhibitor XII; CAS Number 601514-19-6 having a chemical formula C₁₈H1₄N40₂). Exemplary inhibitors of a component of a PI3K pathway include, but are not limited to, bb007 (BLUEBIRDBIOT^{M}). Additional Exemplary inhibitors of a component of a PI3K pathway include, but are not limited to, an allosteric Akt inhibitor VIII (also referred to as Akti-1/2 having Compound number 10196499), ATP competitive inhibitors (Orthosteric inhibitors targeting the ATP-binding pocket of the protein kinase B (Akt)), Isoquinoline-5-sulfonamides (H-8, H-89, and NL-71-101), Azepane derivatives (A series of structures derived from (−)-balanol), Aminofurazans (GSK690693), Heterocyclic rings (7-azaindole, 6-phenylpurine derivatives, pyrrolo[2,3-d]pyrimidine derivatives, CCT128930, 3-aminopyrrolidine, anilinotriazole derivatives, spiroindoline derivatives, AZD5363, ipatasertib (GDC-0068, RG7440), A-674563, and A-443654), Phenylpyrazole derivatives (AT7867 and AT13148), Thiophenecarboxamide derivatives (Afuresertib (GSK2110183), 2-pyrimidyl-5-amidothiophene derivative (DC120), uprosertib (GSK2141795)), Allosteric inhibitors (Superior to orthosteric inhibitors providing greater specificity, reduced side-effects and less toxicity), 2,3-diphenylquinoxaline analogues (2,3-diphenylquinoxaline derivatives, triazolo[3,4-f][1,6]naphthyridin-3(2H)-one derivative (MK-2206)), Alkylphospholipids (Edelfosine (1-O-octadecyl-2-O-methyl-rac-glycero-3-phosphocholine, ET-18-OCH₃) ilmofosine (BM 41.440), miltefosine (hexadecylphosphocholine, HePC), perifosine (D-21266), erucylphosphocholine (ErPC), erufosine (ErPC3, erucylphosphohomocholine), Indole-3-carbinol analogues (Indole-3-carbinol, 3-chloroacetylindole, diindolylmethane, diethyl 6-methoxy-5,7-dihydroindolo [2,3-b]carbazole-2,10-dicarboxylate (SR13668), OSU-A9), Sulfonamide derivatives (PH-316 and PHT-427), Thiourea derivatives (PIT-1, PIT-2, DM-PIT-1, N-[(1-methyl-1H-pyrazol-4-yl)carbonyl]-N′-(3-bromophenyl)-thiourea), Purine derivatives (Triciribine (TCN, NSC 154020), triciribine mono-phosphate active analogue (TCN-P), 4-amino-pyrido[2,3-d]pyrimidine derivative API-1, 3-phenyl-3H-imidazo[4,5-b]pyridine derivatives, ARQ 092), BAY 1125976, 3-methyl-xanthine, quinoline-4-carboxamide and 2-[4-(cyclohexa-1,3-dien-1-yl)-1H-pyrazol-3-yl]phenol, 3-oxo-tirucallic acid, 3α- and 30-acetoxy-tirucallic acids, acetoxy-tirucallic acid, and irreversible inhibitors (antibiotics, Lactoquinomycin, Frenolicin B, kalafungin, medermycin, Boc-Phe-vinyl ketone, 4-hydroxynonenal (4-HNE), 1,6-naphthyridinone derivatives, and imidazo-1,2-pyridine derivatives).

[0173] In certain embodiments of the methods of producing a modified T cell (e.g., a stem cell-like T cell, a T_{SCM} and/or a T_{CM}) of the disclosure, the method comprises contacting a modified T cell and an inhibitor of T cell effector differentiation. Exemplary inhibitors of T cell effector differentiation include, but are not limited to, a BET inhibitor (e.g., JQ1, a hienotriazolodiazepine) and/or an inhibitor of the BET family of proteins (e.g., BRD2, BRD3, BRD4, and BRDT).

[0174] In certain embodiments of the methods of producing a modified T cell (e.g., a stem cell-like T cell, a T_{SCM} and/or a T_{CM}) of the disclosure, the method comprises contacting a modified T cell and an agent that reduces nucleo-cytoplasmic Acetyl-CoA. Exemplary agents that reduce nucleo-cytoplasmic Acetyl-CoA include, but are not limited to, 2-hydroxy-citrate (2-HC) as well as agents that increase expression ofAcssl.

[0175] In certain embodiments of the methods of producing a modified T cell (e.g., a stem cell-like T cell, a T_{SCM} and/or a T_{CM}) of the disclosure, the method comprises contacting a modified T cell and a composition comprising a histone deacetylase (HDAC) inhibitor. In some embodiments, the composition comprising an HDAC inhibitor comprises or consists of valproic acid, Sodium Phenylbutyrate (NaPB) or a combination thereof. In some embodiments, the composition comprising an HDAC inhibitor comprises or consists of valproic acid. In some embodiments, the composition comprising an HDAC inhibitor comprises or consists of Sodium Phenylbutyrate (NaPB).

[0176] In certain embodiments of the methods of producing a modified T cell (e.g., a stem cell-like T cell, a T_{SCM} and/or a T_{CM}) of the disclosure, the activation supplement may comprise one or more cytokine(s). The one or more cytokine(s) may comprise any cytokine, including but not limited to, lymphokines. Exemplary lympokines include, but are not limited to, interleukin-2 (IL-2), interleukin-3 (IL-3), interleukin-4 (IL-4), interleukin-5 (IL-5), interleukin-6 (IL-6), interleukin-7 (IL-7), interleukin-15 (IL-15), interleukin-21 (IL-21), granulocyte-macrophage colony-stimulating factor (GM-CSF) and interferon-gamma (INFγ). The one or more cytokine(s) may comprise IL-2.

[0177] In certain embodiments of the methods of producing a modified T cell (e.g., a stem cell-like T cell, a T_{SCM} and/or a T_{CM}) of the disclosure, the activation supplement may comprise one or more activator complexes. Exemplary and nonlimiting activator complexes may comprise a monomeric, dimeric, trimeric or tetrameric antibody complex that binds one or more of CD3, CD28, and CD2. In some embodiments, the activation supplement comprises or consists of an activator complex that comprises a human, a humanized or a recombinant or a chimeric antibody. In some embodiments, the activation supplement comprises or consists of an activator complex that binds CD3 and CD28. In some embodiments, the activation supplement comprises or consists of an activator complex that binds CD3, CD28 and CD2.

### Natural Killer (NK) Cells

[0178] In certain embodiments, the modified immune or immune precursor cells of the disclosure are natural killer (NK) cells. In certain embodiments, NK cells are cytotoxic lymphocytes that differentiate from lymphoid progenitor cells.

[0179] Modified NK cells of the disclosure may be derived from modified hematopoietic stem and progenitor cells (HSPCs) or modified HSCs.

[0180] In certain embodiments, non-activated NK cells are derived from CD3-depleted leukopheresis (containing CD14/CD19/CD56+ cells).

[0181] In certain embodiments, NK cells are electroporated using a Lonza 4D nucleofector or BTX ECM 830 (500V, 700 usec pulse length, 0.2 mm electrode gap, one pulse). All Lonza 4D nucleofector programs are contemplated as within the scope of the methods of the disclosure.

[0182] In certain embodiments, 5×10E6 cells were electroporated per electroporation in 100 μL P3 buffer in cuvettes. However, this ratio of cells per volume is scalable for commercial manufacturing methods.

[0183] In certain embodiments, NK cells were stimulated by co-culture with an additional cell line. In certain embodiments, the additional cell line comprises artificial antigen presenting cells (aAPCs). In certain embodiments, stimulation occurs at day 1, 2, 3, 4, 5, 6, or 7 following electroporation. In certain embodiments, stimulation occurs at day 2 following electroporation.

[0184] In certain embodiments, NK cells express CD56.

B cells

[0185] In certain embodiments, the modified immune or immune precursor cells of the disclosure are B cells. B cells are a type of lymphocyte that express B cell receptors on the cell surface. B cell receptors bind to specific antigens.

[0186] Modified B cells of the disclosure may be derived from modified hematopoietic stem and progenitor cells (HSPCs) or modified HSCs.

[0187] In certain embodiments, HSPCs are modified using the methods of the disclosure, and then primed for B cell differentiation in presence of human IL-3, Flt3L, TPO, SCF, and G-CSF for at least 3 days, at least 4 days, at least 5 days, at least 6 days or at least 7 days. In certain embodiments, HSPCs are modified using the methods of the disclosure, and then primed for B cell differentiation in presence of human IL-3, Flt3L, TPO, SCF, and G-CSF for 5 days.

[0188] In certain embodiments, following priming, modified HSPC cells are transferred to a layer of feeder cells and fed bi-weekly, along with transfer to a fresh layer of feeders once per week. In certain embodiments, the feeder cells are MS-5 feeder cells.

[0189] In certain embodiments, modified HSPC cells are cultured with MS-5 feeder cells for at least 7, 14, 21, 28, 30, 33, 35, 42 or 48 days. In certain embodiments, modified HSPC cells were cultured with MS-5 feeder cells for 33 days.

### Transposition Systems

[0190] Exemplary transposon/transposase systems of the disclosure include, but are not limited to, piggyBac transposons and transposases, piggyBac-like transposons and transposases, Sleeping Beauty transposons and transposases, Helraiser transposons and transposases and Tol2 transposons and transposases.

[0191] The piggyBac transposase recognizes transposon-specific inverted terminal repeat sequences (ITRs) on the ends of the transposon, and moves the contents between the ITRs into TTAA chromosomal sites. The piggyBac transposon system has no payload limit for the genes of interest that can be included between the ITRs. In certain embodiments, and, in particular, those embodiments wherein the transposon is a piggyBac transposon, the transposase is a piggyBac or a Super piggyBac (SPB) transposase. In certain embodiments, and, in particular, those embodiments wherein the transposase is a Super piggyBac (SPB) transposase, the sequence encoding the transposase is an mRNA sequence.

[0192] In certain embodiments of the methods of the disclosure, the transposase enzyme is a piggyBac (PB) transposase enzyme. The piggyBac (PB) transposase enzyme may comprise or consist of an amino acid sequence at least 75%, 80%, 85%, 90%, 95%, 99% or any percentage in between identical to:

(SEQ ID NO: 14487)

| | |
|---|---|
| 1 | MGSSLDDEHI LSALLQSDDE LVGEDSDSEI |
| | SDHVSEDDVQ SDTEEAFIDE VHEVQPTSSG |
| 61 | SEILDEQNVI EQPGSSLASN RILTLPQRTI |
| | RGKNKHCWST SKSTRRSRVS ALNIVRSQRG |
| 121 | PTRMCRNIYD PLLCFKLFFT DEIISEIVKW |
| | TNAEISLKRR ESMTGATFRD TNEDEIYAFF |
| 181 | GILVMTAVRK DNHMSTDDLF DRSLSMVYVS |
| | VMSRDRFDFL IRCLRMDDKS IRPTLRENDV |
| 241 | FTPVRKIWDL FIHQCIQNYT PGAHLTIDEQ |
| | LLGFRGRCPF RMYIPNKPSK YGIKILMMCD |
| 301 | SGTKYMINGM PYLGRGTQTN GVPLGEYYVK |
| | ELSKPVHGSC RNITCDNWFT SIPLAKNLLQ |
| 361 | EPYKLTIVGT VRSNKREIPE VLKNSRSRPV |
| | GTSMFCFDGP LTLVSYKPKP AKMVYLLSSC |
| 421 | DEDASINEST GKPQMVMYYN QTKGGVDTLD |
| | QMCSVMTCSR KTNRWPMALL YGMINIACIN |
| 481 | SFIIYSHNVS SKGEKVQSRK KFMRNLYMSL |
| | TSSFMRKRLE APTLKRYLRD NISNILPNEV |
| 541 | PGTSDDSTEE PVMKKRTYCT YCPSKIRRKA |
| | NASCKKCKKV ICREHNIDMC QSCF. |

[0193] In certain embodiments of the methods of the disclosure, the transposase enzyme is a piggyBac (PB) transposase enzyme that comprises or consists of an amino acid sequence having an amino acid substitution at one or more of positions 30, 165, 282, or 538 of the sequence:

(SEQ ID NO: 14487)

| | |
|---|---|
| 1 | MGSSLDDEHI LSALLQSDDE LVGEDSDSEI |
| | SDHVSEDDVQ SDTEEAFIDE VHEVQPTSSG |
| 61 | SEILDEQNVI EQPGSSLASN RILTLPQRTI |
| | RGKNKHCWST SKSTRRSRVS ALNIVRSQRG |
| 121 | PTRMCRNIYD PLLCFKLFFT DEIISEIVKW |
| | TNAEISLKRR ESMTGATFRD TNEDEIYAFF |
| 181 | GILVMTAVRK DNHMSTDDLF DRSLSMVYVS |
| | VMSRDRFDFL IRCLRMDDKS IRPTLRENDV |
| 241 | FTPVRKIWDL FIHQCIQNYT PGAHLTIDEQ |
| | LLGFRGRCPF RMYIPNKPSK YGIKILMMCD |
| 301 | SGTKYMINGM PYLGRGTQTN GVPLGEYYVK |
| | ELSKPVHGSC RNITCDNWFT SIPLAKNLLQ |
| 361 | EPYKLTIVGT VRSNKREIPE VLKNSRSRPV |
| | GTSMFCFDGP LTLVSYKPKP AKMVYLLSSC |
| 421 | DEDASINEST GKPQMVMYYN QTKGGVDTLD |
| | QMCSVMTCSR KTNRWPMALL YGMINIACIN |
| 481 | SFIIYSHNVS SKGEKVQSRK KFMRNLYMSL |
| | TSSFMRKRLE APTLKRYLRD NISNILPNEV |
| 541 | PGTSDDSTEE PVMKKRTYCT YCPSKIRRKA |
| | NASCKKCKKV ICREHNIDMC QSCF. |

[0194] In certain embodiments, the transposase enzyme is a piggyBac (PB) transposase enzyme that comprises or consists of an amino acid sequence having an amino acid substitution at two or more of positions 30, 165, 282, or 538 of the sequence of SEQ ID NO: 14487. In certain embodiments, the transposase enzyme is a piggyBac (PB) transposase enzyme that comprises or consists of an amino acid sequence having an amino acid substitution at three or more of positions 30, 165, 282, or 538 of the sequence of SEQ ID NO: 14487. In certain embodiments, the transposase enzyme is a piggyBac (PB) transposase enzyme that comprises or consists of an amino acid sequence having an amino acid substitution at each of the following positions 30, 165, 282, and 538 of the sequence of SEQ ID NO: 14487. In certain embodiments, the amino acid substitution at position 30 of the sequence of SEQ ID NO: 14487 is a substitution of a valine (V) for an isoleucine (I). In certain embodiments, the amino acid substitution at position 165 of the sequence of SEQ ID NO: 14487 is a substitution of a serine (S) for a glycine (G). In certain embodiments, the amino acid substitution at position 282 of the sequence of SEQ ID NO: 14487 is a substitution of a valine (V) for a methionine (M). In certain embodiments, the amino acid substitution at position 538 of the sequence of SEQ ID NO: 14487 is a substitution of a lysine (K) for an asparagine (N).

[0195] In certain embodiments of the methods of the disclosure, the transposase enzyme is a Super piggyBac (SPB) transposase enzyme. In certain embodiments, the Super piggyBac (SPB) transposase enzymes of the disclosure may comprise or consist of the amino acid sequence of the sequence of SEQ ID NO: 14487 wherein the amino acid substitution at position 30 is a substitution of a valine (V) for an isoleucine (I), the amino acid substitution at position 165 is a substitution of a serine (S) for a glycine (G), the amino acid substitution at position 282 is a substitution of a valine (V) for a methionine (M), and the amino acid substitution at position 538 is a substitution of a lysine (K) for an asparagine (N). In certain embodiments, the Super piggyBac (SPB) transposase enzyme may comprise or consist of an amino acid sequence at least 75%, 80%, 85%, 90%, 95%, 99% or any percentage in between identical to:

(SEQ ID NO: 14484)

| | |
|---|---|
| 1 | MGSSLDDEHI LSALLQSDDE LVGEDSDSEV |
| | SDHVSEDDVQ SDTEEAFIDE VHEVQPTSSG |
| 61 | SEILDEQNVI EQPGSSLASN RILTLPQRTI |
| | RGKNKHCWST SKSTRRSRVS ALNIVRSQRG |
| 121 | PTRMCRNIYD PLLCFKLFFT DEIISEIVKW |
| | TNAEISLKRR ESMTSATFRD TNEDEIYAFF |
| 181 | GILVMTAVRK DNHMSTDDLF DRSLSMVYVS |
| | VMSRDRFDFL IRCLRMDDKS IRPTLRENDV |
| 241 | FTPVRKIWDL FIHQCIQNYT PGAHLTIDEQ |
| | LLGFRGRCPF RVYIPNKPSK YGIKILMMCD |
| 301 | SGTKYMINGM PYLGRGTQTN GVPLGEYYVK |
| | ELSKPVHGSC RNITCDNWFT SIPLAKNLLQ |
| 361 | EPYKLTIVGT VRSNKREIPE VLKNSRSRPV |
| | GTSMFCFDGP LTLVSYKPKP AKMVYLLSSC |
| 421 | DEDASINEST GKPQMVMYYN QTKGGVDTLD |
| | QMCSVMTCSR KTNRWPMALL YGMINIACIN |
| 481 | SFIIYSHNVS SKGEKVQSRK KFMRNLYMSL |
| | TSSFMRKRLE APTLKRYLRD NISNILPKEV |
| 541 | PGTSDDSTEE PVMKKRTYCT YCPSKIRRKA |
| | NASCKKCKKV ICREHNIDMC QSCF. |

[0196] In certain embodiments of the methods of the disclosure, including those embodiments wherein the transposase comprises the above-described mutations at positions 30, 165, 282 and/or 538, the piggyBac or Super piggyBac transposase enzyme may further comprise an amino acid substitution at one or more of positions 3, 46, 82, 103, 119, 125, 177, 180, 185, 187, 200, 207, 209, 226, 235, 240, 241, 243, 258, 296, 298, 311, 315, 319, 327, 328, 340, 421, 436, 456, 470, 486, 503, 552, 570 and 591 of the sequence of SEQ ID NO: 14487 or SEQ ID NO: 14484. In certain embodiments, including those embodiments wherein the transposase comprises the above-described mutations at positions 30, 165, 282 and/or 538, the piggyBac or Super piggyBac transposase enzyme may further comprise an amino acid substitution at one or more of positions 46, 119, 125, 177, 180, 185, 187, 200, 207, 209, 226, 235, 240, 241, 243, 296, 298, 311, 315, 319, 327, 328, 340, 421, 436, 456, 470, 485, 503, 552 and 570. In certain embodiments, the amino acid substitution at position 3 of SEQ ID NO: 14487 or SEQ ID NO: 14484 is a substitution of an asparagine (N) for a serine (S). In certain embodiments, the amino acid substitution at position 46 of SEQ ID NO: 14487 or SEQ ID NO: 14484 is a substitution of a serine (S) for an alanine (A). In certain embodiments, the amino acid substitution at position 46 of SEQ ID NO: 14487 or SEQ ID NO: 14484 is a substitution of a threonine (T) for an alanine (A). In certain embodiments, the amino acid substitution at position 82 of SEQ ID NO: 14487 or SEQ ID NO: 14484 is a substitution of a tryptophan (W) for an isoleucine (I). In certain embodiments, the amino acid substitution at position 103 of SEQ ID NO: 14487 or SEQ ID NO: 14484 is a substitution of a proline (P) for a serine (S). In certain embodiments, the amino acid substitution at position 119 of SEQ ID NO: 14487 or SEQ ID NO: 14484 is a substitution of a proline (P) for an arginine (R). In certain embodiments, the amino acid substitution at position 125 of SEQ ID NO: 14487 or SEQ ID NO: 14484 is a substitution of an alanine (A) a cysteine (C). In certain embodiments, the amino acid substitution at position 125 of SEQ ID NO: 14487 or SEQ ID NO: 14484 is a substitution of a leucine (L) for a cysteine (C). In certain embodiments, the amino acid substitution at position 177 of SEQ ID NO: 14487 or SEQ ID NO: 14484 is a substitution of a lysine (K) for a tyrosine (Y). In certain embodiments, the amino acid substitution at position 177 of SEQ ID NO: 14487 or SEQ ID NO: 14484 is a substitution of a histidine (H) for a tyrosine (Y). In certain embodiments, the amino acid substitution at position 180 of SEQ ID NO: 14487 or SEQ ID NO: 14484 is a substitution of a leucine (L) for a phenylalanine (F). In certain embodiments, the amino acid substitution at position 180 of SEQ ID NO: 14487 or SEQ ID NO: 14484 is a substitution of an isoleucine (I) for a phenylalanine (F). In certain embodiments, the amino acid substitution at position 180 of SEQ ID NO: 14487 or SEQ ID NO: 14484 is a substitution of a valine (V) for a phenylalanine (F). In certain embodiments, the amino acid substitution at position 185 of SEQ ID NO: 14487 or SEQ ID NO: 14484 is a substitution of a leucine (L) for a methionine (M). In certain embodiments, the amino acid substitution at position 187 of SEQ ID NO: 14487 or SEQ ID NO: 14484 is a substitution of a glycine (G) for an alanine (A). In certain embodiments, the amino acid substitution at position 200 of SEQ ID NO: 14487 or SEQ ID NO: 14484 is a substitution of a tryptophan (W) for a phenylalanine (F).In certain embodiments, the amino acid substitution at position 207 of SEQ ID NO: 14487 or SEQ ID NO: 14484 is a substitution of a proline (P) for a valine (V). In certain embodiments, the amino acid substitution at position 209 of SEQ ID NO: 14487 or SEQ ID NO: 14484 is a substitution of a phenylalanine (F) for a valine (V). In certain embodiments, the amino acid substitution at position 226 of SEQ ID NO: 14487 or SEQ ID NO: 14484 is a substitution of a phenylalanine (F) for a methionine (M). In certain embodiments, the amino acid substitution at position 235 of SEQ ID NO: 14487 or SEQ ID NO: 14484 is a substitution of an arginine (R) for a leucine (L). In certain embodiments, the amino acid substitution at position 240 of SEQ ID NO: 14487 or SEQ ID NO: 14484 is a substitution of a lysine (K) for a valine (V). In certain embodiments, the amino acid substitution at position 241 of SEQ ID NO: 14487 or SEQ ID NO: 14484 is a substitution of a leucine (L) for a phenylalanine (F). In certain embodiments, the amino acid substitution at position 243 of SEQ ID NO: 14487 or SEQ ID NO: 14484 is a substitution of a lysine (K) for a proline (P). In certain embodiments, the amino acid substitution at position 258 of SEQ ID NO: 14487 or SEQ ID NO: 14484 is a substitution of a serine (S) for an asparagine (N). In certain embodiments, the amino acid substitution at position 296 of SEQ ID NO: 14487 or SEQ ID NO: 14484 is a substitution of a tryptophan (W) for a leucine (L). In certain embodiments, the amino acid substitution at position 296 of SEQ ID NO: 14487 or SEQ ID NO: 14484 is a substitution of a tyrosine (Y) for a leucine (L). In certain embodiments, the amino acid substitution at position 296 of SEQ ID NO: 14487 or SEQ ID NO: 14484 is a substitution of a phenylalanine (F) for a leucine (L). In certain embodiments, the amino acid substitution at position 298 of SEQ ID NO: 14487 or SEQ ID NO: 14484 is a substitution of a leucine (L) for a methionine (M). In certain embodiments, the amino acid substitution at position 298 of SEQ ID NO: 14487 or SEQ ID NO: 14484 is a substitution of an alanine (A) for a methionine (M). In certain embodiments, the amino acid substitution at position 298 of SEQ ID NO: 14487 or SEQ ID NO: 14484 is a substitution of a valine (V) for a methionine (M). In certain embodiments, the amino acid substitution at position 311 of SEQ ID NO: 14487 or SEQ ID NO: 14484 is a substitution of an isoleucine (I) for a proline (P). In certain embodiments, the amino acid substitution at position 311 of SEQ ID NO: 14487 or SEQ ID NO: 14484 is a substitution of a valine for a proline (P). In certain embodiments, the amino acid substitution at position 315 of SEQ ID NO: 14487 or SEQ ID NO: 14484 is a substitution of a lysine (K) for an arginine (R).In certain embodiments, the amino acid substitution at position 319 of SEQ ID NO: 14487 or SEQ ID NO: 14484 is a substitution of a glycine (G) for a threonine (T). In certain embodiments, the amino acid substitution at position 327 of SEQ ID NO: 14487 or SEQ ID NO: 14484 is a substitution of an arginine (R) for a tyrosine (Y). In certain embodiments, the amino acid substitution at position 328 of SEQ ID NO: 14487 or SEQ ID NO: 14484 is a substitution of a valine (V) for a tyrosine (Y). In certain embodiments, the amino acid substitution at position 340 of SEQ ID NO: 14487 or SEQ ID NO: 14484 is a substitution of a glycine (G) for a cysteine (C). In certain embodiments, the amino acid substitution at position 340 of SEQ ID NO: 14487 or SEQ ID NO: 14484 is a substitution of a leucine (L) for a cysteine (C). In certain embodiments, the amino acid substitution at position 421 of SEQ ID NO: 14487 or SEQ ID NO: 14484 is a substitution of a histidine (H) for the aspartic acid (D). In certain embodiments, the amino acid substitution at position 436 of SEQ ID NO: 14487 or SEQ ID NO: 14484 is a substitution of an isoleucine (I) for a valine (V). In certain embodiments, the amino acid substitution at position 456 of SEQ ID NO: 14487 or SEQ ID NO: 14484 is a substitution of a tyrosine (Y) for a methionine (M). In certain embodiments, the amino acid substitution at position 470 of SEQ ID NO: 14487 or SEQ ID NO: 14484 is a substitution of a phenylalanine (F) for a leucine (L). In certain embodiments, the amino acid substitution at position 485 of SEQ ID NO: 14487 or SEQ ID NO: 14484 is a substitution of a lysine (K) for a serine (S). In certain embodiments, the amino acid substitution at position 503 of SEQ ID NO: 14487 or SEQ ID NO: 14484 is a substitution of a leucine (L) for a methionine (M). In certain embodiments, the amino acid substitution at position 503 of SEQ ID NO: 14487 or SEQ ID NO: 14484 is a substitution of an isoleucine (I) for a methionine (M). In certain embodiments, the amino acid substitution at position 552 of SEQ ID NO: 14487 or SEQ ID NO: 14484 is a substitution of a lysine (K) for a valine (V). In certain embodiments, the amino acid substitution at position 570 of SEQ ID NO: 14487 or SEQ ID NO: 14484 is a substitution of a threonine (T) for an alanine (A). In certain embodiments, the amino acid substitution at position 591 of SEQ ID NO: 14487 or SEQ ID NO: 14484 is a substitution of a proline (P) for a glutamine (Q). In certain embodiments, the amino acid substitution at position 591 of SEQ ID NO: 14487 or SEQ ID NO: 14484 is a substitution of an arginine (R) for a glutamine (Q).

[0197] In certain embodiments of the methods of the disclosure, including those embodiments wherein the transposase comprises the above-described mutations at positions 30, 165, 282 and/or 538, the piggyBac transposase enzyme may comprise or the Super piggyBac transposase enzyme may further comprise an amino acid substitution at one or more of positions 103, 194, 372, 375, 450, 509 and 570 of the sequence of SEQ ID NO: 14487 or SEQ ID NO: 14484. In certain embodiments of the methods of the disclosure, including those embodiments wherein the transposase comprises the above-described mutations at positions 30, 165, 282 and/or 538, the piggyBac transposase enzyme may comprise or the Super piggyBac transposase enzyme may further comprise an amino acid substitution at two, three, four, five, six or more of positions 103, 194, 372, 375, 450, 509 and 570 of the sequence of SEQ ID NO: 14487 or SEQ ID NO: 14484. In certain embodiments, including those embodiments wherein the transposase comprises the above-described mutations at positions 30, 165, 282 and/or 538, the piggyBac transposase enzyme may comprise or the Super piggyBac transposase enzyme may further comprise an amino acid substitution at positions 103, 194, 372, 375, 450, 509 and 570 of the sequence of SEQ ID NO: 14487 or SEQ ID NO: 14484. In certain embodiments, the amino acid substitution at position 103 of SEQ ID NO: 14487 or SEQ ID NO: 14484 is a substitution of a proline (P) for a serine (S). In certain embodiments, the amino acid substitution at position 194 of SEQ ID NO: 14487 or SEQ ID NO: 14484 is a substitution of a valine (V) for a methionine (M). In certain embodiments, the amino acid substitution at position 372 of SEQ ID NO: 14487 or SEQ ID NO: 14484 is a substitution of an alanine (A) for an arginine (R). In certain embodiments, the amino acid substitution at position 375 of SEQ ID NO: 14487 or SEQ ID NO: 14484 is a substitution of an alanine (A) for a lysine (K). In certain embodiments, the amino acid substitution at position 450 of SEQ ID NO: 14487 or SEQ ID NO: 14484 is a substitution of an asparagine (N) for an aspartic acid (D). In certain embodiments, the amino acid substitution at position 509 of SEQ ID NO: 14487 or SEQ ID NO: 14484 is a substitution of a glycine (G) for a serine (S). In certain embodiments, the amino acid substitution at position 570 of SEQ ID NO: 14487 or SEQ ID NO: 14484 is a substitution of a serine (S) for an asparagine (N). In certain embodiments, the piggyBac transposase enzyme may comprise a substitution of a valine (V) for a methionine (M) at position 194 of SEQ ID NO: 14487. In certain embodiments, including those embodiments wherein the piggyBac transposase enzyme may comprise a substitution of a valine (V) for a methionine (M) at position 194 of SEQ ID NO: 14487, the piggyBac transposase enzyme may further comprise an amino acid substitution at positions 372, 375 and 450 of the sequence of SEQ ID NO: 14487 or SEQ ID NO: 14484. In certain embodiments, the piggyBac transposase enzyme may comprise a substitution of a valine (V) for a methionine (M) at position 194 of SEQ ID NO: 14487, a substitution of an alanine (A) for an arginine (R) at position 372 of SEQ ID NO: 14487, and a substitution of an alanine (A) for a lysine (K) at position 375 of SEQ ID NO: 14487. In certain embodiments, the piggyBac transposase enzyme may comprise a substitution of a valine (V) for a methionine (M) at position 194 of SEQ ID NO: 14487, a substitution of an alanine (A) for an arginine (R) at position 372 of SEQ ID NO: 14487, a substitution of an alanine (A) for a lysine (K) at position 375 of SEQ ID NO: 14487 and a substitution of an asparagine (N) for an aspartic acid (D) at position 450 of SEQ ID NO: 14487.

[0198] The sleeping beauty transposon is transposed into the target genome by the Sleeping Beauty transposase that recognizes ITRs, and moves the contents between the ITRs into TA chromosomal sites. In various embodiments, SB transposon-mediated gene transfer, or gene transfer using any of a number of similar transposons, may be used in the compositions and methods of the disclosure.

[0199] In certain embodiments, and, in particular, those embodiments wherein the transposon is a Sleeping Beauty transposon, the transposase is a Sleeping Beauty transposase or a hyperactive Sleeping Beauty transposase (SB100X).

[0200] In certain embodiments of the methods of the disclosure, the Sleeping Beauty transposase enzyme comprises an amino acid sequence at least 75%, 80%, 85%, 90%, 95%, 99% or any percentage in between identical to:

(SEQ ID NO: 14485)

| | |
|---|---|
| 1 | MGKSKEISQD LRKKIVDLHK SGSSLGAISK |
| | RLKVPRSSVQ TIVRKYKHHG TTQPSYRSGR |
| 61 | RRVLSPRDER TLVRKVQINP RTTAKDLVKM |
| | LEETGTKVSI STVKRVLYRH NLKGRSARKK |
| 121 | PLLQNRHKKA RLRFATAHGD KDRTFWRNVL |
| | WSDETKIELF GHNDHRYVWR KKGEACKPKN |
| 181 | TIPTVKHGGG SIMLWGCFAA GGTGALHKID |
| | GIMRKENYVD ILKQHLKTSV RKLKLGRKWV |
| 241 | FQMDNDPKHT SKVVAKWLKD NKVKVLEWPS |
| | QSPDLNPIEN LWAELKKRVR ARRPTNLTQL |
| 301 | HQLCQEEWAK IHPTYCGKLV EGYPKRLTQV |
| | KQFKGNATKY. |

[0201] In certain embodiments of the methods of the disclosure, the hyperactive Sleeping Beauty (SB100X) transposase enzyme comprises an amino acid sequence at least 75%, 80%, 85%, 90%, 95%, 99% or any percentage in between identical to:

(SEQ ID NO: 14486)

| | |
|---|---|
| 1 | MGKSKEISQD LRKRIVDLHK SGSSLGAISK |
| | RLAVPRSSVQ TIVRKYKHHG TTQPSYRSGR |
| 61 | RRVLSPRDER TLVRKVQINP RTTAKDLVKM |
| | LEETGTKVSI STVKRVLYRH NLKGHSARKK |
| 121 | PLLQNRHKKA RLRFATAHGD KDRTFWRNVL |
| | WSDETKIELF GHNDHRYVWR KKGEACKPKN |
| 181 | TIPTVKHGGG SIMLWGCFAA GGTGALHKID |
| | GIMDAVQYVD ILKQHLKTSV RKLKLGRKWV |
| 241 | FQHDNDPKHT SKVVAKWLKD NKVKVLEWPS |
| | QSPDLNPIEN LWAELKKRVR ARRPTNLTQL |
| 301 | HQLCQEEWAK IHPNYCGKLV EGYPKRLTQV |
| | KQFKGNATKY. |

[0202] The Helraiser transposon is transposed by the Helitron transposase. Helitron transposases mobilize the Helraiser transposon, an ancient element from the bat genome that was active about 30 to 36 million years ago. An exemplary Helraiser transposon of the disclosure includes Helibat1, which comprises a nucleic acid sequence comprising:

| (SEQ ID NO: 17006) | |
|---|---|
| 1 | TCCTATATAA TAAAAGAGAA ACATGCAAAT TGACCATCCC TCCGCTACGC TCAAGCCACG |
| 61 | CCCACCAGCC AATCAGAAGT GACTATGCAA ATTAACCCAA CAAAGATGGC AGTTAAATTT |
| 121 | GCATACGCAG GTGTCAAGCG CCCCAGGAGG CAACGGCGGC CGCGGGCTCC CAGGACCTTC |
| 181 | GCTGGCCCCG GGAGGCGAGG CCGGCCGCGC CTAGCCACAC CCGCGGGCTC CCGGGACCTT |
| 241 | CGCCAGCAGA GAGCAGAGCG GGAGAGCGGG CGGAGAGCGG GAGGTTTGGA GGACTTGGCA |
| 301 | GAGCAGGAGG CCGCTGGACA TAGAGCAGAG CGAGAGAGAG GGTGGCTTGG AGGGCGTGGC |
| 361 | TCCCTCTGTC ACCCCAGCTT CCTCATCACA GCTGTGGAAA CTGACAGCAG GGAGGAGGAA |
| 421 | GTCCCACCCC CACAGAATCA GCCAGAATCA GCCGTTGGTC AGACAGCTCT CAGCGGCCTG |
| 481 | ACAGCCAGGA CTCTCATTCA CCTGCATCTC AGACCGTGAC AGTAGAGAGG TGGGACTATG |
| 541 | TCTAAAGAAC AACTGTTGAT ACAACGTAGC TCTGCAGCCG AAAGATGCCG GCGTTATCGA |
| 601 | CAGAAAATGT CTGCAGAGCA ACGTGCGTCT GATCTTGAAA GAAGGCGGCG CCTGCAACAG |
| 661 | AATGTATCTG AAGAGCAGCT ACTGGAAAAA CGTCGCTCTG AAGCCGAAAA ACAGCGGCGT |
| 721 | CATCGACAGA AAATGTCTAA AGACCAACGT GCCTTTGAAG TTGAAAGAAG GCGGTGGCGA |
| 781 | CGACAGAATA TGTCTAGAGA ACAGTCATCA ACAAGTACTA CCAATACCGG TAGGAACTGC |
| 841 | CTTCTCAGCA AAAATGGAGT ACATGAGGAT GCAATTCTCG AACATAGTTG TGGTGGAATG |
| 901 | ACTGTTCGAT GTGAATTTTG CCTATCACTA AATTTCTCTG ATGAAAAACC ATCCGATGGG |
| 961 | AAATTTACTC GATGTTGTAG CAAAGGGAAA GTCTGTCCAA ATGATATACA TTTTCCAGAT |
| 1021 | TACCCGGCAT ATTTAAAAAG ATTAATGACA AACGAAGATT CTGACAGTAA AAATTTCATG |
| 1081 | GAAAATATTC GTTCCATAAA TAGTTCTTTT GCTTTTGCTT CCATGGGTGC AAATATTGCA |
| 1141 | TCGCCATCAG GATATGGGCC ATACTGTTTT AGAATACACG GACAAGTTTA TCACCGTACT |
| 1201 | GGAACTTTAC ATCCTTCGGA TGGTGTTTCT CGGAAGTTTG CTCAACTCTA TATTTTGGAT |
| 1261 | ACAGCCGAAG CTACAAGTAA AAGATTAGCA ATGCCAGAAA ACCAGGGCTG CTCAGAAAGA |
| 1321 | CTCATGATCA ACATCAACAA CCTCATGCAT GAAATAAATG AATTAACAAA ATCGTACAAG |
| 1381 | ATGCTACATG AGGTAGAAAA GGAAGCCCAA TCTGAAGCAG CAGCAAAAGG TATTGCTCCC |
| 1441 | ACAGAAGTAA CAATGGCGAT TAAATACGAT CGTAACAGTG ACCCAGGTAG ATATAATTCT |
| 1501 | CCCCGTGTAA CCGAGGTTGC TGTCATATTC AGAAACGAAG ATGGAGAACC TCCTTTTGAA |
| 1561 | AGGGACTTGC TCATTCATTG TAAACCAGAT CCCAATAATC CAAATGCCAC TAAAATGAAA |
| 1621 | CAAATCAGTA TCCTGTTTCC TACATTAGAT GCAATGACAT ATCCTATTCT TTTTCCACAT |
| 1681 | GGTGAAAAAG GCTGGGGAAC AGATATTGCA TTAAGACTCA GAGACAACAG TGTAATCGAC |
| 1741 | AATAATACTA GACAAAATGT AAGGACACGA GTCACACAAA TGCAGTATTA TGGATTTCAT |
| 1801 | CTCTCTGTGC GGGACACGTT CAATCCTATT TTAAATGCAG GAAAATTAAC TCAACAGTTT |
| 1861 | ATTGTGGATT CATATTCAAA AATGGAGGCC AATCGGATAA ATTTCATCAA AGCAAACCAA |
| 1921 | TCTAAGTTGA GAGTTGAAAA ATATAGTGGT TTGATGGATT ATCTCAAATC TAGATCTGAA |
| 1981 | AATGACAATG TGCCGATTGG TAAAATGATA ATACTTCCAT CATCTTTTGA GGGTAGTCCC |
| 2041 | AGAAATATGC AGCAGCGATA TCAGGATGCT ATGGCAATTG TAACGAAGTA TGGCAAGCCC |
| 2101 | GATTTATTCA TAACCATGAC ATGCAACCCC AAATGGGCAG ATATTACAAA CAATTTACAA |
| 2161 | CGCTGGCAAA AAGTTGAAAA CAGACCTGAC TTGGTAGCCA GAGTTTTTAA TATTAAGCTG |
| 2221 | AATGCTCTTT TAAATGATAT ATGTAAATTC CATTTATTTG GCAAAGTAAT AGCTAAAATT |
| 2281 | CATGTCATTG AATTTCAGAA ACGCGGACTG CCTCACGCTC ACATATTATT GATATTAGAT |
| 2341 | AGTGAGTCCA AATTACGTTC AGAAGATGAC ATTGACCGTA TAGTTAAGGC AGAAATTCCA |
| 2401 | GATGAAGACC AGTGTCCTCG ACTTTTTCAA ATTGTAAAAT CAAATATGGT ACATGGACCA |
| 2461 | TGTGGAATAC AAAATCCAAA TAGTCCATGT ATGGAAAATG GAAAATGTTC AAAGGGATAT |
| 2521 | CCAAAAGAAT TTCAAAATGC GACCATTGGA AATATTGATG GATATCCCAA ATACAAACGA |
| 2581 | AGATCTGGTA GCACCATGTC TATTGGAAAT AAAGTTGTCG ATAACACTTG GATTGTCCCT |
| 2641 | TATAACCCGT ATTTGTGCCT TAAATATAAC TGTCATATAA ATGTTGAAGT CTGTGCATCA |
| 2701 | ATTAAAAGTG TCAAATATTT ATTTAAATAC ATCTATAAAG GGCACGATTG TGCAAATATT |
| 2761 | CAAATTTCTG AAAAAAATAT TATCAATCAT GACGAAGTAC AGGACTTCAT TGACTCCAGG |
| 2821 | TATGTGAGCG CTCCTGAGGC TGTTTGGAGA CTTTTTGCAA TGCGAATGCA TGACCAATCT |
| 2881 | CATGCAATCA CAAGATTAGC TATTCATTTG CCAAATGATC AGAATTTGTA TTTTCATACC |
| 2941 | GATGATTTTG CTGAAGTTTT AGATAGGGCT AAAAGGCATA ACTCGACTTT GATGGCTTGG |
| 3001 | TTCTTATTGA ATAGAGAAGA TTCTGATGCA CGTAATTATT ATTATTGGGA GATTCCACAG |
| 3061 | CATTATGTGT TTAATAATTC TTTGTGGACA AAACGCCGAA AGGGTGGGAA TAAAGTATTA |
| 3121 | GGTAGACTGT TCACTGTGAG CTTTAGAGAA CCAGAACGAT ATTACCTTAG ACTTTTGCTT |
| 3181 | CTGCATGTAA AAGGTGCGAT AAGTTTTGAG GATCTGCGAA CTGTAGGAGG TGTAACTTAT |
| 3241 | GATACATTTC ATGAAGCTGC TAAACACCGA GGATTATTAC TTGATGACAC TATCTGGAAA |
| 3301 | GATACGATTG ACGATGCAAT CATCCTTAAT ATGCCCAAAC AACTACGGCA ACTTTTTGCA |
| 3361 | TATATATGTG TGTTTGGATG TCCTTCTGCT GCAGACAAAT TATGGGATGA GAATAAATCT |
| 3421 | CATTTTATTG AAGATTTCTG TTGGAAATTA CACCGAAGAG AAGGTGCCTG TGTGAACTGT |
| 3481 | GAAATGCATG CCCTTAACGA AATTCAGGAG GTATTCACAT TGCATGGAAT GAAATGTTCA |
| 3541 | CATTTCAAAC TTCCGGACTA TCCTTTATTA ATGAATGCAA ATACATGTGA TCAATTGTAC |
| 3601 | GAGCAACAAC AGGCAGAGGT TTTGATAAAT TCTCTGAATG ATGAACAGTT GGCAGCCTTT |
| 3661 | CAGACTATAA CTTCAGCCAT CGAAGATCAA ACTGTACACC CCAAATGCTT TTTCTTGGAT |
| 3721 | GGTCCAGGTG GTAGTGGAAA AACATATCTG TATAAAGTTT TAACACATTA TATTAGAGGT |
| 3781 | CGTGGTGGTA CTGTTTTACC CACAGCATCT ACAGGAATTG CTGCAAATTT ACTTCTTGGT |
| 3841 | GGAAGAACCT TTCATTCCCA ATATAAATTA CCAATTCCAT TAAATGAAAC TTCAATTTCT |
| 3901 | AGACTCGATA TAAAGAGTGA AGTTGCTAAA ACCATTAAAA AGGCCCAACT TCTCATTATT |
| 3961 | GATGAATGCA CCATGGCATC CAGTCATGCT ATAAACGCCA TAGATAGATT ACTAAGAGAA |
| 4021 | ATTATGAATT TGAATGTTGC ATTTGGTGGG AAAGTTCTCC TTCTCGGAGG GGATTTTCGA |
| 4081 | CAATGTCTCA GTATTGTACC ACATGCTATG CGATCGGCCA TAGTACAAAC GAGTTTAAAG |
| 4141 | TACTGTAATG TTTGGGGATG TTTCAGAAAG TTGTCTCTTA AAACAAATAT GAGATCAGAG |
| 4201 | GATTCTGCTT ATAGTGAATG GTTAGTAAAA CTTGGAGATG GCAAACTTGA TAGCAGTTTT |
| 4261 | CATTTAGGAA TGGATATTAT TGAAATCCCC CATGAAATGA TTTGTAACGG ATCTATTATT |
| 4321 | GAAGCTACCT TTGGAAATAG TATATCTATA GATAATATTA AAAATATATC TAAACGTGCA |
| 4381 | ATTCTTTGTC CAAAAAATGA GCATGTTCAA AAATTAAATG AAGAAATTTT GGATATACTT |
| 4441 | GATGGAGATT TTCACACATA TTTGAGTGAT GATTCCATTG ATTCAACAGA TGATGCTGAA |
| 4501 | AAGGAAAATT TTCCCATCGA ATTTCTTAAT AGTATTACTC CTTCGGGAAT GCCGTGTCAT |
| 4561 | AAATTAAAAT TGAAAGTGGG TGCAATCATC ATGCTATTGA GAAATCTTAA TAGTAAATGG |
| 4621 | GGTCTTTGTA ATGGTACTAG ATTTATTATC AAAAGATTAC GACCTAACAT TATCGAAGCT |
| 4681 | GAAGTATTAA CAGGATCTGC AGAGGGAGAG GTTGTTCTGA TTCCAAGAAT TGATTTGTCC |
| 4741 | CCATCTGACA CTGGCCTCCC ATTTAAATTA ATTCGAAGAC AGTTTCCCGT GATGCCAGCA |
| 4801 | TTTGCGATGA CTATTAATAA ATCACAAGGA CAAACTCTAG ACAGAGTAGG AATATTCCTA |
| 4861 | CCTGAACCCG TTTTCGCACA TGGTCAGTTA TATGTTGCTT TCTCTCGAGT TCGAAGAGCA |
| 4921 | TGTGACGTTA AAGTTAAAGT TGTAAATACT TCATCACAAG GGAAATTAGT CAAGCACTCT |
| 4981 | GAAAGTGTTT TTACTCTTAA TGTGGTATAC AGGGAGATAT TAGAATAAGT TTAATCACTT |
| 5041 | TATCAGTCAT TGTTTGCATC AATGTTGTTT TTATATCATG TTTTTGTTGT TTTTATATCA |
| 5101 | TGTCTTTGTT GTTGTTATAT CATGTTGTTA TTGTTTATTT ATTAATAAAT TTATGTATTA |
| 5161 | TTTTCATATA CATTTTACTC ATTTCCTTTC ATCTCTCACA CTTCTATTAT AGAGAAAGGG |
| 5221 | CAAATAGCAA TATTAAAATA TTTCCTCTAA TTAATTCCCT TTCAATGTGC ACGAATTTCG |
| 5281 | TGCACCGGGC CACTAG. |

[0203] Unlike other transposases, the Helitron transposase does not contain an RNase-H like catalytic domain, but instead comprises a RepHel motif made up of a replication initiator domain (Rep) and a DNA helicase domain. The Rep domain is a nuclease domain of the HUH superfamily of nucleases.

[0204] An exemplary Helitron transposase of the disclosure comprises an amino acid sequence comprising:

(SEQ ID NO: 14501)

| | |
|---|---|
| 1 | MSKEQLLIQR SSAAERCRRY RQKMSAEQRA |
| | SDLERRRRLQ QNVSEEQLLE KRRSEAEKQR |
| 61 | RHRQKMSKDQ RAFEVERRRW RRQNMSREQS |
| | STSTTNTGRN CLLSKNGVHE DAILEHSCGG |
| 121 | MTVRCEFCLS LNFSDEKPSD GKFTRCCSKG |
| | KVCPNDIHFP DYPAYLKRLM TNEDSDSKNF |
| 181 | MENIRSINSS FAFASMGANI ASPSGYGPYC |
| | FRIHGQVYHR TGTLHPSDGV SRKFAQLYIL |
| 241 | DTAEATSKRL AMPENQGCSE RLMININNLM |
| | HEINELTKSY KMLHEVEKEA QSEAAAKGIA |
| 301 | PTEVIMAIKY DRNSDPGRYN SPRVTEVAVI |
| | FRNEDGEPPF ERDLLIHCKP DPNNPNATKM |
| 361 | KQISILFPTL DAMTYPILFP HGEKGWGTDI |
| | ALRLRDNSVI DNNTRQNVRT RVTQMQYYGF |
| 421 | HLSVRDTFNP ILNAGKLTQQ FIVDSYSKME |
| | ANRINFIKAN QSKLRVEKYS GLMDYLKSRS |
| 481 | ENDNVPIGKM IILPSSFEGS PRNMQQRYQD |
| | AMAIVTKYGK PDLFITMTCN PKWADITNNL |
| 541 | QRWQKVENRP DLVARVFNIK LNALLNDICK |
| | FHLFGKVIAK IHVIEFQKRG LPHAHILLIL |
| 601 | DSESKLRSED DIDRIVKAEI PDEDQCPRLF |
| | QIVKSNMVHG PCGIQNPNSP CMENGKCSKG |
| 661 | YPKEFQNATI GNIDGYPKYK RRSGSTMSIG |
| | NKVVDNTWIV PYNPYLCLKY NCHINVEVCA |
| 721 | SIKSVKYLFK YIYKGHDCAN IQISEKNIIN |
| | HDEVQDFIDS RYVSAPEAVW RLFAMRMHDQ |
| 781 | SHAITRLAIH LPNDQNLYFH TDDFAEVLDR |
| | AKRHNSTLMA WFLLNREDSD ARNYYYWEIP |
| 841 | QHYVFNNSLW TKRRKGGNKV LGRLFTVSFR |
| | EPERYYLRLL LLHVKGAISF EDLRTVGGVT |
| 901 | YDTFHEAAKH RGLLLDDTIW KDTIDDAIIL |
| | NMPKQLRQLF AYICVFGCPS AADKLWDENK |
| 961 | SHFIEDFCWK LHRREGACVN CEMHALNEIQ |
| | EVFTLHGMKC SHFKLPDYPL LMNANTCDQL |
| 1021 | YEQQQAEVLI NSLNDEQLAA FQTITSAIED |
| | QTVHPKCFFL DGPGGSGKTY LYKVLTHYIR |
| 1081 | GRGGTVLPTA STGIAANLLL GGRTFHSQYK |
| | LPIPLNETSI SRLDIKSEVA KTIKKAQLLI |
| 1141 | IDECTMASSH AINAIDRLLR EIMNLNVAFG |
| | GKVLLLGGDF RQCLSIVPHA MRSAIVQTSL |
| 1201 | KYCNVWGCFR KLSLKTNMRS EDSAYSEWLV |
| | KLGDGKLDSS FHLGMDIIEI PHEMICNGSI |
| 1261 | IEATFGNSIS IDNIKNISKR AILCPKNEHV |
| | QKLNEEILDI LDGDFHTYLS DDSIDSTDDA |
| 1321 | EKENFPIEFL NSITPSGMPC HKLKLKVGAI |
| | IMLLRNLNSK WGLCNGTRFI IKRLRPNIIE |
| 1381 | AEVLTGSAEG EVVLIPRIDL SPSDTGLPFK |
| | LIRRQFPVMP AFAMTINKSQ GQTLDRVGIF |
| 1441 | LPEPVFAHGQ LYVAFSRVRR ACDVKVKVVN |
| | TSSQGKLVKH SESVFTLNVV YREILE. |

[0205] In Helitron transpositions, a hairpin close to the 3′ end of the transposon functions as a terminator. However, this hairpin can be bypassed by the transposase, resulting in the transduction of flanking sequences. In addition, Helraiser transposition generates covalently closed circular intermediates. Furthermore, Helitron transpositions can lack target site duplications. In the Helraiser sequence, the transposase is flanked by left and right terminal sequences termed LTS (5′ terminal sequence) and RTS (3′ terminal sequence). These sequences terminate with a conserved 5′-TC/CTAG-3′ motif. A 19 bp palindromic sequence with the potential to form the hairpin termination structure is located 11 nucleotides upstream of the RTS and consists of the sequence GTGCACGAATTTCGTGCACCGGGCCACTAG (SEQ ID NO: 14500).

[0206] Tol2 transposons may be isolated or derived from the genome of the medaka fish, and may be similar to transposons of the hAT family. Exemplary Tol2 transposons of the disclosure are encoded by a sequence comprising about 4.7 kilobases and contain a gene encoding the Tol2 transposase, which contains four exons. An exemplary Tol2 transposase of the disclosure comprises an amino acid sequence comprising the following:

(SEQ ID NO: 14502)

| | |
|---|---|
| 1 | MEEVCDSSAA ASSTVQNQPQ DQEHPWPYLR |
| | EFFSLSGVNK DSFKMKCVLC LPLNKEISAF |
| 61 | KSSPSNLRKH IERMHPNYLK NYSKLTAQKR |
| | KIGTSTHASS SKQLKVDSVF PVKHVSPVTV |
| 121 | NKAILRYIIQ GLHPFSTVDL PSFKELISTL |
| | QPGISVITRP TLRSKIAEAA LIMKQKVTAA |
| 181 | MSEVEWIATT TDCWTARRKS FIGVTAHWIN |
| | PGSLERHSAA LACKRLMGSH TFEVLASAMN |
| 241 | DIHSEYEIRD KVVCTTTDSG SNFMKAFRVF |
| | GVENNDIETE ARRCESDDTD SEGCGEGSDG |
| 301 | VEFQDASRVL DQDDGFEFQL PKHQKCACHL |
| | LNLVSSVDAQ KALSNEHYKK LYRSVFGKCQ |
| 361 | ALWNKSSRSA LAAEAVESES RLQLLRPNQT |
| | RWNSTFMAVD RILQICKEAG EGALRNICTS |
| 421 | LEVPMFNPAE MLFLTEWANT MRPVAKVLDI |
| | LQAETNTQLG WLLPSVHQLS LKLQRLHHSL |
| 481 | RYCDPLVDAL QQGIQTRFKH MFEDPEITAA |
| | AILLPKFRTS WTNDETIIKR GMDYIRVHLE |
| 541 | PLDHKKELAN SSSDDEDFFA SLKPTTHEAS |
| | KELDGYLACV SDTRESLLTF PAICSLSIKT |
| 601 | NTPLPASAAC ERLFSTAGLL FSPKRARLDT |
| | NNFENQLLLK LNLRFYNFE. |

[0207] An exemplary Tol2 transposon of the disclosure, including inverted repeats, subterminal sequences and the Tol2 transposase, is encoded by a nucleic acid sequence comprising the following:

| (SEQ ID NO: 17007) | |
|---|---|
| 1 | CAGAGGTGTA AAGTACTTGA GTAATTTTAC TTGATTACTG TACTTAAGTA TTATTTTTGG |
| 61 | GGATTTTTAC TTTACTTGAG TACAATTAAA AATCAATACT TTTACTTTTA CTTAATTACA |
| 121 | TTTTTTTAGA AAAAAAAGTA CTTTTTACTC CTTACAATTT TATTTACAGT CAAAAAGTAC |
| 181 | TTATTTTTTG GAGATCACTT CATTCTATTT TCCCTTGCTA TTACCAAACC AATTGAATTG |
| 241 | CGCTGATGCC CAGTTTAATT TAAATGTTAT TTATTCTGCC TATGAAAATC GTTTTCACAT |
| 301 | TATATGAAAT TGGTCAGACA TGTTCATTGG TCCTTTGGAA GTGACGTCAT GTCACATCTA |
| 361 | TTACCACAAT GCACAGCACC TTGACCTGGA AATTAGGGAA ATTATAACAG TCAATCAGTG |
| 421 | GAAGAAAATG GAGGAAGTAT GTGATTCATC AGCAGCTGCG AGCAGCACAG TCCAAAATCA |
| 481 | GCCACAGGAT CAAGAGCACC CGTGGCCGTA TCTTCGCGAA TTCTTTTCTT TAAGTGGTGT |
| 541 | AAATAAAGAT TCATTCAAGA TGAAATGTGT CCTCTGTCTC CCGCTTAATA AAGAAATATC |
| 601 | GGCCTTCAAA AGTTCGCCAT CAAACCTAAG GAAGCATATT GAGGTAAGTA CATTAAGTAT |
| 661 | TTTGTTTTAC TGATAGTTTT TTTTTTTTTT TTTTTTTTTT TTTTTGGGTG TGCATGTTTT |
| 721 | GACGTTGATG GCGCGCCTTT TATATGTGTA GTAGGCCTAT TTTCACTAAT GCATGCGATT |
| 781 | GACAATATAA GGCTCACGTA ATAAAATGCT AAAATGCATT TGTAATTGGT AACGTTAGGT |
| 841 | CCACGGGAAA TTTGGCGCCT ATTGCAGCTT TGAATAATCA TTATCATTCC GTGCTCTCAT |
| 901 | TGTGTTTGAA TTCATGCAAA ACACAAGAAA ACCAAGCGAG AAATTTTTTT CCAAACATGT |
| 961 | TGTATTGTCA AAACGGTAAC ACTTTACAAT GAGGTTGATT AGTTCATGTA TTAACTAACA |
| 1021 | TTAAATAACC ATGAGCAATA CATTTGTTAC TGTATCTGTT AATCTTTGTT AACGTTAGTT |
| 1081 | AATAGAAATA CAGATGTTCA TTGTTTGTTC ATGTTAGTTC ACAGTGCATT AACTAATGTT |
| 1141 | AACAAGATAT AAAGTATTAG TAAATGTTGA AATTAACATG TATACGTGCA GTTCATTATT |
| 1201 | AGTTCATGTT AACTAATGTA GTTAACTAAC GAACCTTATT GTAAAAGTGT TACCATCAAA |
| 1261 | ACTAATGTAA TGAAATCAAT TCACCCTGTC ATGTCAGCCT TACAGTCCTG TGTTTTTGTC |
| 1321 | AATATAATCA GAAATAAAAT TAATGTTTGA TTGTCACTAA ATGCTACTGT ATTTCTAAAA |
| 1381 | TCAACAAGTA TTTAACATTA TAAAGTGTGC AATTGGCTGC AAATGTCAGT TTTATTAAAG |
| 1441 | GGTTAGTTCA CCCAAAAATG AAAATAATGT CATTAATGAC TCGCCCTCAT GTCGTTCCAA |
| 1501 | GCCCGTAAGA CCTCCGTTCA TCTTCAGAAC ACAGTTTAAG ATATTTTAGA TTTAGTCCGA |
| 1561 | GAGCTTTCTG TGCCTCCATT GAGAATGTAT GTACGGTATA CTGTCCATGT CCAGAAAGGT |
| 1621 | AATAAAAACA TCAAAGTAGT CCATGTGACA TCAGTGGGTT AGTTAGAATT TTTTGAAGCA |
| 1681 | TCGAATACAT TTTGGTCCAA AAATAACAAA ACCTACGACT TTATTCGGCA TTGTATTCTC |
| 1741 | TTCCGGGTCT GTTGTCAATC CGCGTTCACG ACTTCGCAGT GACGCTACAA TGCTGAATAA |
| 1801 | AGTCGTAGGT TTTGTTATTT TTGGACCAAA ATGTATTTTC GATGCTTCAA ATAATTCTAC |
| 1861 | CTAACCCACT GATGTCACAT GGACTACTTT GATGTTTTTA TTACCTTTCT GGACATGGAC |
| 1921 | AGTATACCGT ACATACATTT TCAGTGGAGG GACAGAAAGC TCTCGGACTA AATCTAAAAT |
| 1981 | ATCTTAAACT GTGTTCCGAA GATGAACGGA GGTGTTACGG GCTTGGAACG ACATGAGGGT |
| 2041 | GAGTCATTAA TGACATCTTT TCATTTTTGG GTGAACTAAC CCTTTAATGC TGTAATCAGA |
| 2101 | GAGTGTATGT GTAATTGTTA CATTTATTGC ATACAATATA AATATTTATT TGTTGTTTTT |
| 2161 | ACAGAGAATG CACCCAAATT ACCTCAAAAA CTACTCTAAA TTGACAGCAC AGAAGAGAAA |
| 2221 | GATCGGGACC TCCACCCATG CTTCCAGCAG TAAGCAACTG AAAGTTGACT CAGTTTTCCC |
| 2281 | AGTCAAACAT GTGTCTCCAG TCACTGTGAA CAAAGCTATA TTAAGGTACA TCATTCAAGG |
| 2341 | ACTTCATCCT TTCAGCACTG TTGATCTGCC ATCATTTAAA GAGCTGATTA GTACACTGCA |
| 2401 | GCCTGGCATT TCTGTCATTA CAAGGCCTAC TTTACGCTCC AAGATAGCTG AAGCTGCTCT |
| 2461 | GATCATGAAA CAGAAAGTGA CTGCTGCCAT GAGTGAAGTT GAATGGATTG CAACCACAAC |
| 2521 | GGATTGTTGG ACTGCACGTA GAAAGTCATT CATTGGTGTA ACTGCTCACT GGATCAACCC |
| 2581 | TGGAAGTCTT GAAAGACATT CCGCTGCACT TGCCTGCAAA AGATTAATGG GCTCTCATAC |
| 2641 | TTTTGAGGTA CTGGCCAGTG CCATGAATGA TATCCACTCA GAGTATGAAA TACGTGACAA |
| 2701 | GGTTGTTTGC ACAACCACAG ACAGTGGTTC CAACTTTATG AAGGCTTTCA GAGTTTTTGG |
| 2761 | TGTGGAAAAC AATGATATCG AGACTGAGGC AAGAAGGTGT GAAAGTGATG ACACTGATTC |
| 2821 | TGAAGGCTGT GGTGAGGGAA GTGATGGTGT GGAATTCCAA GATGCCTCAC GAGTCCTGGA |
| 2881 | CCAAGACGAT GGCTTCGAAT TCCAGCTACC AAAACATCAA AAGTGTGCCT GTCACTTACT |
| 2941 | TAACCTAGTC TCAAGCGTTG ATGCCCAAAA AGCTCTCTCA AATGAACACT ACAAGAAACT |
| 3001 | CTACAGATCT GTCTTTGGCA AATGCCAAGC TTTATGGAAT AAAAGCAGCC GATCGGCTCT |
| 3061 | AGCAGCTGAA GCTGTTGAAT CAGAAAGCCG GCTTCAGCTT TTAAGGCCAA ACCAAACGCG |
| 3121 | GTGGAATTCA ACTTTTATGG CTGTTGACAG AATTCTTCAA ATTTGCAAAG AAGCAGGAGA |
| 3181 | AGGCGCACTT CGGAATATAT GCACCTCTCT TGAGGTTCCA ATGTAAGTGT TTTTCCCCTC |
| 3241 | TATCGATGTA AACAAATGTG GGTTGTTTTT GTTTAATACT CTTTGATTAT GCTGATTTCT |
| 3301 | CCTGTAGGTT TAATCCAGCA GAAATGCTGT TCTTGACAGA GTGGGCCAAC ACAATGCGTC |
| 3361 | CAGTTGCAAA AGTACTCGAC ATCTTGCAAG CGGAAACGAA TACACAGCTG GGGTGGCTGC |
| 3421 | TGCCTAGTGT CCATCAGTTA AGCTTGAAAC TTCAGCGACT CCACCATTCT CTCAGGTACT |
| 3481 | GTGACCCACT TGTGGATGCC CTACAACAAG GAATCCAAAC ACGATTCAAG CATATGTTTG |
| 3541 | AAGATCCTGA GATCATAGCA GCTGCCATCC TTCTCCCTAA ATTTCGGACC TCTTGGACAA |
| 3601 | ATGATGAAAC CATCATAAAA CGAGGTAAAT GAATGCAAGC AACATACACT TGACGAATTC |
| 3661 | TAATCTGGGC AACCTTTGAG CCATACCAAA ATTATTCTTT TATTTATTTA TTTTTGCACT |
| 3721 | TTTTAGGAAT GTTATATCCC ATCTTTGGCT GTGATCTCAA TATGAATATT GATGTAAAGT |
| 3781 | ATTCTTGCAG CAGGTTGTAG TTATCCCTCA GTGTTTCTTG AAACCAAACT CATATGTATC |
| 3841 | ATATGTGGTT TGGAAATGCA GTTAGATTTT ATGCTAAAAT AAGGGATTTG CATGATTTTA |
| 3901 | GATGTAGATG ACTGCACGTA AATGTAGTTA ATGACAAAAT CCATAAAATT TGTTCCCAGT |
| 3961 | CAGAAGCCCC TCAACCAAAC TTTTCTTTGT GTCTGCTCAC TGTGCTTGTA GGCATGGACT |
| 4021 | ACATCAGAGT GCATCTGGAG CCTTTGGACC ACAAGAAGGA ATTGGCCAAC AGTTCATCTG |
| 4081 | ATGATGAAGA TTTTTTCGCT TCTTTGAAAC CGACAACACA TGAAGCCAGC AAAGAGTTGG |
| 4141 | ATGGATATCT GGCCTGTGTT TCAGACACCA GGGAGTCTCT GCTCACGTTT CCTGCTATTT |
| 4201 | GCAGCCTCTC TATCAAGACT AATACACCTC TTCCCGCATC GGCTGCCTGT GAGAGGCTTT |
| 4261 | TCAGCACTGC AGGATTGCTT TTCAGCCCCA AAAGAGCTAG GCTTGACACT AACAATTTTG |
| 4321 | AGAATCAGCT TCTACTGAAG TTAAATCTGA GGTTTTACAA CTTTGAGTAG CGTGTACTGG |
| 4381 | CATTAGATTG TCTGTCTTAT AGTTTGATAA TTAAATACAA ACAGTTCTAA AGCAGGATAA |
| 4441 | AACCTTGTAT GCATTTCATT TAATGTTTTT TGAGATTAAA AGCTTAAACA AGAATCTCTA |
| 4501 | GTTTTCTTTC TTGCTTTTAC TTTTACTTCC TTAATACTCA AGTACAATTT TAATGGAGTA |
| 4561 | CTTTTTTACT TTTACTCAAG TAAGATTCTA GCCAGATACT TTTACTTTTA ATTGAGTAAA |
| 4621 | ATTTTCCCTA AGTACTTGTA CTTTCACTTG AGTAAAATTT TTGAGTACTT TTTACACCTC |
| 4681 | TG. |

[0208] Exemplary transposon/transposase systems of the disclosure include, but are not limited to, piggyBac and piggyBac-like transposons and transposases.

[0209] PiggyBac and piggyBac-like transposases recognizes transposon-specific inverted terminal repeat sequences (ITRs) on the ends of the transposon, and moves the contents between the ITRs into TTAA or TTAT chromosomal sites. The piggyBac or piggyBac-like transposon system has no payload limit for the genes of interest that can be included between the ITRs.

[0210] In certain embodiments, and, in particular, those embodiments wherein the transposon is a piggyBac transposon, the transposase is a piggyBac, Super piggyBac (SPB) transposase. In certain embodiments, and, in particular, those embodiments wherein the transposase is a piggyBac, Super piggyBac (SPB), the sequence encoding the transposase is an mRNA sequence.

[0211] In certain embodiments of the methods of the disclosure, the transposase enzyme is a piggyBac or piggyBac-like transposase enzyme.

[0212] In certain embodiments of the methods of the disclosure, the transposase enzyme is a piggyBac or a piggyBac-like transposase enzyme. The piggyBac (PB) or piggyBac-like transposase enzyme may comprise or consist of an amino acid sequence at least 5%, 10%, 15%, 20%, 25%, 30%, 35%, 40%, 45%, 50%, 55%, 60%, 65%, 70%, 75%, 80%, 85%, 90%, 95%, 99% or any percentage in between identical to:

(SEQ ID NO: 14487)

| | |
|---|---|
| 1 | MGSSLDDEHI LSALLQSDDE LVGEDSDSEI |
| | SDHVSEDDVQ SDTEEAFIDE VHEVQPTSSG |
| 61 | SEILDEQNVI EQPGSSLASN RILTLPQRTI |
| | RGKNKHCWST SKSTRRSRVS ALNIVRSQRG |
| 121 | PTRMCRNIYD PLLCFKLFFT DEIISEIVKW |
| | TNAEISLKRR ESMTGATFRD TNEDEIYAFF |
| 181 | GILVMTAVRK DNHMSTDDLF DRSLSMVYVS |
| | VMSRDRFDFL IRCLRMDDKS IRPTLRENDV |
| 241 | FTPVRKIWDL FIHQCIQNYT PGAHLTIDEQ |
| | LLGFRGRCPF RMYIPNKPSK YGIKILMMCD |
| 301 | SGTKYMINGM PYLGRGTQTN GVPLGEYYVK |
| | ELSKPVHGSC RNITCDNWFT SIPLAKNLLQ |
| 361 | EPYKLTIVGT VRSNKREIPE VLKNSRSRPV |
| | GTSMFCFDGP LTLVSYKPKP AKMVYLLSSC |
| 421 | DEDASINEST GKPQMVMYYN QTKGGVDTLD |
| | QMCSVMTCSR KTNRWPMALL YGMINIACIN |
| 481 | SFIIYSHNVS SKGEKVQSRK KFMRNLYMSL |
| | TSSFMRKRLE APTLKRYLRD NISNILPNEV |
| 541 | PGTSDDSTEE PVMKKRTYCT YCPSKIRRKA |
| | NASCKKCKKV ICREHNIDMC QSCF. |

[0213] In certain embodiments of the methods of the disclosure, the transposase enzyme is a piggyBac or piggyBac-like transposase enzyme that comprises or consists of an amino acid sequence having an amino acid substitution at one or more of positions 30, 165, 282, or 538 of the sequence:

(SEQ ID NO: 14487)

| | |
|---|---|
| 1 | MGSSLDDEHI LSALLQSDDE LVGEDSDSEI |
| | SDHVSEDDVQ SDTEEAFIDE VHEVQPTSSG |
| 61 | SEILDEQNVI EQPGSSLASN RILTLPQRTI |
| | RGKNKHCWST SKSTRRSRVS ALNIVRSQRG |
| 121 | PTRMCRNIYD PLLCFKLFFT DEIISEIVKW |
| | TNAEISLKRR ESMTGATFRD TNEDEIYAFF |
| 181 | GILVMTAVRK DNHMSTDDLF DRSLSMVYVS |
| | VMSRDRFDFL IRCLRMDDKS IRPTLRENDV |
| 241 | FTPVRKIWDL FIHQCIQNYT PGAHLTIDEQ |
| | LLGFRGRCPF RMYIPNKPSK YGIKILMMCD |
| 301 | SGTKYMINGM PYLGRGTQTN GVPLGEYYVK |
| | ELSKPVHGSC RNITCDNWFT SIPLAKNLLQ |
| 361 | EPYKLTIVGT VRSNKREIPE VLKNSRSRPV |
| | GTSMFCFDGP LTLVSYKPKP AKMVYLLSSC |
| 421 | DEDASINEST GKPQMVMYYN QTKGGVDTLD |
| | QMCSVMTCSR KTNRWPMALL YGMINIACIN |
| 481 | SFIIYSHNVS SKGEKVQSRK KFMRNLYMSL |
| | TSSFMRKRLE APTLKRYLRD NISNILPNEV |
| 541 | PGTSDDSTEE PVMKKRTYCT YCPSKIRRKA |
| | NASCKKCKKV ICREHNIDMC QSCF. |

[0214] In certain embodiments, the transposase enzyme is a piggyBac or piggyBac-like transposase enzyme that comprises or consists of an amino acid sequence having an amino acid substitution at two or more of positions 30, 165, 282, or 538 of the sequence of SEQ ID NO: 14487. In certain embodiments, the transposase enzyme is a piggyBac or piggyBac-like transposase enzyme that comprises or consists of an amino acid sequence having an amino acid substitution at three or more of positions 30, 165, 282, or 538 of the sequence of SEQ ID NO: 14487. In certain embodiments, the transposase enzyme is a piggyBac or piggyBac-like transposase enzyme that comprises or consists of an amino acid sequence having an amino acid substitution at each of the following positions 30, 165, 282, and 538 of the sequence of SEQ ID NO: 14487. In certain embodiments, the amino acid substitution at position 30 of the sequence of SEQ ID NO: 14487 is a substitution of a valine (V) for an isoleucine (I). In certain embodiments, the amino acid substitution at position 165 of the sequence of SEQ ID NO: 14487 is a substitution of a serine (S) for a glycine (G). In certain embodiments, the amino acid substitution at position 282 of the sequence of SEQ ID NO: 14487 is a substitution of a valine (V) for a methionine (M). In certain embodiments, the amino acid substitution at position 538 of the sequence of SEQ ID NO: 14487 is a substitution of a lysine (K) for an asparagine (N).

[0215] In certain embodiments of the methods of the disclosure, the transposase enzyme is a Super piggyBac (SPB) or piggyBac-like transposase enzyme. In certain embodiments, the Super piggyBac (SPB) or piggyBac-like transposase enzyme of the disclosure may comprise or consist of the amino acid sequence of the sequence of SEQ ID NO: 14487 wherein the amino acid substitution at position 30 is a substitution of a valine (V) for an isoleucine (I), the amino acid substitution at position 165 is a substitution of a serine (S) for a glycine (G), the amino acid substitution at position 282 is a substitution of a valine (V) for a methionine (M), and the amino acid substitution at position 538 is a substitution of a lysine (K) for an asparagine (N). In certain embodiments, the Super piggyBac (SPB) or piggyBac-like transposase enzyme may comprise or consist of an amino acid sequence at least 5%, 10%, 15%, 20%, 25%, 30%, 35%, 40%, 45%, 50%, 55%, 60%, 65%, 70%, 75%, 80%, 85%, 90%, 95%, 99% or any percentage in between identical to:

(SEQ ID NO: 14484)

| | |
|---|---|
| 1 | MGSSLDDEHI LSALLQSDDE LVGEDSDSEV |
| | SDHVSEDDVQ SDTEEAFIDE VHEVQPTSSG |
| 61 | SEILDEQNVI EQPGSSLASN RILTLPQRTI |
| | RGKNKHCWST SKSTRRSRVS ALNIVRSQRG |
| 121 | PTRMCRNIYD PLLCFKLFFT DEIISEIVKW |
| | TNAEISLKRR ESMTSATFRD TNEDEIYAFF |
| 181 | GILVMTAVRK DNHMSTDDLF DRSLSMVYVS |
| | VMSRDRFDFL IRCLRMDDKS IRPTLRENDV |
| 241 | FTPVRKIWDL FIHQCIQNYT PGAHLTIDEQ |
| | LLGFRGRCPF RVYIPNKPSK YGIKILMMCD |
| 301 | SGTKYMINGM PYLGRGTQTN GVPLGEYYVK |
| | ELSKPVHGSC RNITCDNWFT SIPLAKNLLQ |
| 361 | EPYKLTIVGT VRSNKREIPE VLKNSRSRPV |
| | GTSMFCFDGP LTLVSYKPKP AKMVYLLSSC |
| 421 | DEDASINEST GKPQMVMYYN QTKGGVDTLD |
| | QMCSVMTCSR KTNRWPMALL YGMINIACIN |
| 481 | SFIIYSHNVS SKGEKVQSRK KFMRNLYMSL |
| | TSSFMRKRLE APTLKRYLRD NISNILPKEV |
| 541 | PGTSDDSTEE PVMKKRTYCT YCPSKIRRKA |
| | NASCKKCKKV ICREHNIDMC QSCF. |

[0216] In certain embodiments of the methods of the disclosure, including those embodiments wherein the transposase comprises the above-described mutations at positions 30, 165, 282 and/or 538, the piggyBac, Super piggyBac or piggyBac-like transposase enzyme may further comprise an amino acid substitution at one or more of positions 3, 46, 82, 103, 119, 125, 177, 180, 185, 187, 200, 207, 209, 226, 235, 240, 241, 243, 258, 296, 298, 311, 315, 319, 327, 328, 340, 421, 436, 456, 470, 486, 503, 552, 570 and 591 of the sequence of SEQ ID NO: 14487 or SEQ ID NO: 14484. In certain embodiments, including those embodiments wherein the transposase comprises the above-described mutations at positions 30, 165, 282 and/or 538, the piggyBac, Super piggyBac or piggyBac-like transposase enzyme may further comprise an amino acid substitution at one or more of positions 46, 119, 125, 177, 180, 185, 187, 200, 207, 209, 226, 235, 240, 241, 243, 296, 298, 311, 315, 319, 327, 328, 340, 421, 436, 456, 470, 485, 503, 552 and 570. In certain embodiments, the amino acid substitution at position 3 of SEQ ID NO: 14487 or SEQ ID NO: 14484 is a substitution of an asparagine (N) for a serine (S). In certain embodiments, the amino acid substitution at position 46 of SEQ ID NO: 14487 or SEQ ID NO: 14484 is a substitution of a serine (S) for an alanine (A). In certain embodiments, the amino acid substitution at position 46 of SEQ ID NO: 14487 or SEQ ID NO: 14484 is a substitution of a threonine (T) for an alanine (A). In certain embodiments, the amino acid substitution at position 82 of SEQ ID NO: 14487 or SEQ ID NO: 14484 is a substitution of a tryptophan (W) for an isoleucine (I). In certain embodiments, the amino acid substitution at position 103 of SEQ ID NO: 14487 or SEQ ID NO: 14484 is a substitution of a proline (P) for a serine (S). In certain embodiments, the amino acid substitution at position 119 of SEQ ID NO: 14487 or SEQ ID NO: 14484 is a substitution of a proline (P) for an arginine (R). In certain embodiments, the amino acid substitution at position 125 of SEQ ID NO: 14487 or SEQ ID NO: 14484 is a substitution of an alanine (A) a cysteine (C). In certain embodiments, the amino acid substitution at position 125 of SEQ ID NO: 14487 or SEQ ID NO: 14484 is a substitution of a leucine (L) for a cysteine (C). In certain embodiments, the amino acid substitution at position 177 of SEQ ID NO: 14487 or SEQ ID NO: 14484 is a substitution of a lysine (K) for a tyrosine (Y). In certain embodiments, the amino acid substitution at position 177 of SEQ ID NO: 14487 or SEQ ID NO: 14484 is a substitution of a histidine (H) for a tyrosine (Y). In certain embodiments, the amino acid substitution at position 180 of SEQ ID NO: 14487 or SEQ ID NO: 14484 is a substitution of a leucine (L) for a phenylalanine (F). In certain embodiments, the amino acid substitution at position 180 of SEQ ID NO: 14487 or SEQ ID NO: 14484 is a substitution of an isoleucine (I) for a phenylalanine (F). In certain embodiments, the amino acid substitution at position 180 of SEQ ID NO: 14487 or SEQ ID NO: 14484 is a substitution of a valine (V) for a phenylalanine (F). In certain embodiments, the amino acid substitution at position 185 of SEQ ID NO: 14487 or SEQ ID NO: 14484 is a substitution of a leucine (L) for a methionine (M). In certain embodiments, the amino acid substitution at position 187 of SEQ ID NO: 14487 or SEQ ID NO: 14484 is a substitution of a glycine (G) for an alanine (A). In certain embodiments, the amino acid substitution at position 200 of SEQ ID NO: 14487 or SEQ ID NO: 14484 is a substitution of a tryptophan (W) for a phenylalanine (F). In certain embodiments, the amino acid substitution at position 207 of SEQ ID NO: 14487 or SEQ ID NO: 14484 is a substitution of a proline (P) for a valine (V). In certain embodiments, the amino acid substitution at position 209 of SEQ ID NO: 14487 or SEQ ID NO: 14484 is a substitution of a phenylalanine (F) for a valine (V). In certain embodiments, the amino acid substitution at position 226 of SEQ ID NO: 14487 or SEQ ID NO: 14484 is a substitution of a phenylalanine (F) for a methionine (M). In certain embodiments, the amino acid substitution at position 235 of SEQ ID NO: 14487 or SEQ ID NO: 14484 is a substitution of an arginine (R) for a leucine (L). In certain embodiments, the amino acid substitution at position 240 of SEQ ID NO: 14487 or SEQ ID NO: 14484 is a substitution of a lysine (K) for a valine (V). In certain embodiments, the amino acid substitution at position 241 of SEQ ID NO: 14487 or SEQ ID NO: 14484 is a substitution of a leucine (L) for a phenylalanine (F). In certain embodiments, the amino acid substitution at position 243 of SEQ ID NO: 14487 or SEQ ID NO: 14484 is a substitution of a lysine (K) for a proline (P). In certain embodiments, the amino acid substitution at position 258 of SEQ ID NO: 14487 or SEQ ID NO: 14484 is a substitution of a serine (S) for an asparagine (N). In certain embodiments, the amino acid substitution at position 296 of SEQ ID NO: 14487 or SEQ ID NO: 14484 is a substitution of a tryptophan (W) for a leucine (L). In certain embodiments, the amino acid substitution at position 296 of SEQ ID NO: 14487 or SEQ ID NO: 14484 is a substitution of a tyrosine (Y) for a leucine (L). In certain embodiments, the amino acid substitution at position 296 of SEQ ID NO: 14487 or SEQ ID NO: 14484 is a substitution of a phenylalanine (F) for a leucine (L). In certain embodiments, the amino acid substitution at position 298 of SEQ ID NO: 14487 or SEQ ID NO: 14484 is a substitution of a leucine (L) for a methionine (M). In certain embodiments, the amino acid substitution at position 298 of SEQ ID NO: 14487 or SEQ ID NO: 14484 is a substitution of an alanine (A) for a methionine (M). In certain embodiments, the amino acid substitution at position 298 of SEQ ID NO: 14487 or SEQ ID NO: 14484 is a substitution of a valine (V) for a methionine (M). In certain embodiments, the amino acid substitution at position 311 of SEQ ID NO: 14487 or SEQ ID NO: 14484 is a substitution of an isoleucine (I) for a proline (P). In certain embodiments, the amino acid substitution at position 311 of SEQ ID NO: 14487 or SEQ ID NO: 14484 is a substitution of a valine for a proline (P). In certain embodiments, the amino acid substitution at position 315 of SEQ ID NO: 14487 or SEQ ID NO: 14484 is a substitution of a lysine (K) for an arginine (R).In certain embodiments, the amino acid substitution at position 319 of SEQ ID NO: 14487 or SEQ ID NO: 14484 is a substitution of a glycine (G) for a threonine (T). In certain embodiments, the amino acid substitution at position 327 of SEQ ID NO: 14487 or SEQ ID NO: 14484 is a substitution of an arginine (R) for a tyrosine (Y). In certain embodiments, the amino acid substitution at position 328 of SEQ ID NO: 14487 or SEQ ID NO: 14484 is a substitution of a valine (V) for a tyrosine (Y). In certain embodiments, the amino acid substitution at position 340 of SEQ ID NO: 14487 or SEQ ID NO: 14484 is a substitution of a glycine (G) for a cysteine (C). In certain embodiments, the amino acid substitution at position 340 of SEQ ID NO: 14487 or SEQ ID NO: 14484 is a substitution of a leucine (L) for a cysteine (C). In certain embodiments, the amino acid substitution at position 421 of SEQ ID NO: 14487 or SEQ ID NO: 14484 is a substitution of a histidine (H) for the aspartic acid (D). In certain embodiments, the amino acid substitution at position 436 of SEQ ID NO: 14487 or SEQ ID NO: 14484 is a substitution of an isoleucine (I) for a valine (V). In certain embodiments, the amino acid substitution at position 456 of SEQ ID NO: 14487 or SEQ ID NO: 14484 is a substitution of a tyrosine (Y) for a methionine (M). In certain embodiments, the amino acid substitution at position 470 of SEQ ID NO: 14487 or SEQ ID NO: 14484 is a substitution of a phenylalanine (F) for a leucine (L). In certain embodiments, the amino acid substitution at position 485 of SEQ ID NO: 14487 or SEQ ID NO: 14484 is a substitution of a lysine (K) for a serine (S). In certain embodiments, the amino acid substitution at position 503 of SEQ ID NO: 14487 or SEQ ID NO: 14484 is a substitution of a leucine (L) for a methionine (M). In certain embodiments, the amino acid substitution at position 503 of SEQ ID NO: 14487 or SEQ ID NO: 14484 is a substitution of an isoleucine (I) for a methionine (M). In certain embodiments, the amino acid substitution at position 552 of SEQ ID NO: 14487 or SEQ ID NO: 14484 is a substitution of a lysine (K) for a valine (V). In certain embodiments, the amino acid substitution at position 570 of SEQ ID NO: 14487 or SEQ ID NO: 14484 is a substitution of a threonine (T) for an alanine (A). In certain embodiments, the amino acid substitution at position 591 of SEQ ID NO: 14487 or SEQ ID NO: 14484 is a substitution of a proline (P) for a glutamine (Q). In certain embodiments, the amino acid substitution at position 591 of SEQ ID NO: 14487 or SEQ ID NO: 14484 is a substitution of an arginine (R) for a glutamine (Q).

[0217] In certain embodiments of the methods of the disclosure, including those embodiments wherein the transposase comprises the above-described mutations at positions 30, 165, 282 and/or 538, the piggyBac or piggyBac-like transposase enzyme or may comprise or the Super piggyBac transposase enzyme may further comprise an amino acid substitution at one or more of positions 103, 194, 372, 375, 450, 509 and 570 of the sequence of SEQ ID NO: 14487 or SEQ ID NO: 14484. In certain embodiments of the methods of the disclosure, including those embodiments wherein the transposase comprises the above-described mutations at positions 30, 165, 282 and/or 538, the piggyBac or piggyBac-like transposase enzyme may comprise or the Super piggyBac transposase enzyme may further comprise an amino acid substitution at two, three, four, five, six or more of positions 103, 194, 372, 375, 450, 509 and 570 of the sequence of SEQ ID NO: 14487 or SEQ ID NO: 14484. In certain embodiments, including those embodiments wherein the transposase comprises the above-described mutations at positions 30, 165, 282 and/or 538, the piggyBac or piggyBac-like transposase enzyme may comprise or the Super piggyBac transposase enzyme may further comprise an amino acid substitution at positions 103, 194, 372, 375, 450, 509 and 570 of the sequence of SEQ ID NO: 14487 or SEQ ID NO: 14484. In certain embodiments, the amino acid substitution at position 103 of SEQ ID NO: 14487 or SEQ ID NO: 14484 is a substitution of a proline (P) for a serine (S). In certain embodiments, the amino acid substitution at position 194 of SEQ ID NO: 14487 or SEQ ID NO: 14484 is a substitution of a valine (V) for a methionine (M). In certain embodiments, the amino acid substitution at position 372 of SEQ ID NO: 14487 or SEQ ID NO: 14484 is a substitution of an alanine (A) for an arginine (R). In certain embodiments, the amino acid substitution at position 375 of SEQ ID NO: 14487 or SEQ ID NO: 14484 is a substitution of an alanine (A) for a lysine (K). In certain embodiments, the amino acid substitution at position 450 of SEQ ID NO: 14487 or SEQ ID NO: 14484 is a substitution of an asparagine (N) for an aspartic acid (D). In certain embodiments, the amino acid substitution at position 509 of SEQ ID NO: 14487 or SEQ ID NO: 14484 is a substitution of a glycine (G) for a serine (S). In certain embodiments, the amino acid substitution at position 570 of SEQ ID NO: 14487 or SEQ ID NO: 14484 is a substitution of a serine (S) for an asparagine (N). In certain embodiments, the piggyBac or piggyBac-like transposase enzyme may comprise a substitution of a valine (V) for a methionine (M) at position 194 of SEQ ID NO: 14487. In certain embodiments, including those embodiments wherein the piggyBac or piggyBac-like transposase enzyme may comprise a substitution of a valine (V) for a methionine (M) at position 194 of SEQ ID NO: 14487, the piggyBac or piggyBac-like transposase enzyme may further comprise an amino acid substitution at positions 372, 375 and 450 of the sequence of SEQ ID NO: 14487 or SEQ ID NO: 14484. In certain embodiments, the piggyBac or piggyBac-like transposase enzyme may comprise a substitution of a valine (V) for a methionine (M) at position 194 of SEQ ID NO: 14487, a substitution of an alanine (A) for an arginine (R) at position 372 of SEQ ID NO: 14487, and a substitution of an alanine (A) for a lysine (K) at position 375 of SEQ ID NO: 14487. In certain embodiments, the piggyBac or piggyBac-like transposase enzyme may comprise a substitution of a valine (V) for a methionine (M) at position 194 of SEQ ID NO: 14487, a substitution of an alanine (A) for an arginine (R) at position 372 of SEQ ID NO: 14487, a substitution of an alanine (A) for a lysine (K) at position 375 of SEQ ID NO: 14487 and a substitution of an asparagine (N) for an aspartic acid (D) at position 450 of SEQ ID NO: 14487.

[0218] In certain embodiments, the piggyBac or piggyBac-like transposase enzyme is isolated or derived from an insect. In certain embodiments, the insect is Trichoplusia ni (GenBank Accession No. AAA87375; SEQ ID NO: 16796), Argyrogramma agnata (GenBank Accession No. GU477713; SEQ ID NO: 14534, SEQ ID NO: 16797), Anopheles gambiae (GenBank Accession No. XP_312615 (SEQ ID NO: 16798); GenBank Accession No. XP_320414 (SEQ ID NO: 16799); GenBank Accession No. XP_310729 (SEQ ID NO: 16800)), Aphis gossypii (GenBank Accession No. GU329918; SEQ ID NO: 16801, SEQ ID NO: 16802), Acyrthosiphon pisum (GenBank Accession No. XP_001948139; SEQ ID NO: 16803), Agrotis ipsilon (GenBank Accession No. GU477714; SEQ ID NO: 14537, SEQ ID NO: 16804), Bombyx mori (GenBank Accession No. BAD11135; SEQ ID NO: 14505), Chilo suppressalis (GenBank Accession No. JX294476; SEQ ID NO: 16805, SEQ ID NO: 16806), Drosophila melanogaster (GenBank Accession No. AAL39784; SEQ ID NO: 16807), Helicoverpa armigera (GenBank Accession No. ABS18391; SEQ ID NO: 14525), Heliothis virescens (GenBank Accession No. ABD76335; SEQ ID NO: 16808), Macdunnoughia crassisigna (GenBank Accession No. EU287451; SEQ ID NO: 16809, SEQ ID NO: 16810), Pectinophora gossypiella (GenBank Accession No. GU270322; SEQ ID NO: 14530, SEQ ID NO: 16811), Tribolium castaneum (GenBank Accession No. XP_001814566; SEQ ID NO: 16812), Ctenoplusia agnata (also called Argyrogramma agnata), Messour bouvieri, Megachile rotundata, Bombus impatiens, Mamestra brassicae, Mayetiola destructor or Apis mellifera.

[0219] In certain embodiments, the piggyBac or piggyBac-like transposase enzyme is isolated or derived from an insect. In certain embodiments, the insect is Trichoplusia ni (AAA87375).

[0220] In certain embodiments, the piggyBac or piggyBac-like transposase enzyme is isolated or derived from an insect. In certain embodiments, the insect is Bombyx mori (BAD11135).

[0221] In certain embodiments, the piggyBac or piggyBac-like transposase enzyme is isolated or derived from a crustacean. In certain embodiments, the crustacean is Daphnia pulicaria (AAM76342, SEQ ID NO: 16813).

[0222] In certain embodiments, the piggyBac or piggyBac-like transposase enzyme is isolated or derived from a vertebrate. In certain embodiments, the vertebrate is Xenopus tropicalis (GenBank Accession No. BAF82026; SEQ ID NO: 14518), Homo sapiens (GenBank Accession No. NP_689808; SEQ ID NO: 16814), Mus musculus (GenBank Accession No. NP_741958; SEQ ID NO: 16815), Macaca fascicularis (GenBank Accession No. AB179012; SEQ ID NO: 16816, SEQ ID NO: 16817), Rattus norvegicus (GenBank Accession No. XP_220453; SEQ ID NO: 16818) or Myotis lucifugus.

[0223] In certain embodiments, the piggyBac or piggyBac-like transposase enzyme is isolated or derived from a urochordate. In certain embodiments, the urochordate is Ciona intestinalis (GenBank Accession No. XP_002123602; SEQ ID NO: 16819).

[0224] In certain embodiments, the piggyBac or piggyBac-like transposase inserts a transposon at the sequence 5′-TTAT-3′ within a chromosomal site (a TTAT target sequence).

[0225] In certain embodiments, the piggyBac or piggyBac-like transposase inserts a transposon at the sequence 5′-TTAA-3′ within a chromosomal site (a TTAA target sequence).

[0226] In certain embodiments, the target sequence of the piggyBac or piggyBac-like transposon comprises or consists of 5′-CTAA-3′, 5′-TTAG-3′, 5′-ATAA-3′, 5′-TCAA-3′, 5′AGTT-3′, 5′-ATTA-3′, 5′-GTTA-3′, 5′-TTGA-3′, 5′-TTTA-3′, 5′-TTAC-3′, 5′-ACTA-3′, 5′-AGGG-3′, 5′-CTAG-3′, 5′-TGAA-3′, 5′-AGGT-3′, 5′-ATCA-3′, 5′-CTCC-3′, 5′-TAAA-3′, 5′-TCTC-3′, 5′TGAA-3′, 5′-AAAT-3′, 5′-AATC-3′, 5′-ACAA-3′, 5′-ACAT-3′, 5′-ACTC-3′, 5′-AGTG-3′, 5′-ATAG-3′, 5′-CAAA-3′, 5′-CACA-3′, 5′-CATA-3′, 5′-CCAG-3′, 5′-CCCA-3′, 5′-CGTA-3′, 5′-GTCC-3′, 5′-TAAG-3′, 5′-TCTA-3′, 5′-TGAG-3′, 5′-TGTT-3′, 5′-TTCA-3′5′-TTCT-3′ and 5′-TTTT-3′.

[0227] In certain embodiments of the methods of the disclosure, the transposase enzyme is a piggyBac or piggyBac-like transposase enzyme. In certain embodiments, the piggyBac or piggyBac-like transposase enzyme is isolated or derived from Bombyx mori. The piggyBac or piggyBac-like transposase enzyme may comprise or consist of an amino acid sequence at least 5%, 10%, 15%, 20%, 25%, 30%, 35%, 40%, 45%, 50%, 55%, 60%, 65%, 70%, 75%, 80%, 85%, 90%, 95%, 99% or any percentage in between identical to:

(SEQ ID NO: 14504)

| | |
|---|---|
| 1 | MDIERQEERI RAMLEEELSD YSDESSSEDE |
| | TDHCSEHEVN YDTEEERIDS VDVPSNSRQE |
| 61 | EANAIIANES DSDPDDDLPL SLVRQRASAS |
| | RQVSGPFYTS KDGTKWYKNC QRPNVRLRSE |
| 121 | NIVTEQAQVK NIARDASTEY ECWNIFVTSD |
| | MLQEILTHTN SSIRHRQTKT AAENSSAETS |
| 181 | FYMQETTLCE LKALIALLYL AGLIKSNRQS |
| | LKDLWRTDGT GVDIFRTTMS LQRFQFLQNN |
| 241 | IRFDDKSTRD ERKQTDNMAA FRSIFDQFVQ |
| | CCQNAYSPSE FLTIDEMLLS FRGRCLFRVY |
| 301 | IPNKPAKYGI KILALVDAKN FDVVNLEVYA |
| | GKQPSGPYAV SNRPFEVVER LIQPVARSHR |
| 361 | NVTFDNWFTG YELMLHLLNE YRLTSVGTVR |
| | KNKRQIPESF IRTDRQPNSS VFGFQKDITL |
| 421 | VSYAPKKNKV VVVMSTMHHD NSIDESTGEK |
| | QKPEMITFYN STKAGVDVVD ELSANYNVSR |
| 481 | NSKRWPMTLF YGVLNMAAIN ACIIYRANKN |
| | VTIKRTEFIR SLGLSMIYEH LHSRNKKKNI |
| 541 | PTYLRQRIEK QLGEPSPRHV NVPGRYVRCQ |
| | DCPYKKDRKT KHSCNACAKP ICMEHAKFLC |
| 601 | ENCAELDSSL. |

[0228] The piggyBac (PB) or piggyBac-like transposase enzyme may comprise or consist of an amino acid sequence at least 5%, 10%, 15%, 20%, 25%, 30%, 35%, 40%, 45%, 50%, 55%, 60%, 65%, 70%, 75%, 80%, 85%, 90%, 95%, 99% or any percentage in between identical to:

(SEQ ID NO: 14505)

| | |
|---|---|
| 1 | MDIERQEERI RAMLEEELSD YSDESSSEDE |
| | TDHCSEHEVN YDTEEERIDS VDVPSNSRQE |
| 61 | EANAIIANES DSDPDDDLPL SLVRQRASAS |
| | RQVSGPFYTS KDGTKWYKNC QRPNVRLRSE |
| 121 | NIVTEQAQVK NIARDASTEY ECWNIFVTSD |
| | MLQEILTHTN SSIRHRQTKT AAENSSAETS |
| 181 | FYMQETTLCE LKALIALLYL AGLIKSNRQS |
| | LKDLWRTDGT GVDIFRTTMS LQRFQFLQNN |
| 241 | IRFDDKSTRD ERKQTDNMAA FRSIFDQFVQ |
| | CCQNAYSPSE FLTIDEMLLS FRGRCLFRVY |
| 301 | IPNKPAKYGI KILALVDAKN FYVVNLEVYA |
| | GKQPSGPYAV SNRPFEVVER LIQPVARSHR |
| 361 | NVTFDNWFTG YELMLHLLNE YRLTSVGTVR |
| | KNKRQIPESF IRTDRQPNSS VFGFQKDITL |
| 421 | VSYAPKKNKV VVVMSTMHHD NSIDESTGEK |
| | QKPEMITFYN STKAGVDVVD ELCANYNVSR |
| 481 | NSKRWPMTLF YGVLNMAAIN ACIIYRTNKN |
| | VTIKRTEFIR SLGLSMIYEH LHSRNKKKNI |
| 541 | PTYLRQRIEK QLGEPSPRHV NVPGRYVRCQ |
| | DCPYKKDRKT KRSCNACAKP ICMEHAKFLC |
| 601 | ENCAELDSSL. |

[0229] In certain embodiments, the piggyBac or piggyBac-like transposase is fused to a nuclear localization signal. In certain embodiments, the amino acid sequence of the piggyBac or piggyBac-like transposase fused to a nuclear localization signal is encoded by a polynucleotide sequence comprising:

(SEQ ID NO: 14629)

| | |
|---|---|
| 1 | atggcaccca aaaagaaacg taaagtgatg |
| | gacattgaaa gacaggaaga aagaatcagg |
| 61 | gcgatgctcg aagaagaact gagcgactac |
| | tccgacgaat cgtcatcaga ggatgaaacc |
| 121 | gaccactgta gcgagcatga ggttaactac |
| | gacaccgagg aggagagaat cgactctgtg |
| 181 | gatgtgccct ccaactcacg ccaagaagag |
| | gccaatgcaa ttatcgcaaa cgaatcggac |
| 241 | agcgatccag acgatgatct gccactgtcc |
| | ctcgtgcgcc agcgggccag cgcttcgaga |
| 301 | caagtgtcag gtccattcta cacttcgaag |
| | gacggcacta agtggtacaa gaattgccag |
| 361 | cgacctaacg tcagactccg ctccgagaat |
| | atcgtgaccg aacaggctca ggtcaagaat |
| 421 | atcgcccgcg acgcctcgac tgagtacgag |
| | tgttggaata tcttcgtgac ttcggacatg |
| 481 | ctgcaagaaa ttctgacgca caccaacagc |
| | tcgattaggc atcgccagac caagactgca |
| 541 | gcggagaact catcggccga aacctccttc |
| | tatatgcaag agactactct gtgcgaactg |
| 601 | aaggcgctga ttgcactgct gtacttggcc |
| | ggcctcatca aatcaaatag gcagagcctc |
| 661 | aaagatctct ggagaacgga tggaactgga |
| | gtggatatct ttcggacgac tatgagcttg |
| 721 | cagcggttcc agtttctgca aaacaatatc |
| | agattcgacg acaagtccac ccgggacgaa |
| 781 | aggaaacaga ctgacaacat ggctgcgttc |
| | cggtcaatat tcgatcagtt tgtgcagtgc |
| 841 | tgccaaaacg cttatagccc atcggaattc |
| | ctgaccatcg acgaaatgct tctctccttc |
| 901 | cgggggcgct gcctgttccg agtgtacatc |
| | ccgaacaagc cggctaaata cggaatcaaa |
| 961 | atcctggccc tggtggacgc caagaatttc |
| | tacgtcgtga atctcgaagt gtacgcagga |
| 1021 | aagcaaccgt cgggaccgta cgctgtttcg |
| | aaccgcccgt ttgaagtcgt cgagcggctt |
| 1081 | attcagccgg tggccagatc ccaccgcaat |
| | gttaccttcg acaattggtt caccggctac |
| 1141 | gagctgatgc ttcaccttct gaacgagtac |
| | cggctcacta gcgtggggac tgtcaggaag |
| 1201 | aacaagcggc agatcccaga atccttcatc |
| | cgcaccgacc gccagcctaa ctcgtccgtg |
| 1261 | ttcggatttc aaaaggatat cacgcttgtc |
| | tcgtacgccc ccaagaaaaa caaggtcgtg |
| 1321 | gtcgtgatga gcaccatgca tcacgacaac |
| | agcatcgacg agtcaaccgg agaaaagcaa |
| 1381 | aagcccgaga tgatcacctt ctacaattca |
| | actaaggccg gcgtcgacgt cgtggatgaa |
| 1441 | ctgtgcgcga actataacgt gtcccggaac |
| | tctaagcggt ggcctatgac tctcttctac |
| 1501 | ggagtgctga atatggccgc aatcaacgcg |
| | tgcatcatct accgcaccaa caagaacgtg |
| 1561 | accatcaagc gcaccgagtt catcagatcg |
| | ctgggtttga gcatgatcta cgagcacctc |
| 1621 | cattcacgga acaagaagaa gaatatccct |
| | acttacctga ggcagcgtat cgagaagcag |
| 1681 | ttgggagaac caagcccgcg ccacgtgaac |
| | gtgccggggc gctacgtgcg gtgccaagat |
| 1741 | tgcccgtaca aaaaggaccg caaaaccaaa |
| | agatcgtgta acgcgtgcgc caaacctatc |
| 1801 | tgcatggagc atgccaaatt tctgtgtgaa |
| | aattgtgctg aactcgattc ctccctg. |

[0230] In certain embodiments, the piggyBac or piggyBac-like transposase is hyperactive. A hyperactive piggyBac or piggyBac-like transposase is a transposase that is more active than the naturally occurring variant from which it is derived. In certain embodiments, the hyperactive piggyBac or piggyBac-like transposase enzyme is isolated or derived from Bombyx mori. In certain embodiments, the piggyBac or piggyBac-like transposase is a hyperactive variant of SEQ ID NO: 14505. In certain embodiments, the hyperactive piggyBac or piggyBac-like transposase comprises a sequence that is at least 90% identical to:

```
(SEQ ID NO: 14576)
    1 MDIERQEERI RAMLEEELSD YSDESSSEDE
        TDHCSEHEVN YDTEEERIDS VDVPSNSRQE
  61 EANAIIANES DSDPDDDLPL SLVRQRASAS
        RQMSGPHYTS KDGTKWYKNC QRPNVRLRSE
121 NIVTEQAQVK NIARDASTEY ECWNIFVTSD
        MLQEILTHTN SSIRWRQTKT AAENSSASTS
181 FYMQETTLCE LKALIGLLYI AGLIKSNRQS
        LKDLWRTDGT GVDIFRTTMS LQRFQFLQNN
241 IRFDDKSTRD ERKQTDNMAA FRSIFDQFVQ
        SCQNAYSPSE FLTIDEMLLS FRGRCLFRVY
301 IPNKPAKYGI KILALVDAKN FYVKNLEVYA
        GKQPSGPYAV SNRPFEVVER LIQPVARSHR
361 NVTFDNWFTG YELMLHLLNE YRLTSVGTVR
        KNKRQIPESF IRTDRQPNSS VFGFQKDITL
421 VSYAPKKNKV VVVMSTMHHD NSIDESTGEK
        QKPEMITFYN STKAGVDVVD ELCANYNVSR
481 NSKRWPMTLF YGVLNMAAIN ACIIYRTNKN
        VTIKRTEFIR SLGLSMIYEH LHSRNKKKNI
541 PTYLRQRIEK QLGEPSPRHV NVPGRYVRCQ
        DCPYKKDRKT KRSCNACAKP ICMEHAKFLC
601 ENCAELDSHL.
```

[0231] In certain embodiments, the hyperactive piggyBac or piggyBac-like transposase comprises SEQ ID NO: 14576. In certain embodiments, the hyperactive piggyBac or piggyBac-like transposase comprises a sequence of:

```
(SEQ ID NO: 14630)
    1 MDIERQEERI RAMLEEELSD YSDESSSEDE
        TDHCSEHEVN YDTEEERIDS VDVPSNSRQE
  61 EANAIIANES DSDPDDDLPL SLVRQRASAS
        RQVSGPFYTS KDGTKWYKNC QRPNVRLRSE
121 NIVTEQAQVK NIARDASTEY ECWNIFVTSD
        MLQEILTHTN SSIRWRQTKT AAENSSAETS
181 FYMQETTLCE LKALIGLLYI AGLIKSNRQS
        LKDLWRTDGT GVDIFRTTMS LQRFQFLLNN
241 IRFDDKSTRD ERKQTDNMAA FRSIFDQFVQ
        SCQNAYSPSE FLTIDEMLLS FRGRCLFRVY
301 IPNKPAKYGI KILALVDAKN FYVHNLEVYA
        GKQPSGPYAV SNRPFEVVER LIQPVARSHR
361 NVTFDNWFTG YEVMLHLLNE YRLTSVGTVR
        KNKRQIPESF IRTDRQPNSS VFGFQKDITL
421 VSYAPKKNKV VVVMSTMHHD NSIDESTGEK
        QKPEMITFYN STKAGVDVVD ELCANYNVSR
481 NSKRWPMTLF YGVLNMAAIN ACIIYRTNKN
        VTIKRTEFIR SLGLSMIYEH LHSRNKKKNI
541 PTYLRQRIEK QLGEPSPRHV NVPGRYVRCQ
        DCPYKKDRKT KRSCNACAKP ICMEHAKFLC
601 ENCAHLDS.
```

[0232] In certain embodiments, the hyperactive piggyBac or piggyBac-like transposase comprises a sequence of:

```
(SEQ ID NO: 14631)
    1 MDIERQEERI RAMLEEELSD YSDESSSEDE
        TDHCSEHEVN YDTEEERIDS VDVPSNSRQE
  61 EANAIIANES DSDPDDDLPL SLVRQRASAS
        RQVSGPFYTS KDGTKWYKNC QRPNVRLRSE
121 NIVTEQAQVK NIARDASTEY ECWNIFVTSD
        MLQEILTHTN SSIRWRQTKT AAENSSASTS
181 FYMQETTLCE LKALIGLLYI AGLIKSNRQS
        LKDLWRTDGT GVDIFRTTMS LQRFQFLLNN
241 IRFDDKSTRD ERKQTDNMAA FRSIFDQFVQ
        SCQNAYSPSE FLTIDEMLLS FRGRCLFRVY
301 IPNKPAKYGI KILALVDAKN FYVKNLEVYA
        GKQPSGPYAV SNRPFEVVER LIQPVARSHR
361 NVTFDNWFTG YELMLHLLNE YRLTSVGTVR
        KNKRQIPESF IRTDRQPNSS VFGFQKDITL
421 VSYAPKKNKV VVVMSTMHHD NSIDESTGEK
        QKPEMITFYN STKAGVDVVD ELCANYNVSR
481 NSKRWPMTLF YGVLNMAAIN ACIIYRTNKN
        VTIKRTEFIR SLGLSMIYEH LHSRNKKKNI
541 PTYLRQRIAM QLGEPSPRHV NVPGRYVRCQ
        DCPYKKDRKT KRSCNACAKP ICMEHAKFLC
601 ENCAELDSSL.
```

[0233] In certain embodiments, the hyperactive piggyBac or piggyBac-like transposase comprises a sequence of:

```
(SEQ ID NO: 14632)
    1 MDIERQEERI RAMLEEELSD YSDESSSEDE
        TDHCSEHEVN YDTEEERIDS VDVPSNSRQE
  61 EANAIIANES DSDPDDDLPL SLVRQRASAS
        RQVSGPFYTS KDGTKWYKNC QRPNVRLRSE
121 NIVTEQAQVK NIARDASTEY ECWNIFVTSD
        MLQEILTHTN SSIRWRQTKT AAENSSAETS
181 FYMQETTLCE LKALIGLLYI AGLIKSNRQS
        LKDLWRTDGT GVDIFRTTMS LQRFQFLLNN
241 IRFDDKSTRD ERKQTDNMAA FRSIFDQFVQ
        SCQNAYSPSE FLTIDEMLLS FRGRCLFRVY
301 IPNKPAKYGI KILALVDAKN FYVKNLEVYA
        GKQPSGPYAV SNRPFEVVER LIQPVARSHR
361 NVTFDNWFTG YELMLHLLNE YRLTSVGTVR
        KNKTQIPENF IRTDRQPNSS VFGFQKDITL
421 VSYAPKKNKV VVVMSTMHHD NSIDESTGEK
        QKPEMITFYN STKAGVDVVD ELQANYNVSR
481 NSKRWPMTLF YGVLNMAAIN ACIIYRTNKN
        VTIKRTEFIR SLGLSMIYEH LHSRNKKKNI
541 PTYLRQRIEK QLGEPSPRHV NVPGRYVRCQ
        DCPYKKDRKT KRSCNACAKP ICMEHAKFLC
601 ENCAELDSSL.
```

[0234] In certain embodiments, the hyperactive piggyBac or piggyBac-like transposase comprises a sequence of:

```
(SEQ ID NO: 14633)
    1 MDIERQEERI RAMLEEELSD YSDESSSEDE
        TDHCSEHEVN YDTEEERIDS VDVPSNSRQE
  61 EANAIIANES DSDPDDDLPL SLVRQRASAS
        RQVSGPFYTS KDGTKWYKNC QRPNVRLRSE
121 NIVTEQAQVK NIARDASTEY ECWNIFVTSD
        MLQEILTHTN SSIRWRQTKT AAENSSAETS
181 FYMQETTLCE LKALIGLLYI AGLIKSNRQS
        LKDLWRTDGT GVDIFRTTMS LQRFQFLQNN
241 IRFDDKSTRD ERKQTDNMAA FRSIFDQFVQ
        SCQNAYSPSE FLTIDEMLLS FRGRCLFRVY
301 IPNKPAKYGI KILALVDAKN FYVKNLEVYA
        GKQPSGPYAV SNRPFEVVER LIQPVARSHR
361 NVTFDNWFTG YELMLHLLNE YRLTSVGTVR
        KNKRQIPESF IRTDRQPNSS VFGFQKDITL
421 VSYAPKKNKV VVVMSTMHHD NSIDESTGEK
        QKPEMITFYN STKAGVDVVD ELCANYNVSR
481 NSKRWPMTLF YGVLNMAAIN ACIIYRTNKN
        VTIKRTEFIR SLGLSMIYEH LHSRNKKKNI
541 PTYLRQRIEK QLGEPSPRHV NVPGRYVRCQ
        DCPYKKDRKT KRSCNACAKP ICMEHAKFLC
601 ENCAELDSSL.
```

[0235] In certain embodiments, the hyperactive piggyBac or piggyBac-like transposase comprises a sequence of:

```
(SEQ ID NO: 14634)
    1 MDIERQEERI RAMLEEELSD YSDESSSEDE
        TDHCSEHEVN YDTEEERIDS VDVPSNSRQE
  61 EANAIIANES DSDPDDDLPL SLVRQRASAS
        RQVSGPFYTS KDGTKWYKNC QRPNVRLRSE
121 NIVTEQAQVK NIARDASTEY ECWNIFVTSD
        MLQEILTHTN SSIRHRQTKT AAENSSAETS
181 FYMQETTLCE LKALIALLYL AGLIKSNRQS
        LKDLWRTDGT GVDIFRTTMS LQRFQFLQNN
241 IRFDDKSTRD ERKQTDNMAA FRSIFDQFVQ
        CCQNAYSPSE FLTIDEMLLS FRGRCLFRVY
301 IPNKPAKYGI KILALVDAKN DYVVNLEVYA
        GKQPSGPYAV SNRPFEVVER LIQPVARSHR
361 NVTFDNWFTG YELMLHLLNE YRLTSVGTVR
        KNKRQIPESF IRTDRQPNSS VFGFQKDITL
421 VSYAPKKNKV VVVMSTMHHD NSIDESTGEK
        QKPEMITFYN STKAGVDVVD ELCANYNVSR
481 NSKRWPMTLF YGVLNMAAIN ACIIYRTNKN
        VTIKRTEFIR SLGLSMIYEH LHSRNKKKNI
541 PTYLRQRIEK QLGEPSSRHV NVKGRYVRCQ
        DCPYKKDRKT KRSCNACAKP ICMEHAKFLC
601 ENCAELDSSL.
```

[0236] In certain embodiments, the hyperactive piggyBac or piggyBac-like transposase is more active than the transposase of SEQ ID NO: 14505. In certain embodiments, the hyperactive piggyBac or piggyBac-like transposase is at least 90%, at least 95%, at least 96%, at least 97%, at least 98%, or at least 99% or any percentage in between identical to SEQ ID NO: 14505.

[0237] In certain embodiments, the hyperactive piggyBac or piggyBac-like transposase comprises an amino acid substitution at a position selected from 92, 93, 96, 97, 165, 178, 189, 196, 200, 201, 211, 215, 235, 238, 246, 253, 258, 261, 263, 271, 303, 321, 324, 330, 373, 389, 399, 402, 403, 404, 448, 473, 484, 507, 5 23, 527, 528, 543, 549, 550, 557, 6 01, 605, 607, 609, 610 or a combination thereof (relative to SEQ ID NO: 14505). In certain embodiments, the hyperactive piggyBac or piggyBac-like transposase comprises an amino acid substitution of Q92A, V93L, V93M, P96G, F97H, F97C, H165E, H165W, E178S, E178H, C189P, A196G, L200I, A201Q, L211A, W215Y, G219S, Q235Y, Q235G, Q238L, K246I, K253V, M258V, F261L, S263K, C271S, N303R, F321W, F321D, V324K, V324H, A330V, L373C, L373V, V389L, S399N, R402K, T403L, D404Q, D404S, D404M, N441R, G448W, E449A, V469T, C473Q, R484K T507C, G523A, I527M, Y528K Y543I, E549A, K550M, P557S, E601V, E605H, E605W, D607H, S609H, L610I or any combination thereof. In certain embodiments, the hyperactive piggyBac or piggyBac-like transposase comprises an amino acid substitution of Q92A, V93L, V93M, P96G, F97H, F97C, H165E, H165W, E178S, E178H, C189P, A196G, L200I, A201Q, L211A, W215Y, G219S, Q235Y, Q235G, Q238L, K246I, K253V, M258V, F261L, S263K, C271S, N303R, F321W, F321D, V324K, V324H, A330V, L373C, L373V, V389L, S399N, R402K, T403L, D404Q, D404S, D404M, N441R, G448W, E449A, V469T, C473Q, R484K T507C, G523A, I527M, Y528K Y543I, E549A, K550M, P557S, E601V, E605H, E605W, D607H, S609H and L610I.

[0238] In certain embodiments, the hyperactive piggyBac or piggyBac-like transposase comprises one or more substitutions of an amino acid that is not wild type, wherein the one or more substitutions a for wild type amino acid comprises a substitution of E4X, A12X, M13X, L14X, E15X, D20X, E24X, S25X, S26X, S27X, D32X, H33X, E36X, E44X, E45X, E46X, I48X, D49X, R58X, A62X, N63X, A64X, I65X, I66X, N68X, E69X, D71X, S72X, D76X, P79X, R84X, Q85X, A87X, S88X, Q92X, V93X, S94X, G95X, P96X, F97X, Y98X, T99X, I145X, S149X, D150X, L152X, E154X, T157X, N160X, S161X, S162X, H165X, R166X, T168X, K169X, T170X, A171X, E173X, S175X, S176X, E178X, T179X, M183X, Q184X, T186X, T187X, L188X, C189X, L194X, I195X, A196X, L198X, L200X, A201X, L203X, I204X, K205X, A206X, N207X, Q209X, S210X, L211X, K212X, D213X, L214X, W215X, R216X, T217X, G219X, V222X, D223X, I224X, T227X, M229X, Q235X, L237X, Q238X, N239X, N240X, P302X, N303X, P305X, A306X, K307X, Y308X, 1310X, K311X, I312X, L313X, A314X, L315X, V316X,D317X, A318X, K319X, N320X, F321X, Y322X, V323X, V324X, L326X, E327X, V328X, A330X, Q333X, P334X, S335X, G336X, P337X, A339X, V340X, S341X, N342X, R343X, P344X, F345X, E346X, V347X, E349X, I352X, Q353X, V355X, A356X, R357X, N361X, D365X, W367X, T369X, G370X, L373X, M374X, L375X, H376X, N379X, E380X, R382X, V386X, V389X, N392X, R394X, Q395X, S399X, F400X, I401X, R402XT403X, D404X, R405X, Q406X, P407X, N408X, S409X, S410X, V411X, F412X, F414X, Q415X, I418X, T419X, L420X, N428XV432X, M434X, D440X, N441X, S442X, I443X, D444X, E445X, G448X, E449X, Q451X, K452X, M455X, I456X, T457X, F458X, S461X, A464X, V466X, Q468X, V469X, E471X, L472X, C473X, A474X, K483X, W485X, T488X, L489X, Y491X, G492X, V493X, M496X, I499X, C502X, I503X, T507X, K509X, N510X, V511X, T512X, I513X, R515X, E517X, S521X, G523X, L524X, S525X, I527X, Y528X, E529X, H532X, S533X, N535X, K536X, K537X, N539X, I540X, T542X, Y543X, Q546X, E549X, K550X, Q551X, G553X, E554X, P555X, S556X, P557X, R558X, H559X, V560X, N561X, V562X, P563X, G564X, R565X, Y566X, V567X, Q570X, D571X, P573X, Y574X, K576X, K581X, S583X, A586X, A588X, E594X, F598X, L599X, E601X, N602X, C603X, A604X, E605X, L606X, D607X, S608X, S609X or L610X (relative to SEQ ID NO: 14505). A list of hyperactive amino acid substitutions can be found in U.S. Pat. No. 10,041,077, the contents of which are incorporated herein by reference in their entirety.

[0239] In certain embodiments, the piggyBac or piggyBac-like transposase is integration deficient. In certain embodiments, an integration deficient piggyBac or piggyBac-like transposase is a transposase that can excise its corresponding transposon, but that integrates the excised transposon at a lower frequency than a corresponding wild type transposase. In certain embodiments, the piggyBac or piggyBac-like transposase is an integration deficient variant of SEQ ID NO: 14505.

[0240] In certain embodiments, the excision competent, integration deficient piggyBac or piggyBac-like transposase comprises one or more substitutions of an amino acid that is not wild type, wherein the one or more substitutions a for wild type amino acid comprises a substitution of R9X, A12X, M13X, D20X, Y21K, D23X, E24X, S25X, S26X, S27X, E28X, E30X, D32X, H33X, E36X, H37X, A39X, Y41X, D42X, T43X, E44X, E45X, E46X, R47X, D49X, S50X, S55X, A62X, N63X, A64X, I66X, A67X, N68X, E69X, D70X, D71X, S72X, D73X, P74X, D75X, D76X, D77X,I78X, S81X,V83X, R84X, Q85X, A87X, S88X, A89X,S90X,R91X, Q92X, V93X, S94X, G95X, P96X, F97X, Y98X, T99X, W012X, G103X, Y107X, K108X, L117X, I122X, Q128X, I312X, D135X, S137X, E139X, Y140X, I145X, S149X, D150X, Q153X, E154X, T157X, S161X, S162X, R164X, H165X, R166X, Q167X, T168X, K169X, T170X, A171X, A172X, E173X, R174X, S175X, S176X, A177X, E178X, T179X, S180X,Y182X, Q184X, E185X, T187X, L188X, C189X, L194X, I195X, A196X, L198X, L200X, A201X, L203X, I204X, K205X, N207X, Q209X, L211X, D213X, L214X, W215X, R216X, T217X, G219X, T220X, V222X, D223X, I224X, T227X, T228X, F234X, Q235X, L237X, Q238X, N239X, N240X, N303X, K304X, I310X, I312X, L313X, A314X, L315X, V316X,D317X, A318X, K319X, N320X, F321X, Y322X, V323X, V324X, N325X, L326X, E327X, V328X, A330X, G331X, K332X, Q333X, S335X, P337X, P344X, F345X, E349X, H359X, N361X, V362X, D365X, F368X, Y371X, E372X, L373X, H376X, E380X, R382X, R382X, V386X, G387X, T388X, V389X, K391X, N392X, R394X, Q395X, E398X, S399X, F400X, I401X, R402XT403X, D404X, R405X, Q406X, P407X, N408X, S409X, S410X, Q415X,K416X, A424X, K426X, N428X, V430X, V432X, V433X, M434X, D436X, D440X, N441X, S442X, I443X, D444X, E445X, S446X, T447X, G448X, E449X, K450X, Q451X, E454X, M455X, I456X, T457X, F458X, S461X, A464X, V466X, Q468X, V469X, C473X, A474X, N475X, N477X, K483X, R484X, P486X, T488X, L489X, G492X, V493X, M496X, I499X, I503X, Y505X, T507X, N510X, V511X, T512X, I513X, K514X, T516X, E517X, S521X, G523X, L524X, S525X, I527X, Y528X, L531X, H532X, S533X, N535X, I540X, T542X, Y543X, R545X, Q546X, E549X, L552X, G553X, E554X, P555X, S556X, P557X, R558X, H559X, V560X, N561X, V562X, P563X, G564X, V567X, Q570X, D571X, P573X, Y574X, K575X, K576X, N585X, A586X, M593X, K596X, E601X, N602X, A604X, E605X, L606X, D607X, S608X, S609X or L610X (relative to SEQ ID NO: 14505). A list of integration deficient amino acid substitutions can be found in U.S. Pat. No. 10,041,077, the contents of which are incorporated by reference in their entirety.

[0241] In certain embodiments, the integration deficient piggyBac or piggyBac-like transposase comprises a sequence of:

```
(SEQ ID NO: 14606)
    1 MDIERQEERI RAMLEEELSD YSDESSSEDE
        TDHCSEHEVN YDTEEERIDS VDVPSNSRQE
  61 EANAIIANES DSDPDDDLPL SLVRQRASAS
        RQVSGPFYTS KDGTKWYKNC QRPNVRLRSE
121 NIVTEQAQVK NIARDASTEY ECWNIFVTSD
        MLQEILTHTN SSIRHRQTKT AAENSSAETS
181 FYMQETTLCE LKALIALLYL AGLIKSNRQS
        LKDLWRKDGT GVDIFRTTMS LQRFQFLLNN
241 IRFDDISTRD ERKQTDNMAA FRSIFDQFVQ
        CCQNAYSPSE FLTIDEMLLS FRGRCLFRVY
301 IPNKPAKYGI KILALVDAKN FYVVNLEVYA
        GKQPSGPYAV SNRPFEVVER LIQPVARSHR
361 NVTFDNWFTG YELMLHLLNE YRLTSVGTVR
        KNKRQIPESF IRTDRQPNSS VFGFQKDITL
421 VSYAPKKNKV VVVMSTMHHD NSIDESTGEK
        QKPEMITFYN STKAGVDVVD ELCANYNVSR
481 NSKKWPMTLF YGVLNMAAIN ACIIYRTNKN
        VTIKRTEFIR SLGLSMMYEH LHSRNKKKNI
541 PTYLRQRIEK QLGEPVPRHV NVPGRYVRCQ
        DCPYKKDRKT KRSCNACAKP ICMEHAKFLC
601 ENCAELDSSL.
```

In certain embodiments, the integration deficient piggyBac or piggyBac-like transposase comprises a sequence of:

```
(SEQ ID NO: 14607)
    1 MDIERQEERI RAMLEEELSD YSDESSSEDE
        TDHCSEHEVN YDTEEERIDS VDVPSNSRQE
  61 EANAIIANES DSDPDDDLPL SLVRQRASAS
        RQVSGPFYTS KDGTKWYKNC QRPNVRLRSE
121 NIVTEQAQVK NIARDASTEY ECWNIFVTSD
        MLQEILTHTN SSIRHRQTKT AAENSSAETS
181 FYMQETTLCE LKALIGLLYL AGLIKSNRQS
        LKDLWRTDGT GVDIFRTTMS LQRFYFLQNN
241 IRFDDKSTLD ERKQTDNMAA FRSIFDQFVQ
        SCQNAYSPSE FLTIDEMLLS FRGRCLFRVY
301 IPNKPAKYGI KILALVDAKN FYVVNLEVYA
        GKQPSGPYAV SNRPFEVVER LIQPVARSHR
361 NVTFDNWFTG YELMLHLLNE YRLTSVGTVR
        KNKRQIPESF IRTDRQPNSS VFGFQKDITL
421 VSYAPKKNKV VVVMSTMHHD NSIDESTGEK
        QKPEMITFYN STKAGVDVVD ELCANYNVSR
481 NSKRWPMTLF YGVLNMAAIN ACIIYRTNKN
        VTIKRTEFIR SLGLSMIYEH LHSRNKKKNI
541 PTYLRQRIEK QLGEPSPRHV NYPGRYVRCQ
        DCPYKKDRKT KRSCNACAKP ICMEHAKFLC
601 VNCAELDSSL.
```

In certain embodiments, the piggyBac or piggyBac-like transposase that is is integration deficient comprises a sequence of:

```
(SEQ ID NO: 14608)
    1 MDIERQEERI RAMLEEELSD YSDESSSEDE
        TDHCSEHEVN YDTEEERIDS VDVPSNSRQE
  61 EANAIIANES DSDPDDDLPL SLVRQRASAS
        RQVSGPFYTS KDGTKWYKNC QRPNVRLRSE
121 NIVTEQAQVK NIARDASTEY ECWNIFVTSD
        MLQEILTHTN SSIRHRQTKT AAENSSAETS
181 FYMQETTLCE LKALIALLYL AGLIKSNRQS
        LKDLWRKDGT GVDIFRTTMS LQRFQFLLNN
241 IRFDDKSTRD ERKQTDNMAA FRSIFDQFVQ
        CCQNAYSPSE FLTIDEMLLS FRGRCLFRVY
301 IPNKPAKYGI KILALVDAKN DYVVNLEVYA
        GKQPSGPYAV SNRPFEVVER LIQPVARSHR
361 NVTFDNWFTG YECMLHLLNE YRLTSVGTVR
        KNKRQIPESF IRTDRQPNSS VFGFQKDITL
421 VSYAPKKNKV VVVMSTMHHD NSIDESTGEK
        QKPEMITFYN STKAGVDVVD ELCANYNVSR
481 NSKKWPMTLF YGVLNMAAIN ACIIYRTNKN
        VTIKRTEFIR SLGLSMIKEH LHSRNKKKNI
541 PTYLRQRIEK QLGEPSPRHV NVPGRYVRCQ
        DCPYKKDRKT KRSCNACAKP ICMEHAKFLC
601 ENCAELDSSL.
```

In certain embodiments, the integration deficient transposase comprises a sequence that is at least 90% identical to SEQ ID NO: 14608.

[0242] In certain embodiments, the piggyBac or piggyBac-like transposon is isolated or derived from Bombyx mori. In certain embodiments, the piggyBac or piggyBac-like transposon comprises a sequence of:

```
(SEQ ID NO: 14506)
    1 ttatcccggc gagcatgagg cagggtatct
        cataccctgg taaaatttta aagttgtgta
  61 ttttataaaa ttttcgtctg acaacactag
        cgcgctcagt agctggaggc aggagcgtgc
121 gggaggggat agtggcgtga tcgcagtgtg
        gcacgggaca ccggcgagat attcgtgtgc
181 aaacctgttt cgggtatgtt ataccctgcc
        tcattgttga cgtatttttt ttatgtaatt
241 tttccgatta ttaatttcaa ctgttttatt
        ggtattttta tgttatccat tgttcttttt
301 ttatgattta ctgtatcggt tgtctttcgt
        tcctttagtt gagttttttt ttattatttt
361 cagtttttga tcaaa.
```

In certain embodiments, the piggyBac or piggyBac-like transposon comprises a sequence of:

```
(SEQ ID NO: 14507)
    1 tcatattttt agtttaaaaa aataattata
        tgttttataa tgaaaagaat ctcattatct
  61 ttcagtatta ggttgattta tattccaaag
        aataatattt ttgttaaatt gttgattttt
121 gtaaacctct aaatgtttgt tgctaaaatt
        actgtgttta agaaaaagat taataaataa
181 taataatttc ataattaaaa acttctttca
        ttgaatgcca ttaaataaac cattatttta
241 caaaataaga tcaacataat tgagtaaata
        ataataagaa caatattata gtacaacaaa
301 atatgggtat gtcataccct gccacattct
        tgatgtaact ttttttcacc tcatgctcgc
361 cgggttat.
```

In certain embodiments, the piggyBac or piggyBac-like transposon comprises a sequence of:

```
(SEQ ID NO: 14508)
    1 ttatcccggc gagcatgagg cagggtatct
        cataccctgg taaaatttta aagttgtgta
  61 ttttataaaa ttttcgtctg acaacactag
        cgcgctcagt agctggaggc aggagcgtgc
121 gggaggggat agtggcgtga tcgcagtgtg
        gcacgggaca ccggcgagat attcgtgtgc
181 aaacctgttt cgggtatgtt ataccctgcc
        tcat.
```

In certain embodiments, the piggyBac (PB) or piggyBac-like transposon comprises a sequence of:

```
(SEQ ID NO: 14509)
    1 taaataataa taatttcata attaaaaact
        tctttcattg aatgccatta aataaaccat
  61 tattttacaa aataagatca acataattga
        gtaaataata ataagaacaa tattatagta
121 caacaaaata tgggtatgtc ataccctgcc
        acattcttga tgtaactttt tttcacctca
181 tgctcgccgg gttat.
```

[0243] In certain embodiments, the piggyBac or piggyBac-like transposon comprises a 5′ sequence corresponding to SEQ ID NO: 14506 and a 3′ sequence corresponding to SEQ ID NO: 14507. In certain embodiments, one piggyBac or piggyBac-like transposon end is at least 85%, at least 90%, at least 95%, at least 98%, at least 99% identical or any percentage in between identical to SEQ ID NO: 14506 and the other piggyBac or piggyBac-like transposon end is at least 85%, at least 90%, at least 95%, at least 98%, at least 99% or any percentage in between identical to SEQ ID NO: 14507. In certain embodiments, the piggyBac or piggyBac-like transposon comprises SEQ ID NO: 14506 and SEQ ID NO: 14507 or SEQ ID NO: 14509. In certain embodiments, the piggyBac or piggyBac-like transposon comprises SEQ ID NO: 14508 and SEQ ID NO: 14507 or SEQ ID NO: 14509. In certain embodiments, the 5′ and 3′ transposon ends share a 16 bp repeat sequence at their ends of CCCGGCGAGCATGAGG (SEQ ID NO: 14510) immediately adjacent to the 5′-TTAT-3 target insertion site, which is inverted in the orientation in the two ends. In certain embodiments, 5′ transposon end begins with a sequence comprising 5′-TTATCCCGGCGAGCATGAGG-3 (SEQ ID NO: 14511), and the 3′ transposon ends with a sequence comprising the reverse complement of this sequence: 5′-CCTCATGCTCGCCGGGTTAT-3′ (SEQ ID NO: 14512).

[0244] In certain embodiments, the piggyBac or piggyBac-like transposon comprises one end comprising at least 14, 16, 18, 20, 30 or 40 contiguous nucleotides of SEQ ID NO: 14506 or SEQ ID NO: 14508. In certain embodiments, the piggyBac or piggyBac-like transposon comprises one end comprising at least 14, 16, 18, 20, 30 or 40 contiguous nucleotides of SEQ ID NO: 14507 or SEQ ID NO: 14509. In certain embodiments, the piggyBac or piggyBac-like transposon comprises one end with at least 90% identity to SEQ ID NO: 14506 or SEQ ID NO: 14508. In certain embodiments, the piggyBac or piggyBac-like transposon comprises one end with at least 90% identity to SEQ ID NO: 14507 or SEQ ID NO: 14509.

[0245] In certain embodiments, the piggyBac or piggyBac-like transposon comprises a sequence of:

```
(SEQ ID NO: 14515)
    1 ttaacccggc gagcatgagg cagggtatct
        cataccctgg taaaatttta aagttgtgta
  61 ttttataaaa ttttcgtctg acaacactag
        cgcgctcagt agctggaggc aggagcgtgc
121 gggaggggat agtggcgtga tcgcagtgtg
        gcacgggaca ccggcgagat attcgtgtgc
181 aaacctgttt cgggtatgtt ataccctgcc
        tcattgttga cgtatttttt ttatgtaatt
241 tttccgatta ttaatttcaa ctgttttatt
        ggtattttta tgttatccat tgttcttttt
301 ttatgattta ctgtatcggt tgtctttcgt
        tcctttagtt gagttttttt ttattatttt
361 cagtttttga tcaaa.
```

[0246] In certain embodiments, the piggyBac or piggyBac-like transposon comprises a sequence of:

```
(SEQ ID NO: 14516)
    1 tcatattttt agtttaaaaa aataattata
        tgttttataa tgaaaagaat ctcattatct
  61 ttcagtatta ggttgattta tattccaaag
        aataatattt ttgttaaatt gttgattttt
121 gtaaacctct aaatgtttgt tgctaaaatt
        actgtgttta agaaaaagat taataaataa
181 taataatttc ataattaaaa acttctttca
        ttgaatgcca ttaaataatt cattatttta
241 caaaataaga tcaacataat tgagtaaata
        ataataagaa caatattata gtacaacaaa
301 atatgggtat gtcataccct tttttttttt
        tttttttttt ttttttcggg tagagggccg
361 aacctcctac gaggtccccg cgcaaaaggg
        gcgcgcgggg tatgtgagac tcaacgatct
421 gcatggtgtt gtgagcagac cgcgggccca
        aggattttag agcccaccca ctaaacgact
481 cctctgcact cttacacccg acgtccgatc
        ccctccgagg tcagaacccg gatgaggtag
541 gggggctacc gcggtcaaca ctacaaccag
        acggcgcggc tcaccccaag gacgcccagc
601 cgacggagcc ttcgaggcga atcgaaggct
        ctgaaacgtc ggccgtctcg gtacggcagc
661 ccgtcgggcc gcccagacgg tgccgctggt
        gtcccggaat accccgctgg accagaacca
721 gcctgccggg tcgggacgcg atacaccgtc
        gaccggtcgc tctaatcact ccacggcagc
781 gcgctagagt gctggta.
```

[0247] In certain embodiments, the piggyBac or piggyBac-like transposon comprises a sequence of CCCGGCGAGCATGAGG (SEQ ID NO: 14510). In certain embodiments, the piggyBac or piggyBac-like transposon comprises an ITR sequence of SEQ ID NO: 14510. In certain embodiments, the piggyBac or piggyBac-like transposon comprises a sequence of TTATCCCGGCGAGCATGAGG (SEQ ID NO: 14511). In certain embodiments, the piggyBac or piggyBac-like transposon comprises at least 16 contiguous nucleotides from SEQ ID NO: 14511. In certain embodiments, the piggyBac or piggyBac-like transposon comprises a sequence of CCTCATGCTCGCCGGGTTAT (SEQ ID NO: 14512). In certain embodiments, the piggyBac or piggyBac-like transposon comprises at least 16 contiguous nucleotides from SEQ ID NO: 14512. In certain embodiments, the piggyBac or piggyBac-like transposon comprises one end comprising at least 16 contiguous nucleotides from SEQ ID NO: 14511 and one end comprising at least 16 contiguous nucleotides from SEQ ID NO: 14512. In certain embodiments, the piggyBac or piggyBac-like transposon comprises SEQ ID NO: 14511 and SEQ ID NO: 14512. In certain embodiments, the piggyBac or piggyBac-like transposon comprises a sequence of TTAACCCGGCGAGCATGAGG (SEQ ID NO: 14513). In certain embodiments, the piggyBac or piggyBac-like transposon comprises a sequence of

(SEQ ID NO: 14514)
CCTCATGCTCGCCGGGTTAA.

[0248] In certain embodiments, the piggyBac or piggyBac-like transposon may have ends comprising SEQ ID NO: 14506 and SEQ ID NO: 14507, or a variant of either or both of these having at least 90% sequence identity to SEQ ID NO: 14506 or SEQ ID NO: 14507, and the piggyBac or piggyBac-like transposase has the sequence of SEQ ID NO: 14504 or SEQ ID NO: 14505, or a sequence at least 5%, 10%, 15%, 20%, 25%, 30%, 35%, 40%, 45%, 50%, 55%, 60%, 65%, 70%, 75%, 80%, 85%, 90%, 95%, 99% or any percentage in between identity to SEQ ID NO: 14504 or SEQ ID NO: 14505. In certain embodiments, the piggyBac or piggyBac-like transposon comprises a heterologous polynucleotide inserted between a pair of inverted repeats, where the transposon is capable of transposition by a piggyBac or piggyBac-like transposase having at least 5%, 10%, 15%, 20%, 25%, 30%, 35%, 40%, 45%, 50%, 55%, 60%, 65%, 70%, 75%, 80%, 85%, 90%, 95%, 99% or any percentage in between identity to SEQ ID NO: 14504 or SEQ ID NO: 14505. In certain embodiments, the transposon comprises two transposon ends, each of which comprises SEQ ID NO: 14510 in inverted orientations in the two transposon ends. In certain embodiments, each inverted terminal repeat (ITR) is at least 90% identical to SEQ ID NO: 14510.

[0249] In certain embodiments, the piggyBac or piggyBac-like transposon is capable of insertion by a piggyBac or piggyBac-like transposase at the sequence 5′-TTAT-3 within a target nucleic acid. In certain embodiments, one end of the piggyBac or piggyBac-like transposon comprises at least 16 contiguous nucleotides from SEQ ID NO: 14506 and the other transposon end comprises at least 16 contiguous nucleotides from SEQ ID NO: 14507. In certain embodiments, one end of the piggyBac or piggyBac-like transposon comprises at least 17, at least 18, at least 19, at least 20, at least 22, at least 25, at least 30 contiguous nucleotides from SEQ ID NO: 14506 and the other transposon end comprises at least 17, at least 18, at least 19, at least 20, at least 22, at least 25, at least 30 contiguous nucleotides from SEQ ID NO: 14507.

[0250] In certain embodiments, the piggyBac or piggyBac-like transposon comprises transposon ends (each end comprising an ITR) corresponding to SEQ ID NO: 14506 and SEQ ID NO: 14507, and has a target sequence corresponding to 5′-TTAT3′. In certain embodiments, the piggyBac or piggyBac-like transposon also comprises a sequence encoding a transposase (e.g. SEQ ID NO: 14505). In certain embodiments, the piggyBac or piggyBac-like transposon comprises one transposon end corresponding to SEQ ID NO: 14506 and a second transposon end corresponding to SEQ ID NO: 14516. SEQ ID NO: 14516 is very similar to SEQ ID NO: 14507, but has a large insertion shortly before the ITR. Although the ITR sequences for the two transposon ends are identical (they are both identical to SEQ ID NO: 14510), they have different target sequences: the second transposon has a target sequence corresponding to 5′-TTAA-3′, providing evidence that no change in ITR sequence is necessary to modify the target sequence specificity. The piggyBac or piggyBac-like transposase (SEQ ID NO: 14504), which is associated with the 5′-TTAA-3′ target site differs from the 5′-TTAT-3′-associated transposase (SEQ ID NO: 14505) by only 4 amino acid changes (D322Y, S473C, A507T, H582R). In certain embodiments, the piggyBac or piggyBac-like transposase (SEQ ID NO: 14504), which is associated with the 5′-TTAA-3′ target site is less active than the 5′-TTAT-3′-associated piggyBac or piggyBac-like transposase (SEQ ID NO: 14505) on the transposon with 5′-TTAT-3′ ends. In certain embodiments, piggyBac or piggyBac-like transposons with 5′-TTAA-3′ target sites can be converted to piggyBac or piggyBac-like transposases with 5′-TTAT-3 target sites by replacing 5′-TTAA-3′ target sites with 5′-TTAT-3′. Such transposons can be used either with a piggyBac or piggyBac-like transposase such as SEQ ID NO: 14504 which recognizes the 5′-TTAT-3′ target sequence, or with a variant of a transposase originally associated with the 5′-TTAA-3′ transposon. In certain embodiments, the high similarity between the 5′-TTAA-3′ and 5′-TTAT-3′ piggyBac or piggyBac-like transposases demonstrates that very few changes to the amino acid sequence of a piggyBac or piggyBac-like transposase alter target sequence specificity. In certain embodiments, modification of any piggyBac or piggyBac-like transposon-transposase gene transfer system, in which 5′-TTAA-3′ target sequences are replaced with 5′-TTAT-3′-target sequences, the ITRs remain the same, and the transposase is the original piggyBac or piggyBac-like transposase or a variant thereof resulting from using a low-level mutagenesis to introduce mutations into the transposase. In certain embodiments, piggyBac or piggyBac-like transposon transposase transfer systems can be formed by the modification of a 5′-TTAT-3′-active piggyBac or piggyBac-like transposon-transposase gene transfer systems in which 5′-TTAT-3′ target sequences are replaced with 5′-TTAA-3′-target sequences, the ITRs remain the same, and the piggyBac or piggyBac-like transposase is the original transposase or a variant thereof.

[0251] In certain embodiments, the piggyBac or piggyBac-like transposon is isolated or derived from Bombyx mori. In certain embodiments, the piggyBac or piggyBac-like transposon comprises a sequence of:

| (SEQ ID NO: 14577) | |
|---|---|
| 1 | cccggcgagc atgaggcagg gtatctcata ccctggtaaa attttaaagt tgtgtatttt |
| 61 | ataaaatttt cgtctgacaa cactagcgcg ctcagtagct ggaggcagga gcgtgcggga |
| 121 | ggggatagtg gcgtgatcgc agtgtggcac gggacaccgg cgagatattc gtgtgcaaac |
| 181 | ctgtttcggg tatgttatac cctgcctcat tgttgacgta t. |

In certain embodiments, the piggyBac or piggyBac-like transposon comprises a sequence of:

| (SEQ ID NO: 14578) | |
|---|---|
| 1 | tttaagaaaa agattaataa ataataataa tttcataatt aaaaacttct ttcattgaat |
| 61 | gccattaaat aaaccattat tttacaaaat aagatcaaca taattgagta aataataata |
| 121 | agaacaatat tatagtacaa caaaatatgg gtatgtcata ccctgccaca ttcttgatgt |
| 181 | aacttttttt cacctcatgc tcgccggg. |

In certain embodiments, the transposon comprises at least 16 contiguous bases from SEQ ID NO: 14577 and at least 16 contiguous bases from SEQ ID NO: 14578, and inverted terminal repeats that are at least 87% identical to CCCGGCGAGCATGAGG (SEQ ID NO: 14510).
In certain embodiments, the piggyBac or piggyBac-like transposon comprises a sequence of:

| (SEQ ID NO: 14595) | |
|---|---|
| 1 | cccggcgagc atgaggcagg gtatctcata ccctggtaaa attttaaagt tgtgtatttt |
| 61 | ataaaatttt cgtctgacaa cactagcgcg ctcagtagct ggaggcagga gcgtgcggga |
| 121 | ggggatagtg gcgtgatcgc agtgtggcac gggacaccgg cgagatattc gtgtgcaaac |
| 181 | ctgtttcggg tatgttatac cctgcctcat tgttgacgta ttttttttat gtaatttttc |
| 241 | cgattattaa tttcaactgt tttattggta tttttatgtt atccattgtt ctttttttat |
| 301 | gatttactgt atcggttgtc tttcgttcct ttagttgagt ttttttttat tattttcagt |
| 361 | ttttgatcaa a. |

In certain embodiments, the piggyBac or piggyBac-like transposon comprises a sequence of:

| (SEQ ID NO: 14596) | |
|---|---|
| 1 | tcatattttt agtttaaaaa aataattata tgttttataa tgaaaagaat ctcattatct |
| 61 | ttcagtatta ggttgattta tattccaaag aataatattt ttgttaaatt gttgattttt |
| 121 | gtaaacctct aaatgtttgt tgctaaaatt actgtgttta agaaaaagat taataaataa |
| 181 | taataatttc ataattaaaa acttctttca ttgaatgcca ttaaataaac cattatttta |
| 241 | caaaataaga tcaacataat tgagtaaata ataataagaa caatattata gtacaacaaa |
| 301 | atatgggtat gtcataccct gccacattct tgatgtaact ttttttcacc tcatgctcgc |
| 361 | cggg. |

[0252] In certain embodiments, the piggyBac or piggyBac-like transposon comprises SEQ ID NO: 14595 and SEQ ID NO: 14596, and is transposed by the piggyBac or piggyBac-like transposase of SEQ ID NO: 14505. In certain embodiments, the ITRs of SEQ ID NO: 14595 and SEQ ID: 14596 are not flanked by a 5′-TTAA-3′ sequence. In certain embodiments, the ITRs of SEQ ID NO: 14595 and SEQ ID: 14596 are flanked by a 5′-TTAT-3′ sequence.

[0253] In certain embodiments, the piggyBac or piggyBac-like transposon comprises a sequence of:

| (SEQ ID NO: 14597) | |
|---|---|
| 1 | cccggcgagc atgaggcagg gtatctcata ccctggtaaa attttaaagt tgtgtatttt |
| 61 | ataaaatttt cgtctgacaa cactagcgcg ctcagtagct ggaggcagga gcgtgcggga |
| 121 | ggggatagtg gcgtgatcgc agtgtggcac gggacaccgg cgagatattc gtgtgcaaac |
| 181 | ctgtttcggg tatgttatac cctgcctcat tgttgacgta ttttttttat gtaatttttc |
| 241 | cgattattaa tttcaactgt tttattggta tttttatgtt atccattgtt ctttttttat |
| 301 | g. |

In certain embodiments, the piggyBac or piggyBac-like transposon comprises a sequence of:

| (SEQ ID NO: 14598) | |
|---|---|
| 1 | cagggtatct cataccctgg taaaatttta aagttgtgta ttttataaaa ttttcgtctg |
| 61 | acaacactag cgcgctcagt agctggaggc aggagcgtgc gggaggggat agtggcgtga |
| 121 | tcgcagtgtg gcacgggaca ccggcgagat attcgtgtgc aaacctgttt cgggtatgtt |
| 181 | ataccctgcc tcattgttga cgtatttttt ttatgtaatt tttccgatta ttaatttcaa |
| 241 | ctgttttatt ggtattttta tgttatccat tgttcttttt ttatg. |

In certain embodiments, the piggyBac or piggyBac-like transposon comprises a sequence of:

| (SEQ ID NO: 14599) | |
|---|---|
| 1 | cagggtatct cataccctgg taaaatttta aagttgtgta ttttataaaa ttttcgtctg |
| 61 | acaacactag cgcgctcagt agctggaggc aggagcgtgc gggaggggat agtggcgtga |
| 121 | tcgcagtgtg gcacgggaca ccggcgagat attcgtgtgc aaacctgttt cgggtatgtt |
| 181 | ataccctgcc tcattgttga cgtat. |

In certain embodiments, the 5′ end of the piggyBac or piggyBac-like transposon comprises a sequence of SEQ ID NO: 14577, SEQ ID NO: 14595, or SEQ ID NOs: 14597-14599. In certain embodiments, the 5′ end of the piggyBac or piggyBac-like transposon is preceded by a 5′ target sequence.
In certain embodiments, the piggyBac or piggyBac-like transposon comprises a sequence of:

| (SEQ ID NO: 14600) | |
|---|---|
| 1 | tcatattttt agtttaaaaa aataattata tgttttataa tgaaaagaat ctcattatct |
| 61 | ttcagtatta ggttgattta tattccaaag aataatattt ttgttaaatt gttgattttt |
| 121 | gtaaacctct aaatgtttgt tgctaaaatt actgtgttta agaaaaagat taataaataa |
| 181 | taataatttc ataattaaaa acttctttca ttgaatgcca ttaaataaac cattatttta |
| 241 | caaaataaga tcaacataat tgagtaaata ataataagaa caatattata gtacaacaaa |
| 301 | atatgggtat gtcataccct gccacattct tgatgtaact ttttttcacc tcatgctcgc |
| 361 | cggg. |

In certain embodiments, the piggyBac or piggyBac-like transposon comprises a sequence of:

| (SEQ ID NO: 14601) | |
|---|---|
| 1 | tttaagaaaa agattaataa ataataataa tttcataatt aaaaacttct ttcattgaat |
| 61 | gccattaaat aaaccattat tttacaaaat aagatcaaca taattgagta aataataata |
| 121 | agaacaatat tatagtacaa caaaatatgg gtatgtcata ccctgccaca ttcttgatgt |
| 181 | aacttttttt ca. |

[0254] In certain embodiments, the piggyBac or piggyBac-like transposon comprises a sequence of:

| (SEQ ID NO: 14602) | |
|---|---|
| 1 | cccggcgagc atgaggcagg gtatctcata ccctggtaaa attttaaagt tgtgtatttt |
| 61 | ataaaatttt cgtctgacaa cactagcgcg ctcagtagct ggaggcagga gcgtgcggga |
| 121 | ggggatagtg gcgtgatcgc agtgtggcac gggacaccgg cgagatattc gtgtgcaaac |
| 181 | ctgtttcggg tatgttatac cctgcctcat tgttgacgta ttttttttat gtaatttttc |
| 241 | cgattattaa tttcaactgt tttattggta tttttatgtt atccattgtt ctttttttat |
| 301 | gatttactgt atcggttgtc tttcgttcct ttagttgagt ttttttttat tattttcagt |
| 361 | ttttgatcaa a. |

[0255] In certain embodiments, the 3′ end of the piggyBac or piggyBac-like transposon comprises a sequence of SEQ ID NO: 14578, SEQ ID NO: 14596, or SEQ ID NOs: 14600-14601. In certain embodiments, the 3′ end of the piggyBac or piggyBac-like transposon is followed by a 3′ target sequence. In certain embodiments, the transposon is transposed by the transposase of SEQ ID NO: 14505. In certain embodiments, the 5′ and 3′ ends of the piggyBac or piggyBac-like transposon share a 16 bp repeat sequence of SEQ ID NO: 14510 in inverted orientation and immediately adjacent to the target sequence. In certain embodiments, the 5′ transposon end begins with SEQ ID NO: 14510, and the 3′ transposon end ends with the reverse complement of SEQ ID NO: 14510, 5′-CCTCATGCTCGCCGGG-3′ (SEQ ID NO: 14603). In certain embodiments, the piggyBac or piggyBac-like transposon comprises an ITR with at least 93%, at least 87%, or at least 81% or any percentage in between identity to SEQ ID NO: 14510 or SEQ ID NO: 14603. In certain embodiments, the piggyBac or piggyBac-like transposon comprises a target sequence followed by a 5′ transposon end comprising a sequence selected from SEQ ID NOs: 88, 105 or 107 and a 3′ transposon end comprising SEQ ID NO: 14578 or 106 followed by a target sequence. in certain embodiments, the piggyBac or piggyBac like transposon comprises one end that comprises a sequence that is at least 90%, at least 95% or at least 99% or any percentage in between identical to SEQ ID NO: 14577 and one end that comprises a sequence that is at least 90%, at least 95% or at least 99% or any percentage in between identical to SEQ ID NO: 14578. In certain embodiments, one transposon end comprises at least 14, at least 16, at least 18 or at least 20 contiguous bases from SEQ ID NO: 14577 and one transposon end comprises at least 14, at least 16, at least 18 or at least 20 contiguous bases from SEQ ID NO: 14578.

[0256] In certain embodiments, the piggyBac or piggyBac-like transposon comprises two transposon ends wherein each transposon ends comprises a sequence that is at least 81% identical, at least 87% identical or at least 93% identical or any percentage in between identical to SEQ ID NO: 14510 in inverted orientation in the two transposon ends. One end may further comprise at least 14, at least 16, at least 18 or at least 20 contiguous bases from SEQ ID NO: 14599, and the other end may further comprise at least 14, at least 16, at least 18 or at least 20 contiguous bases from SEQ ID NO: 14601. The piggyBac or piggyBac-like transposon may be transposed by the transposase of SEQ ID NO: 14505, and the transposase may optionally be fused to a nuclear localization signal.

[0257] In certain embodiments, the piggyBac or piggyBac-like transposon comprises SEQ ID NO: 14595 and SEQ ID NO: 14596 and the piggyBac or piggyBac-like transposase comprises SEQ ID NO: 14504 or SEQ ID NO: 14505. In certain embodiments, the piggyBac or piggyBac-like transposon comprises SEQ ID NO: 14597 and SEQ ID NO: 14596 and the piggyBac or piggyBac-like transposase comprises SEQ ID NO: 14504 or SEQ ID NO: 14505. In certain embodiments, the piggyBac or piggyBac-like transposon comprises SEQ ID NO: 14595 and SEQ ID NO: 14578 and the piggyBac or piggyBac-like transposase comprises SEQ ID NO: 14504 or SEQ ID NO: 14505. In certain embodiments, the piggyBac or piggyBac-like transposon comprises SEQ ID NO: 14602 and SEQ ID NO: 14600 and the piggyBac or piggyBac-like transposase comprises SEQ ID NO: 14504 or SEQ ID NO: 14505.

[0258] In certain embodiments, the piggyBac or piggyBac-like transposon comprises a 5′ end comprising 1, 2, 3, 4, 5, 6, or 7 sequences selected from ATGAGGCAGGGTAT (SEQ ID NO: 14614), ATACCCTGCCTCAT (SEQ ID NO: 14615), GGCAGGGTAT (SEQ ID NO: 14616), ATACCCTGCC (SEQ ID NO: 14617), TAAAATTTTA (SEQ ID NO: 14618), ATTTTATAAAAT (SEQ ID NO: 14619), TCATACCCTG (SEQ ID NO: 14620) and TAAATAATAATAA (SEQ ID NO: 14621). In certain embodiments, the piggyBac or piggyBac-like transposon comprises a 3′ end comprising 1, 2 or 3 sequences selected from SEQ ID NO: 14617, SEQ ID NO: 14620 and SEQ ID NO: 14621.

[0259] In certain embodiments of the methods of the disclosure, the transposase enzyme is a piggyBac or piggyBac-like transposase enzyme. In certain embodiments, the piggyBac or piggyBac-like transposase enzyme is isolated or derived from Xenopus tropicalis. The piggyBac or piggyBac-like transposase enzyme may comprise or consist of an amino acid sequence at least 5%, 10%, 15%, 20%, 25%, 30%, 35%, 40%, 45%, 50%, 55%, 60%, 65%, 70%, 75%, 80%, 85%, 90%, 95%, 99% or any percentage in between identical to:

| (SEQ ID NO: 14517) | |
|---|---|
| 1 | MAKRFYSAEE AAAHCMASSS EEFSGSDSEY VPPASESDSS TEESWCSSST VSALEEPMEV |
| 61 | DEDVDDLEDQ EAGDRADAAA GGEPAWGPPC NFPPEIPPFT TVPGVKVDTS NFEPINFFQL |
| 121 | FMTEAILQDM VLYTNVYAEQ YLTQNPLPRY ARAHAWHPTD IAEMKRFVGL TLAMGLIKAN |
| 181 | SLESYWDTTT VLSIPVFSAT MSRNRYQLLL RFLHFNNNAT AVPPDQPGHD RLHKLRPLID |
| 241 | SLSERFAAVY TPCQNICIDE SLLLFKGRLQ FRQYIPSKRA RYGIKFYKLC ESSSGYTSYF |
| 301 | LIYEGKDSKL DPPGCPPDLT VSGKIVWELI SPLLGQGFHL YVDNFYSSIP LFTALYCLDT |
| 361 | PACGTINRNR KGLPRALLDK KLNRGETYAL RKNELLAIKF FDKKNVFMLT SIHDESVIRE |
| 421 | QRVGRPPKNK PLCSKEYSKY MGGVDRTDQL QHYYNATRKT RAWYKKVGIY LIQMALRNSY |
| 481 | IVYKAAVPGP KLSYYKYQLQ ILPALLFGGV EEQTVPEMPP SDNVARLIGK HFIDTLPPTP |
| 541 | GKQRPQKGCK VCRKRGIRRD TRYYCPKCPR NPGLCFKPCF EIYHTQLHY. |

[0260] In some embodiments, the piggyBac or piggyBac-like transposase is a hyperactive variant of SEQ ID NO: 14517. In certain embodiments, the piggyBac or piggyBac-like transposase is an integration defective variant of SEQ ID NO: 14517. The piggyBac or piggyBac-like transposase enzyme may comprise or consist of an amino acid sequence at least 5%, 10%, 15%, 20%, 25%, 30%, 35%, 40%, 45%, 50%, 55%, 60%, 65%, 70%, 75%, 80%, 85%, 90%, 95%, 99% or any percentage in between identical to:

| (SEQ ID NO: 14518) | |
|---|---|
| 1 | MAKRFYSAEE AAAHCMAPSS EEFSGSDSEY VPPASESDSS TEESWCSSST VSALEEPMEV |
| 61 | DEDVDDLEDQ EAGDRADAAA GGEPAWGPPC NFPPEIPPFT TVPGVKVDTS NFEPINFFQL |
| 121 | FMTEAILQDM VLYTNVYAEQ YLTQNPLPRY ARAHAWHPTD IAEMKRFVGL TLAMGLIKAN |
| 181 | SLESYWNTTT VLSIPVFSAT MSRNRYQLLL RFLHFNNNAT AVPPDQPDHD RLHKLRPLID |
| 241 | SLSERFAAVY TPCQNICIDE SLLLFKGRLR FRQYIPSKRA RYGIKFYKLC ESSSGYTSYF |
| 301 | LIYEGKDSKL DPPGCPPDLT VSGKIVWELI SPLLGQGFHL YVDNFYSSIP LFTALYCLDT |
| 361 | PACGTINRTR KGLPRALLDK KLNRGETYAL RKNELLAIKF FDKKNVFMLT SIHDESVIRE |
| 421 | QRVGRPPKNK PLCSKEYSKY MGGVDRTDQL QHYYNATRKT SAWYKKVGIY LIQMALRNSY |
| 481 | IVYKAAVPGP KLSYYKYQLQ ILPALLFGGV EEQTVPEMLP SDNVARLIGK HFIDTLPPTP |
| 541 | GKQRPQKGCK VCRKRGIRRD TRYYCPKCPR NPGLCFKPCF EIYHTQLHY. |

[0261] In certain embodiments, the piggyBac or piggyBac-like transposase is isolated or derived from Xenopus tropicalis. In certain embodiments, the piggyBac or piggyBac-like transposase is a hyperactive piggyBac or piggyBac-like transposase. In certain embodiments, the hyperactive piggyBac or piggyBac-like transposase comprises a sequence at least 90% identical to:

| (SEQ ID NO: 14572) | |
|---|---|
| 1 | MAKRFYSAEE AAAHCSASSS EEFSGSDSEY VPPASESDSS TEESWCSSST VSALEEPMEV |
| 61 | DEDVDDLEDQ EAGDRADAAA GGEPAWGPPC NFPPEIPPFT TVPGVKVDTS NFEPINFFQL |
| 121 | FMTEAILQDM VLYTNVYAEQ YLTQNPLTRG ARAHAWHPTD IAEMKRFVGL TLAMGLIKAN |
| 181 | SIESYWDTTT VLSIPVFGAT MSRNRYQLLL RFLHFNNNAT AVPPDQPGHD RLHKLRPLID |
| 241 | SLSERFANVY TPCQNICIDE SLMLFKGRLQ FRQYIPSKRA RYGIKFYKLC ESSTGYTSYF |
| 301 | LIYEGKDSKL DPPGCPPDLT VSGKIVWELI SPLLGQGFHL YVDNFYSSIP LFTALYCLNT |
| 361 | PACGTINRNR KGLPRALLDK KLNRGETYAL RKNELLAIKF FDKKNVFMLT SIHDESVIRE |
| 421 | QRVGRPPKNK PLCSKEYSKY MGGVDRTDQL QHYYNATRKT RHWYKKVGIY LIQMALRNSY |
| 481 | IVYKAAVPGP KLSYYKYQLQ ILPALLFGGV EEQTVPEMPD SDNVARLIGK HFIDTLPPTP |
| 541 | GKQRPQKGCK VCRKRGIRRD TRYYCPKCPR NPGLCRKPCF EIYHTQLHY. |

[0262] In certain embodiments, piggyBac or piggyBac-like transposase is a hyperactive piggyBac or piggyBac-like transposase. A hyperactive piggyBac or piggyBac-like transposase is a transposase that is more active than the naturally occurring variant from which it is derived. In certain embodiments, a hyperactive piggyBac or piggyBac-like transposase is more active than the transposase of SEQ ID NO: 14517. In certain embodiments, the hyperactive piggyBac or piggyBac-like transposase comprises a sequence of:

| (SEQ ID NO: 14572) | |
|---|---|
| 1 | MAKRFYSAEE AAAHCSASSS EEFSGSDSEY VPPASESDSS TEESWCSSST VSALEEPMEV |
| 61 | DEDVDDLEDQ EAGDRADAAA GGEPAWGPPC NFPPEIPPFT TVPGVKVDTS NFEPINFFQL |
| 121 | FMTEAILQDM VLYTNVYAEQ YLTQNPLTRG ARAHAWHPTD IAEMKRFVGL TLAMGLIKAN |
| 181 | SIESYWDTTT VLSIPVFGAT MSRNRYQLLL RFLHFNNNAT AVPPDQPGHD RLHKLRPLID |
| 241 | SLSERFANVY TPCQNICIDE SLMLFKGRLQ FRQYIPSKRA RYGIKFYKLC ESSTGYTSYF |
| 301 | LIYEGKDSKL DPPGCPPDLT VSGKIVWELI SPLLGQGFHL YVDNFYSSIP LFTALYCLNT |
| 361 | PACGTINRNR KGLPRALLDK KLNRGETYAL RKNELLAIKF FDKKNVFMLT SIHDESVIRE |
| 421 | QRVGRPPKNK PLCSKEYSKY MGGVDRTDQL QHYYNATRKT RHWYKKVGIY LIQMALRNSY |
| 481 | IVYKAAVPGP KLSYYKYQLQ ILPALLFGGV EEQTVPEMPD SDNVARLIGK HFIDTLPPTP |
| 541 | GKQRPQKGCK VCRKRGIRRD TRYYCPKCPR NPGLCRKPCF EIYHTQLHY. |

[0263] In certain embodiments, the hyperactive piggyBac or piggyBac-like transposase comprises a sequence of:

| (SEQ ID NO: 14624) | |
|---|---|
| 1 | MAKRFYSAEE AAAHCMASSS EEFSGSDSEY VPPASESDSS TEESWCSSST VSALEEPMEV |
| 61 | DEDVDDLEDQ EAGDRADAAA GGEPAWGPPC NFPPEIPPFT TVPGVKVDTS NFEPINFFQL |
| 121 | FMTEAILQDM VLYTNVYAEQ YLTQNPLTRY ARAHAWHPTD IAEMKRFVGL TLAMGLIKAN |
| 181 | SLESYWDTTT VLSIPVFSAT MSRNRYQLLL RFLHFNNNAT AVPPDQPGHD RLHKLRPLID |
| 241 | SLSERFAAVY TPCQNICIDE SLLLFKGRLQ FRQYIPSKRA RYGIKFYKLC ESSSGYTSYF |
| 301 | LIYEGKDSKL DPPGCPPDLT VSGKIVWELI SPLLGQGFHL YVDNFYSSIP LFTALYCLNT |
| 361 | PACGTINRNR KGLPRALLDK KLNRGETYAL RKNELLAIKF FDKKNVFMLT SIHDESVIRE |
| 421 | QRVGRPPKNK PLCSKEYSKY MGGVDRTDQL QHYYNATRKT RHWYKKVGIY LIQMALRNSY |
| 481 | IVYKAAVPGP KLSYYKYQLQ ILPALLFGGV EEQTVPEMPP SDNVARLIGK HFIDTLPPTP |
| 541 | GKQRPQKGCK VCRKRGIRRD TRYYCPKCPR NPGLCRKPCF EIYHTQLHY. |

[0264] In certain embodiments, the hyperactive piggyBac or piggyBac-like transposase comprises a sequence of:

| (SEQ ID NO: 14625) | |
|---|---|
| 1 | MAKRFYSAEE AAAHCMASSS EEFSGSDSEY VPPASESDSS TEESWCSSST VSALEEPMEV |
| 61 | DEDVDDLEDQ EAGDRADAAA GGEPAWGPPC NFPPEIPPFT TVPGVKVDTS NFEPINFFQL |
| 121 | FMTEAILQDM VLYTNVYAEQ YLTQNPLPRY ARAHAWHPTD IAEMKRFVGL TLAMGLIKAN |
| 181 | SLESYWDTTT VLKIPVFSAT MSRNRYQLLL RFLHFNNNAT AVPPDQPGHD RLHKLRPLID |
| 241 | SLSERFAAVY TPCQNICIDE SLLLFKGRLQ FRQYIPSKRA RYGIKFYKLC ESSSGYTSYF |
| 301 | LIYEGKDSKL DPPGCPPDLT VSGKIVWELI SPLLGQGFHL YVDNFYSSIP LFTALYCLNT |
| 361 | PACGTINRNR KGLPRALLDK KLNRGETYAL RKNELLAIKF FDKKNVFMLT SIHDESVIRE |
| 421 | QRVGRPPKNK PLCSKEYSKY MGGVDRTDQL QHYYNATRKT RHWYKKVGIY LIQMALRNSY |
| 481 | IVYKAAVPGP KLSYYKYQLQ ILPALLFGGV EEQTVPEMPP SDNVARLIGK HFIDTLPPTP |
| 541 | GKQRPQKGCK VCRKRGIRRD TRYYCPKCPR NPGLCFKPCF EIYHTQLHY. |

[0265] In certain embodiments, the hyperactive piggyBac or piggyBac-like transposase comprises a sequence of:

| (SEQ ID NO: 14627) | |
|---|---|
| 1 | MAKRFYSAEE AAAHCMASSS EQTSGSDSEY VPPASESDSS TEESWCSSST VSALEEPMEV |
| 61 | DEDVDDLEDQ EAGDRADAAA GGEPAWGPPC NFPPEIPPFT TVPGVKVDTS NFEPINFFQL |
| 121 | FMTEAILQDM VLYTNVYAEQ YLTQNPLTRY ARAHAWHPTD IAEMKRFVGL TLAMGLIKAN |
| 181 | SIESYWDTTT VLSIPVFGAT MSRNRYQLLL RFLHFNNNAT AVPPDQPGHD RLHKLRPLID |
| 241 | SLSERFANVY TPCQNICIDE SLLLFKGRLQ FRQYIPSKRA RYGIKFYKLC ESSSGYTSYF |
| 301 | LIYEGKDSKL DPPGCPPDLT VSGKIVWELI SPLLGQGFHL YVDNFYSSIP LFTALYCLNT |
| 361 | PACGTINRNR KGLPRALLDK KLNRGETYAL RKNELLAIKF FDKKNVFMLT SIHDESVIRE |
| 421 | QRVGRKPKNK PLCSKEYSKY MGGVDRTDQL QHYYNATRKT RHWYKKVGIY LIQMALRNSY |
| 481 | IVYKAAVPGP KLSYYKYQLQ ILPALLFGGV EEQTVPEMPP SDNVARLIGK HFIDTLPPTP |
| 541 | GKQRPQKGCK VCRKRGIRRD TRYYCPKCPR NPGLCRKPCF EIYHTQLHY. |

[0266] In certain embodiments, the hyperactive piggyBac or piggyBac-like transposase comprises a sequence of:

| (SEQ ID NO: 14628) | |
|---|---|
| 1 | MAKRFYSAEE AAAHCSASSS EEFSGSDSEY VPPASESDSS TEESWCSSST VSALEEPMEV |
| 61 | DEDVDDLEDQ EAGDRADAAA GGEPAWGPPC NFPPEIPPFT TVPGVKVDTS NFEPINFFQL |
| 121 | FMTEAILQDM VLYTNVYAEQ YLTQNPLTRG ARAHAWHPTD IAEMKRFVGL TLAMGLIKAN |
| 181 | SLESYWDTTT VLSIPVFGAT MSRNRYQLLL RFLHFNNNAT AVPPDQPGHD RLHKLRPLID |
| 241 | SLSERFANVY TPCQNICIDE SLMLFKGRLQ FRQYIPSKRA RYGIKFYKLC ESSTGYTSYF |
| 301 | LIYEGKDSKL DPPGCPPDLT VSGKIVWELI SPLLGQGFHL YVDNFYSSIP LFTALYCLNT |
| 361 | PACGTINRNR KGLPRALLDK KLNRGETYAL RKNELLAIKF FDKKNVFMLT SIHDESVIRE |
| 421 | QRVGRPPKNK PLCSKEYSKY MGGVDRTDQL QHYYNATRKT RHWYKKVGIY LIQMALRNSY |
| 481 | IVYKAAVPGP KLSYYKYQLQ ILPALLFGGV EEQTVPEMPP SDNVARLIGK HFIDTLPPTP |
| 541 | GKQRPQKGCK VCRKRGIRRD TRYYCPKCPR NPGLCRKPCF EIYHTQLHY. |

[0267] In certain embodiments, the hyperactive piggyBac or piggyBac-like transposase comprises a sequence of:

| (SEQ ID NO: 16820) | |
|---|---|
| 1 | MAKRFYSAEE AAAHCMASSS EEFSGSDSEY VPPASESDSS TEESWCSSST VSALEEPMEV |
| 61 | DEDVDDLEDQ EAGDRADAAA GGEPAWGPPC NFPPEIPPFT TVPGVKVDTS NFEPINFFQL |
| 121 | FMTEAILQDM VLYTNVYAEQ YLTQNPLTRY ARAHAWHPTD IAEMKRFVGL TLAMGLIKAN |
| 181 | SLESYWDTTT VLSIPVFGAT MSRNRYQLLL RFLHFNNNAT AVPPDQPGHD RLHKLRPLID |
| 241 | SLSERFANVY TPCQNICIDE SLLLFKGRLQ FRQYIPSKRA RYGIKFYKLC ESSSGYTSYF |
| 301 | LIYEGKDSKL DPPGCPPDLT VSGKIVWELI SPLLGQGFHL YVDNFYSSIP LFTALYCLNT |
| 361 | PACGTINRNR KGLPRALLDK KLNRGETYAL RKNELLAIKF FDKKNVFMLT SIHDESVIRE |
| 421 | QRVGRPPKNK PLCSKEYSKY MGGVDRTDQL QHYYNATRKT RHWYKKVGIY LIQMALRNSY |
| 481 | IVYKAAVPGP KLSYYKYQLQ ILPALLFGGV EEQTVPEMPP SDNVARLIGK HFIDTLPPTP |
| 541 | GKQRPQKGCK VCRKRGIRRD TRYYCPKCPR NPGLCRKPCF EIYHTQLHY. |

[0268] In certain embodiments, the hyperactive piggyBac or piggyBac-like transposase comprises an amino acid substitution at a position selected from amino acid 6, 7, 16, 19, 20, 21, 22, 23, 24, 26, 28, 31, 34, 67, 73, 76, 77, 88, 91, 141, 145, 146, 148, 150, 157, 162, 179, 182, 189, 192, 193, 196, 198, 200, 210, 212, 218, 248, 263, 270, 294, 297, 308, 310, 333, 336, 354, 357, 358, 359, 377, 423, 426, 428, 438, 447, 450, 462, 469, 472, 498, 502, 517, 520, 523, 533, 534, 576, 577, 582, 583 or 587 (relative to SEQ ID NO: 14517). In certain embodiments, the hyperactive piggyBac or piggyBac-like transposase comprises an amino acid substitution of Y6C, S7G, M16S, S19G, S20Q, S20G, S20D, E21D, E22Q, F23T, F23P, S24Y, S26V, S28Q, V31K, A34E, L67A, G73H, A76V, D77N, P88A, N91D, Yl41Q, Y141A, N145E, N145V, P146T, P146V, P146K, P148T, P148H, Y150G, Y150S, Y150C, H157Y, A162C, A179K, L182I, L182V, T189G, L192H, S193N, S193K, V196I, S198G, T200W, L210H, F212N, N218E, A248N, L263M, Q270L, S294T, T297M, S308R, L310R, L333M, Q336M, A354H, C357V, L358F, D359N, L377I, V 423H, P426K, K428R, S438A, T447G, T447A, L450V, A462H, A462Q, I469V, I472L, Q498M, L502V, E5171, P520D, P520G, N523S, I533E, D534A, F576R, F576E, K5771, 1582R, Y583F, L587Y or L587W, or any combination thereof including at least 1, 2, 3, 4, 5, 6, 7, 8, 9, 10 or all of these mutations (relative to SEQ ID NO: 14517).

[0269] In certain embodiments, the hyperactive piggyBac or piggyBac-like transposase comprises one or more substitutions of an amino acid that is not wild type, wherein the one or more substitutions a for wild type amino acid comprises a substitution of A2X, K3X, R4X, FSX, Y6X, S7X, A11X, A13X, C15X, M16X, A17X, S18X, S19X, S20X, E21X, E22X, F23X, S24X, G25X, 26X, D27X, S28X, E29X, E42X, E43X, S44X, C46X, S47X, S48X, S49X, T50X, V51X, S52X, A53X, L54X, E55X, E56X, P57X, M58X, E59X, E62X, D63X, V64X, D65X, D66X, L67X, E68X, D69X, Q70X, E71X, A72X, G73X, D74X, R75X, A76X, D77X, A78X, A79X, A80X, G81X, G82X, E83X, P84X, A85X, W86X, G87X, P88X, P89X, C90X, N91X, F92X, P93X, E95X, I96X, P97X, P98X, F99X, T100X, T101X, P103X, G104X, V105X, K106X, V107X, D108X, T109X, N111X, P114X, I115X, N116X, F117X, F118X, Q119X, M122X, T123X, E124X, A125X, I126X, L127X, Q128X, D129X, M130X, L132X, Y133X, V126X, Y127X, A138X, E139X, Q140X, Y141X, L142X, Q144X, N145X, P146X, L147X, P148X, Y150X, A151X, A155X, H157X, P158X, I161X, A162X, V168X, T171X, L172X, A173X, M174X, I177X, A179X, L182X, D187X, T188X, T189X, T190X, L192X, S193X, I194X, P195X, V196X, S198X, A199X, T200X, S202X, L208X, L209X, L210X, R211X, F212X, F215X, N217X, N218X, A219X, T220X, A221X, V222X, P224X, D225X, Q226X, P227X, H229X, R231X, H233X, L235X, P237X, I239X, D240X, L242X, S243X, E244X, R244X, F246X, A247X, A248X, V249X, Y250X, T251X, P252X, C253X, Q254X, I256X, C257X, I258X, D259X, E260X, S261X, L262X, L263X, L264X, F265X, K266X, G267X, R268X, L269X, Q270X, F271X, R272X, Q273X, Y274X, I275X, P276X, S277X, K278X, R279X, A280X, R281X, Y282X, G283X, I284X, K285X, F286X, Y287X, K288X, L289X, C290X, E291X, S292X, S293XS294X, G295X, Y296X, T297X, S298X, Y299X, F300X, E304X, L310X, P313X, G314X, P316X, P317X, D318X, L319X, T320X, V321X, K324X, E328X, I330X, S331X, P332X, L333X, L334X, G335X, Q336X, F338X, L340X, D343X, N344X, F345X, Y346X, S347X, L351X, F352X, A354X, L355X, Y356X, C357X, L358X, D359X, T360X, R422X, Y423X, G424X, P426X, K428X, N429X, K430X, P431X, L432X, S434X, K435X, E436X, S438X, K439X, Y440X, G443X, R446X, T447X, L450X, Q451X, N455X, T460X, R461X, A462X, K465X, V467X, G468X, I469X, Y470X, L471X, I472X, M474X, A475X, L476X, R477X, S479X, Y480X, V482XY483X, K484X, A485X, A486X, V487X, P488X, P490X, K491X, S493X, Y494X, Y495X, K496X, Y497T, Q498X, L499X, Q500X, 1501X, L502X, P503X, A504X, L505X, L506X, F507X, G508X, G509X, V510X, E511X, E512X, Q513X, T514X, V515X, E517X, M518X, P519X, P520X, S521X, D522X, N523X, V524X, A525X, L527X, I528X, K530X, H531X, F532X, I533X, D534X, T535X, L536X, T539X, P540X,Q546X, K550X, R553X, K554X, R555X, G556X, I557X, R558X, R559X, D560X, T561X, Y564X, P566X, K567X, P569X, R570X, N571X, L574X, C575X, F576X, K577X, P578X, F580X, E581X, I582X, Y583X, T585X, Q586X, L587X, H588X or Y589X (relative to SEQ ID NO: 14517). A list of hyperactive amino acid substitutions can be found in U.S. Pat. No. 10,041,077, the contents of which are incorporated by reference in their entirety.

[0270] In certain embodiments, the piggyBac or piggyBac-like transposase is integration deficient. In certain embodiments, an integration deficient piggyBac or piggyBac-like transposase is a transposase that can excise its corresponding transposon, but that integrates the excised transposon at a lower frequency than a corresponding naturally occurring transposase. In certain embodiments, the piggyBac or piggyBac-like transposase is an integration deficient variant of SEQ ID NO: 14517. In certain embodiments, the integration deficient piggyBac or piggyBac-like transposase is deficient relative to SEQ ID NO: 14517.

[0271] In certain embodiments, the piggyBac or piggyBac-like transposase is active for excision but deficient in integration. In certain embodiments, the integration deficient piggyBac or piggyBac-like transposase comprises a sequence that is at least 90% identical to a sequence of

| (SEQ ID NO: 14605) | |
|---|---|
| 1 | MAKRFYSAEE AAAHCMASSS EEFSGSDSEY VPPASESDSS TEESWCSSST VSALEEPMEV |
| 61 | DEDVDDLEDQ EAGDRVDAAA GGEPAWGPPC NFPPEIPPFT TVPGVKVDTS NFEPINFFQL |
| 121 | FMTEAILQDM VLYTNVYAEQ YLTQNPLPRY ARAHAWHPTD IAEMKRFVGL TLAMGLIKAN |
| 181 | SLESYWDTTT VLSIPVFSAT MSRNRYQLLL KFLHFNNEAT AVPPDQPGHD RLHKLRPLID |
| 241 | SLSERFAAVY TPCQNICIDE SLLLFKGRLQ FRQYIPSKRA RYGIKFYKLC ESSSGYTSYF |
| 301 | LIYEGKDSKL DPPGCPPDLT VSGKIVWELI SPLLGQGFHL YVDNFYSSIP LFTALYCLDT |
| 361 | PACGTINRNR KGLPRALLDK KLNRGETYAL RKNELLAIKF FDKKNVFMLT SIHDESVIRE |
| 421 | QRVGRPPKNK PLCSKEYSKY MGGVDRTDQL QHYYNATRKT RAWYKKVGIY LIQMALRNSY |
| 481 | IVYKAAVPGP KLSYYKYQLQ ILPALLFGGV EEQTVPEMPP SDNVARLIGK HFIDTLPPTP |
| 541 | GKQRPQKGCK VCRKRGIRRD TRYYCPKCPR NPGLCFKPCF EIYHTQLHYG RR. |

[0272] In certain embodiments, the integration deficient piggyBac or piggyBac-like transposase comprises a sequence that is at least 90% identical to a sequence of:

| (SEQ ID NO: 14604) | |
|---|---|
| 1 | MAKRFYSAEE AAAHCMASSS EEFSGSDSEY VPPASESDSS TEESWCSSST VSALEEPMEV |
| 61 | DEDVDDLEDQ EAGDRADAAA GGEPAWGPPC NFPPEIPPFT TVPGVKVDTS NFEPINFFQL |
| 121 | FMTEAILQDM VLYTNVYAEQ YLTQVPLPRY ARAHAWHPTD IAEMKRFVGL TLAMGLIKAN |
| 181 | SLESYWDTTT VLNIPVFSAT MSRNRYQLLL RFLEFNNEAT AVPPDQPGHD RLHKLRPLID |
| 241 | SLSERFAAVY TPCQNICIDE SLLLFKGRLQ FRQYIPSKRA RYGIKFYKLC ESSSGYTSYF |
| 301 | LIYEGKDSKL DPPGCPPDLT VSGKIVWELI SPLLGQGFHL YVDNFYSSIP LFTALYCLDT |
| 361 | PACGTINRNR KGLPRALLDK KLNRGETYAL RKNELLAIKF FDKKNVFMLT SIHDESVIRE |
| 421 | QRVGRPPKNK PLCSKEYSKY MGGVDRTDQL QHYYNATRKT RAWYKKVGIY LIQMALRNSY |
| 481 | IVYKAAVPGP KLSYYKYQLQ ILPALLFGGV EEQTVPEMPP SDNVARLIGK HFIDTLPPTP |
| 541 | GKQRPQKGCK VCRKRGIRRD TRYYCPKCPR NPGLCFKPCF EIYHTQLHY. |

[0273] In certain embodiments, the integration deficient piggyBac or piggyBac-like transposase comprises a sequence that is at least 90% identical to a sequence of:

| (SEQ ID NO: 14611) | |
|---|---|
| 1 | MAKRFYSAEE AAAHCMASSS EEFSGSDSEY VPPASESDSS TEESWCSSST VSALEEPMEV |
| 61 | DEDVDDLEDQ EAGDRADAAA GGEPAWGPPC NFPPEIPPFT TVPGVKVDTS NFEPINFFQL |
| 121 | FMTEAILQDM VLYTNVYAEQ YLTQNVLPRY ARAHAWHPTD IAEMKRFVGL TLAMGLIKAN |
| 181 | SLESYWDTTT VLSIPVFSAT MSRNRYQLLL RFLHFNNDAT AVPPDQPGHD RLHKLRPLID |
| 241 | SLTERFAAVY TPCQNICIDE SLLLFKGRLQ FRQYIPSKRA RYGIKFYKLC ESSSGYTSYF |
| 301 | LIYEGKDSKL DPPGCPPDLT VSGKIVWELI SPLLGQGFHL YVDNFYSSIP LFTALYCLDT |
| 361 | PACGTINRNR KGLPRALLDK KLNRGETYAL RKNELLAIKF FDKKNVFMLT SIHDESVIRE |
| 421 | QRVGRPPKNK PLCSKEYSKY MGGVDRTDQL QHYYNATRKT RAWYKKVGIY LIQMALRNSY |
| 481 | IVYKAAVPGP KLSYYKYQLQ ILPALLFGGV EEQTVPEMPP SDNVARLIGK HFIDTLPPTP |
| 541 | GKQRPQKGCK VCRKRGIRRD TRYYCPKCPR NPGLCFKPCF EIYHTQLHYG RR. |

[0274] In certain embodiments, the integration deficient piggyBac or piggyBac-like transposase comprises SEQ ID NO: 14611. In certain embodiments, the integration deficient piggyBac or piggyBac-like transposase comprises a sequence that is at least 90% identical to a sequence of:

| (SEQ ID NO: 14612) | |
|---|---|
| 1 | MAKRFYSAEE AAAHCMASSS EEFSGSDSEY VPPASESDSS TEESWCSSST VSALEEPMEV |
| 61 | DEDVDDLEDQ EAGDRADAAP GGEPAWGPPC NFPPEIPPFT TVPGVKVDTS NFEPINFFQL |
| 121 | FMTEAILQDM VLYTNVYAEQ YLTQVPLPRY ARAHAWHPTD IAEMKRFVGL TLAMGLIKAN |
| 181 | SLESYWDTTT VLSIPVFSAT MSRNRYQLLL RFLHFNNEAT AVPPDQPGHD RLHKLRPLID |
| 241 | SLSERFAAVY TPCQNICIDE SLLLFKGRLQ FRQYIPSKRA RYGIKFYKLC ESSSGYTSYF |
| 301 | LIYEGKDSKL DPPGCPPDLT VSGKIVWELI SPLLGQGFHL YVDNFYSSIP LFTALYCLDT |
| 361 | PACGTINRNR KGLPRALLDK KLNRGETYAL RKNELLAIKF FDKKNVFMLT SIHDESVIRE |
| 421 | QRVGRPPKNK PLCSKEYSKY MGGVDRTDQL QHYYNATRKT RAWYKKVGIY LIQMALRNSY |
| 481 | IVYKAAVPGP KLSYYKYQLQ ILPALLFGGV EEQTVPEMPP SDNVARLIGK HFIDTLPPTP |
| 541 | GKQRPQKGCK VCRKRGIRRD TRYYCPKCPR NPGLCFKPCF EIYHTQLHYG RR. |

[0275] In certain embodiments, the integration deficient piggyBac or piggyBac-like transposase comprises SEQ ID NO: 14612. In certain embodiments, the integration deficient piggyBac or piggyBac-like transposase comprises a sequence that is at least 90% identical to a sequence of:

| (SEQ ID NO: 14613) | |
|---|---|
| 1 | MAKRFYSAEE AAAHCMASSS EEFSGSDSEY VPPASESDSS TEESWCSSST VSALEEPMEV |
| 61 | DEDVDDLEDQ EAGDRADAAA GGEPAWGPPC NFPPEIPPFT TVPGVKVDTS NFEPINFFQL |
| 121 | FMTEAILQDM VLYTNVYAEQ YLTQVPLPRY ARAHAWHPTD IAEMKRFVGL TLAMGLIKAN |
| 181 | SLESYWDTTT VLNIPVFSAT MSRNRYQLLL RFLEFNNNAT AVPPDQPGHD RLHKLRPLID |
| 241 | SLSERFAAVY TPCQNICIDE SLLLFKGRLQ FRQYIPSKRA RYGIKFYKLC ESSSGYTSYF |
| 301 | LIYEGKDSKL DPPGCPPDLT VSGKIVWELI SPLLGQGFHL YVDNFYSSIP LFTALYCLDT |
| 361 | PACGTINRNR KGLPRALLDK KLNRGETYAL RKNELLAIKF FDKKNVFMLT SIHDESVIRE |
| 421 | QRVGRPPKNK PLCSKEYSKY MGGVDRTDQL QHYYNATRKT RAWYKKVGIY LIQMALRNSY |
| 481 | IVYKAAVPGP KLSYYKYQLQ ILPALLFGGV EEQTVPEMPP SDNVARLIGK HFIDTLPPTP |
| 541 | GKQRPQKGCK VCRKRGIRRD TRYYCPKCPR NPGLCFKPCF EIYHTQLHYG RR. |

[0276] In certain embodiments, the integration deficient piggyBac or piggyBac-like transposase comprises SEQ ID NO: 14613. In certain embodiments, the integration deficient piggyBac or piggyBac-like transposase comprises an amino acid substitution wherein the Asn at position 218 is replaced by a Glu or an Asp (N218D or N218E) (relative to SEQ ID NO: 14517).

[0277] In certain embodiments, the excision competent, integration deficient piggyBac or piggyBac-like transposase comprises one or more substitutions of an amino acid that is not wild type, wherein the one or more substitutions a for wild type amino acid comprises a substitution of A2X, K3X, R4X, F5X, Y6X, S7X, A8X, E9X, E10X, A11X, A12X, A13X, H14X, C15X, M16X, A17X, S18X, S19X, S20X, E21X, E22X, F23X, S24X, G25X, 26X, D27X, S28X, E29X, V31X, P32X, P33X, A34X, S35X, E36X, S37X, D38X, S39X, S40X, T41X, E42X, E43X, S44X, W45X, C46X, S47X, S48X, S49X, T50X, V51X, S52X, A53X, L54X, E55X, E56X, P57X, M58X, E59X, V60X, M122X, T123X, E124X, A125X, L127X, Q128X, D129X, L132X, Y133X, V126X, Y127X, E139X, Q140X, Y141X, L142X, T143X, Q144X, N145X, P146X, L147X, P148X, R149X, Y150X, A151X, H154X, H157X, P158X, T159X, D160X, I161X, A162X, E163X, M164X, K165X, R166X, F167X, V168X, G169X, L170X, T171X, L172X, A173X, M174X, G175X, L176X, I177X, K178X, A179X, N180X, S181X, L182X, S184X, Y185X, D187X, T188X, T189X, T190X, V191X, L192X, S193X, I194X, P195X, V196X, F197X, S198X, A199X, T200X, M201X, S202X, R203X, N204X, R205X, Y206X, Q207X, L208X, L209X, L210X, R211X, F212X, L213X, H241X, F215X, N216X, N217X, N218X, A219X, T220X, A221X, V222X, P223X, P224X, D225X, Q226X, P227X, G228X, H229X, D230X, R231X, H233X, K234X, L235X, R236X, L238X, I239X, D240X, L242X, S243X, E244X, R244X, F246X, A247X, A248X, V249X, Y250X, T251X, P252X, C253X, Q254X, N255X, I256X, C257X, I258X, D259X, E260X, S261X, L262X, L263X, L264X, F265X, K266X, G267X, R268X, L269X, Q270X, F271X, R272X, Q273X, Y274X, I275X, P276X, S277X, K278X, R279X, A280X, R281X, Y282X, G283X, I284X, K285X, F286X, Y287X, K288X, L289X, C290X, E291X, S292X, S293X, S294X, G295X, Y296X, T297X, S298X, Y299X, F300X, I302X, E304X, G305X,K306X, D307X, S308X, K309X, L310X, D311X, P312X, P313X, G314X, C315X, P316X, P317X, D318X, L319X, T320X, V321X, S322X, G323X, K324X, I325X, V326X, W327X, E328X, L329X, I330X, S331X, P332X, L333X, L334X, G335X, Q336X, F338X, H339X, L340X, V342X, N344X, F345X, Y346X, S347X, S348X, I349X, L351X, T353X, A354X, Y356X, C357X, L358X, D359X, T360X, P361X, A362X, C363X, G364X, I366X, N367X, R368X, D369X, K371X, G372X, L373X, R375X, A376X, L377X, L378X, D379X, K380X, K381X, L382X, N383X, R384XG385X, T387X, Y388X, A389X, L390X, K392X, N393X, E394X, A397X, K399X, F400X, F401X, D402X, N405X, L406X, L409X, R422X, Y423X, G424X, E425X, P426X, K428X, N429X, K430X, P431X, L432X, S434X, K435X, E436X, S438X, K439X, Y440X, G442X, G443X, V444X, R446X, T447X, L450X, Q451X, H452X, N455X, T457X, R458X, T460X, R461X, A462X, Y464X, K465X, V467X, G468X, I469X, L471X, I472X, Q473X, M474X, L476X, R477X, N478X, S479X, Y480X, V482XY483X, K484X, A485X, A486X, V487X, P488X, G489X, P490X, K491X, L492X, S493X, Y494X, Y495X, K496X, Q498X, L499X, Q500X, 1501X, L502X, P503X, A504X, L505X, L506X, F507X, G508X, G509X, V510X, E511X, E512X, Q513X, T514X, V515X, E517X, M518X, P519X, P520X, S521X, D522X, N523X, V524X, A525X, L527X, 1528X, G529X, K530X, F532X, 1533X, D534X, T535X, L536X, P537X, P538X, T539X, P540X, G541X, F542X, Q543X, R544X, P545X, Q546X, K547X, G548X, C549X, K550X, V551X, C552X, R553X, K554X, R555X, G556X, 1557X, R558X, R559X, D560X, T561X, R562X, Y563X, Y564X, C565X, P566X, K567X, C568X, P569X, R570X, N571X, P572X, G573X, L574X, C575X, F576X, K577X, P578X, C579X, F580X, E581X, I582X, Y583X, H584X, T585X, Q586X, L587X, H588X or Y589X (relative to SEQ ID NO: 14517). A list of excision competent, integration deficient amino acid substitutions can be found in U.S. Pat. No. 10,041,077, the contents of which are incorporated by reference in their entirety.

[0278] In certain embodiments, the piggyBac or piggyBac-like transposase is fused to a nuclear localization signal. In certain embodiments, SEQ ID NO: 14517 or SEQ ID NO: 14518 is fused to a nuclear localization signal. In certain embodiments, the amino acid sequence of the piggyBac or piggyBac like transposase fused to a nuclear localization signal is encoded by a polynucleotide sequence comprising:

| (SEQ ID NO: 14626) | |
|---|---|
| 1 | atggcaccca aaaagaaacg taaagtgatg gccaaaagat tttacagcgc cgaagaagca |
| 61 | gcagcacatt gcatggcatc gtcatccgaa gaattctcgg ggagcgattc cgaatatgtc |
| 121 | ccaccggcct cggaaagcga ttcgagcact gaggagtcgt ggtgttcctc ctcaactgtc |
| 181 | tcggctcttg aggagccgat ggaagtggat gaggatgtgg acgacttgga ggaccaggaa |
| 241 | gccggagaca gggccgacgc tgccgcggga ggggagccgg cgtggggacc tccatgcaat |
| 301 | tttcctcccg aaatcccacc gttcactact gtgccgggag tgaaggtcga cacgtccaac |
| 361 | ttcgaaccga tcaatttctt tcaactcttc atgactgaag cgatcctgca agatatggtg |
| 421 | ctctacacta atgtgtacgc cgagcagtac ctgactcaaa acccgctgcc tcgctacgcg |
| 481 | agagcgcatg cgtggcaccc gaccgatatc gcggagatga agcggttcgt gggactgacc |
| 541 | ctcgcaatgg gcctgatcaa ggccaacagc ctcgagtcat actgggatac cacgactgtg |
| 601 | cttagcattc cggtgttctc cgctaccatg tcccgtaacc gctaccaact cctgctgcgg |
| 661 | ttcctccact tcaacaacaa tgcgaccgct gtgccacctg accagccagg acacgacaga |
| 721 | ctccacaagc tgcggccatt gatcgactcg ctgagcgagc gattcgccgc ggtgtacacc |
| 781 | ccttgccaaa acatttgcat cgacgagtcg cttctgctgt ttaaaggccg gcttcagttc |
| 841 | cgccagtaca tcccatcgaa gcgcgctcgc tatggtatca aattctacaa actctgcgag |
| 901 | tcgtccagcg gctacacgtc atacttcttg atctacgagg ggaaggactc taagctggac |
| 961 | ccaccggggt gtccaccgga tcttactgtc tccggaaaaa tcgtgtggga actcatctca |
| 1021 | cctctcctcg gacaaggctt tcatctctac gtcgacaatt tctactcatc gatccctctg |
| 1081 | ttcaccgccc tctactgcct ggatactcca gcctgtggga ccattaacag aaaccggaag |
| 1141 | ggtctgccga gagcactgct ggataagaag ttgaacaggg gagagactta cgcgctgaga |
| 1201 | aagaacgaac tcctcgccat caaattcttc gacaagaaaa atgtgtttat gctcacctcc |
| 1261 | atccacgacg aatccgtcat ccgggagcag cgcgtgggca ggccgccgaa aaacaagccg |
| 1321 | ctgtgctcta aggaatactc caagtacatg gggggtgtcg accggaccga tcagctgcag |
| 1381 | cattactaca acgccactag aaagacccgg gcctggtaca agaaagtcgg catctacctg |
| 1441 | atccaaatgg cactgaggaa ttcgtatatt gtctacaagg ctgccgttcc gggcccgaaa |
| 1501 | ctgtcatact acaagtacca gcttcaaatc ctgccggcgc tgctgttcgg tggagtggaa |
| 1561 | gaacagactg tgcccgagat gccgccatcc gacaacgtgg cccggttgat cggaaagcac |
| 1621 | ttcattgata ccctgcctcc gacgcctgga aagcagcggc cacagaaggg atgcaaagtt |
| 1681 | tgccgcaagc gcggaatacg gcgcgatacc cgctactatt gcccgaagtg cccccgcaat |
| 1741 | cccggactgt gtttcaagcc ctgttttgaa atctaccaca cccagttgca ttac. |

[0279] In certain embodiments, the piggyBac or piggyBac-like transposon is isolated or derived from Xenopus tropicalis. In certain embodiments, the piggyBac or piggyBac-like transposon comprises a sequence of:

| (SEQ ID NO: 14519) | |
|---|---|
| 1 | ttaacctttt tactgccaat gacgcatggg atacgtcgtg gcagtaaaag ggcttaaatg |
| 61 | ccaacgacgc gtcccatacg ttgttggcat tttaagtctt ctctctgcag cggcagcatg |
| 121 | tgccgccgct gcagagagtt tctagcgatg acagcccctc tgggcaacga gccggggggg |
| 181 | ctgtc. |

[0280] In certain embodiments, the piggyBac or piggyBac-like transposon comprises a sequence of:

| (SEQ ID NO: 14520) | |
|---|---|
| 1 | tttgcatttt tagacattta gaagcctata tcttgttaca gaattggaat tacacaaaaa |
| 61 | ttctaccata ttttgaaagc ttaggttgtt ctgaaaaaaa caatatattg ttttcctggg |
| 121 | taaactaaaa gtcccctcga ggaaaggccc ctaaagtgaa acagtgcaaa acgttcaaaa |
| 181 | actgtctggc aatacaagtt ccactttgac caaaacggct ggcagtaaaa gggttaa. |

[0281] In certain embodiments, the piggyBac or piggyBac-like transposon comprises SEQ ID NO: 14519 and SEQ ID NO: 14520. In certain embodiments, the piggyBac or piggyBac-like transposon comprises a sequence of:

| (SEQ ID NO: 14521) | |
|---|---|
| 1 | ttaacccttt gcctgccaat cacgcatggg atacgtcgtg gcagtaaaag ggcttaaatg |
| 61 | ccaacgacgc gtcccatacg ttgttggcat tttaagtctt ctctctgcag cggcagcatg |
| 121 | tgccgccgct gcagagagtt tctagcgatg acagcccctc tgggcaacga gccggggggg |
| 181 | ctgtc. |

[0282] In certain embodiments, the piggyBac or piggyBac-like transposon comprises a sequence of:

| (SEQ ID NO: 14522) | |
|---|---|
| 1 | tttgcatttt tagacattta gaagcctata tcttgttaca gaattggaat tacacaaaaa |
| 61 | ttctaccata ttttgaaagc ttaggttgtt ctgaaaaaaa caatatattg ttttcctggg |
| 121 | taaactaaaa gtcccctcga ggaaaggccc ctaaagtgaa acagtgcaaa acgttcaaaa |
| 181 | actgtctggc aatacaagtt ccactttggg acaaatcggc tggcagtgaa agggttaa. |

[0283] In certain embodiments, the piggyBac or piggyBac-like transposon comprises a sequence of:

```
(SEQ ID NO: 14523)
    1 ttaacctttt tactgccaat gacgcatggg
        atacgtcgtg gcagtaaaag ggcttaaatg
  61 ccaacgacgc gtcccatacg ttgttggcat
        tttaattctt ctctctgcag cggcagcatg
121 tgccgccgct gcagagagtt tctagcgatg
        acagcccctc tgggcaacga gccggggggg
181 ctgtc.
```

[0284] In certain embodiments, the piggyBac or piggyBac-like transposon comprises SEQ ID NO: 14520 and SEQ ID NO: 14519, SEQ ID NO: 14521 or SEQ ID NO: 14523. In certain embodiments, the piggyBac or piggyBac-like transposon comprises SEQ ID NO: 14522 and SEQ ID NO: 14519, SEQ ID NO: 14521 or SEQ ID NO: 14523. In certain embodiments, the piggyBac or piggyBac-like transposon comprises one end comprising at least 14, 16, 18, 20, 30 or 40 contiguous nucleotides from SEQ ID NO: 14519, SEQ ID NO: 14521 or SEQ ID NO: 14523. In certain embodiments, the piggyBac or piggyBac-like transposon comprises one end comprising at least 14, 16, 18, 20, 30 or 40 contiguous nucleotides from SEQ ID NO: 14520 or SEQ ID NO: 14522. In certain embodiments, the piggyBac or piggyBac-like transposon comprises one end with at least 90% identity to SEQ ID NO: 14519, SEQ ID NO: 14521 or SEQ ID NO: 14523. In certain embodiments, the piggyBac or piggyBac-like transposon comprises one end with at least 90% identity to SEQ ID NO: 14520 or SEQ ID NO: 14522. In one embodiment, one transposon end is at least 90% identical to SEQ ID NO: 14519 and the other transposon end is at least 90% identical to SEQ ID NO: 14520.

[0285] In certain embodiments, the piggyBac or piggyBac-like transposon comprises a sequence of TTAACCTTTTTACTGCCA (SEQ ID NO: 14524). In certain embodiments, the piggyBac or piggyBac-like transposon comprises a sequence of TTAACCCTTTGCCTGCCA (SEQ ID NO: 14526). In certain embodiments, the piggyBac or piggyBac-like transposon comprises a sequence of TTAACCYTTTTACTGCCA (SEQ ID NO: 14527). In certain embodiments, the piggyBac or piggyBac-like transposon comprises a sequence of TGGCAGTAAAAGGGTTAA (SEQ ID NO: 14529). In certain embodiments, the piggyBac or piggyBac-like transposon comprises a sequence of TGGCAGTGAAAGGGTTAA (SEQ ID NO: 14531). In certain embodiments, the piggyBac or piggyBac-like transposon comprises a sequence of TTAACCYTTTKMCTGCCA (SEQ ID NO: 14533). In certain embodiments, one end of the piggyBac or piggyBac-like transposon comprises a sequence selected from SEQ ID NO: 14524, SEQ ID NO: 14526 and SEQ ID NO: 14527. In certain embodiments, one end of the piggyBac (PB) or piggyBac-like transposon comprises a sequence selected from SEQ ID NO: 14529 and SEQ ID NO: 14531. In certain embodiments, each inverted terminal repeat of the piggyBac or piggyBac-like transposon comprises a sequence of ITR sequence of CCYTTTKMCTGCCA (SEQ ID NO: 14563). In certain embodiments, each end of the piggyBac (PB) or piggyBac-like transposon comprises SEQ ID NO: 14563 in inverted orientations. In certain embodiments, one ITR of the piggyBac or piggyBac-like transposon comprises a sequence selected from SEQ ID NO: 14524, SEQ ID NO: 14526 and SEQ ID NO: 14527. In certain embodiments, one ITR of the piggyBac or piggyBac-like transposon comprises a sequence selected from SEQ ID NO: 14529 and SEQ ID NO: 14531. In certain embodiments, the piggyBac or piggyBac like transposon comprises SEQ ID NO: 14533 in inverted orientation in the two transposon ends.

[0286] In certain embodiments, The piggyBac or piggyBac-like transposon may have ends comprising SEQ ID NO: 14519 and SEQ ID NO: 14520 or a variant of either or both of these having at least 90% sequence identity to SEQ ID NO: 14519 or SEQ ID NO: 14520, and the piggyBac or piggyBac-like transposase has the sequence of SEQ ID NO: 14517 or a variant showing at least %, 10%, 15%, 20%, 25%, 30%, 35%, 40%, 45%, 50%, 55%, 60%, 65%, 70%, 75%, 80%, 85%, 90%, 95%, 99% or any percentage in between sequence identity to SEQ ID NO: 14517 or SEQ ID NO: 14518. In certain embodiments, one piggyBac or piggyBac-like transposon end comprises at least 14 contiguous nucleotides from SEQ ID NO: 14519, SEQ ID NO: 14521 or SEQ ID NO: 14523, and the other transposon end comprises at least 14 contiguous nucleotides from SEQ ID NO: 14520 or SEQ ID NO: 14522. In certain embodiments, one transposon end comprises at least 15, at least 16, at least 17, at least 18, at least 19, at least 20, at least 22, at least 25, at least 30 contiguous nucleotides from SEQ ID NO: 14519, SEQ ID NO: 14521 or SEQ ID NO: 14523, and the other transposon end comprises at least 15, at least 16, at least 17, at least 18, at least 19, at least 20, at least 22, at least 25 or at least 30 contiguous nucleotides from SEQ ID NO: 14520 or SEQ ID NO: 14522.

[0287] In certain embodiments, the piggyBac or piggyBac-like transposase recognizes a transposon end with a 5′ sequence corresponding to SEQ ID NO: 14519, and a 3′ sequence corresponding to SEQ ID NO: 14520. It will excise the transposon from one DNA molecule by cutting the DNA at the 5′-TTAA-3′ sequence at the 5′ end of one transposon end to the 5′-TTAA-3′ at the 3′ end of the second transposon end, including any heterologous DNA that is placed between them, and insert the excised sequence into a second DNA molecule. In certain embodiments, truncated and modified versions of the 5′ and 3′ transposon ends will also function as part of a transposon that can be transposed by the piggyBac or piggyBac-like transposase. For example, the 5′ transposon end can be replaced by a sequence corresponding to SEQ ID NO: 14521 or SEQ ID NO: 14523, the 3′ transposon end can be replaced by a shorter sequence corresponding to SEQ ID NO: 14522. In certain embodiments, the 5′ and 3′ transposon ends share an 18 bp almost perfectly repeated sequence at their ends (5′-TTAACCYTTTKMCTGCCA: SEQ ID NO: 14533) that includes the 5′-TTAA-3′ insertion site, which sequence is inverted in the orientation in the two ends. That is in (SEQ ID NO: 14519) and SEQ ID NO: 14523 the 5′ transposon end begins with the sequence 5′-TTAACCTTTTTACTGCCA-3′ (SEQ ID NO: 14524), or in (SEQ ID NO: 14521) the 5′ transposon end begins with the sequence 5′-TTAACCCTTTGCCTGCCA-3′ (SEQ ID NO: 14526); the 3′ transposon ends with approximately the reverse complement of this sequence: in SEQ ID NO: 14520 it ends 5′ TGGCAGTAAAAGGGTTAA-3′ (SEQ ID NO: 14529), in (SEQ ID NO: 14522) it ends 5′-TGGCAGTGAAAGGGTTAA-3′ (SEQ ID NO: 14531.) One embodiment of the invention is a transposon that comprises a heterologous polynucleotide inserted between two transposon ends each comprising SEQ ID NO: 14533 in inverted orientations in the two transposon ends. In certain embodiments, one transposon end comprises a sequence selected from SEQ ID NOS: 14524, SEQ ID NO: 14526 and SEQ ID NO: 14527. In some embodiments, one transposon end comprises a sequence selected from SEQ ID NO: 14529 and SEQ ID NO: 14531.

[0288] In certain embodiments, the piggyBac (PB) or piggyBac-like transposon is isolated or derived from Xenopus tropicalis. In certain embodiments, the piggyBac or piggyBac-like transposon comprises at a sequence of:

```
(SEQ ID NO: 14573)
  1 ccctttgcct gccaatcacg catgggatac
      gtcgtggcag taaaagggct taaatgccaa
61 cgacgcgtcc catacgtt.
```

[0289] In certain embodiments, the piggyBac or piggyBac-like transposon comprises at a sequence of:

| (SEQ ID NO: 14574) | |
|---|---|
| 1 | cctgggtaaa ctaaaagtcc cctcgaggaa aggcccctaa agtgaaacag tgcaaaacgt |
| 61 | tcaaaaactg tctggcaata caagttccac tttgggacaa atcggctggc agtgaaaggg. |

[0290] In certain embodiments, the piggyBac or piggyBac-like transposon comprises at least 16 contiguous bases from SEQ ID NO: 14573 or SEQ ID NO: 14574, and inverted terminal repeat of CCYTTTBMCTGCCA (SEQ ID NO: 14575).

[0291] In certain embodiments, the piggyBac or piggyBac-like transposon comprises at a sequence of:

| (SEQ ID NO: 14579) | |
|---|---|
| 1 | ccctttgcct gccaatcacg catgggatac gtcgtggcag taaaagggct taaatgccaa |
| 61 | cgacgcgtcc catacgttgt tggcatttta agtcttctct ctgcagcggc agcatgtgcc |
| 121 | gccgctgcag agagtttcta gcgatgacag cccctctggg caacgagccg ggggggctgt |
| 181 | c. |

[0292] In certain embodiments, the piggyBac or piggyBac-like transposon comprises at a sequence of:

| (SEQ ID NO: 14580) | |
|---|---|
| 1 | cctttttact gccaatgacg catgggatac gtcgtggcag taaaagggct taaatgccaa |
| 61 | cgacgcgtcc catacgttgt tggcatttta attcttctct ctgcagcggc agcatgtgcc |
| 121 | gccgctgcag agagtttcta gcgatgacag cccctctggg caacgagccg ggggggctgt |
| 181 | c. |

[0293] In certain embodiments, the piggyBac or piggyBac-like transposon comprises at a sequence of:

| (SEQ ID NO: 14581) | |
|---|---|
| 1 | cctttttact gccaatgacg catgggatac gtcgtggcag taaaagggct taaatgccaa |
| 61 | cgacgcgtcc catacgttgt tggcatttta agtcttctct ctgcagcggc agcatgtgcc |
| 121 | gccgctgcag agagtttcta gcgatgacag cccctctggg caacgagccg ggggggctgt |
| 181 | c. |

[0294] In certain embodiments, the piggyBac or piggyBac-like transposon comprises at a sequence of:

| (SEQ ID NO: 14582) | |
|---|---|
| 1 | cctttttact gccaatgacg catgggatac gtcgtggcag taaaagggct taaatgccaa |
| 61 | cgacgcgtcc catacgttgt tggcatttta agtcttctct ctgcagcggc agcatgtgcc |
| 121 | gccgctgcag agag. |

[0295] In certain embodiments, the piggyBac or piggyBac-like transposon comprises at sequence of:

| (SEQ ID NO: 14583) | |
|---|---|
| 1 | cctttttact gccaatgacg catgggatac gtcgtggcag taaaagggct taaatgccaa |
| 61 | cgacgcgtcc catacgttgt tggcatttta agtctt. |

[0296] In certain embodiments, the piggyBac or piggyBac-like transposon comprises at a sequence of:

| (SEQ ID NO: 14584) | |
|---|---|
| 1 | ccctttgcct gccaatcacg catgggatac gtcgtggcag taaaagggct taaatgccaa |
| 61 | cgacgcgtcc catacgttgt tggcatttta agtctt. |

[0297] In certain embodiments, the piggyBac or piggyBac-like transposon comprises at a sequence of:

| (SEQ ID NO: 14585) | |
|---|---|
| 1 | ttatcctttt tactgccaat gacgcatggg atacgtcgtg gcagtaaaag ggcttaaatg |
| 61 | ccaacgacgc gtcccatacg ttgttggcat tttaagtctt ctctctgcag cggcagcatg |
| 121 | tgccgccgct gcagagagtt tctagcgatg acagcccctc tgggcaacga gccggggggg |
| 181 | ctgtc. |

[0298] In certain embodiments, the piggyBac or piggyBac-like transposon comprises at a sequence of:

| (SEQ ID NO: 14586) | |
|---|---|
| 1 | tttgcatttt tagacattta gaagcctata tcttgttaca gaattggaat tacacaaaaa |
| 61 | ttctaccata ttttgaaagc ttaggttgtt ctgaaaaaaa caatatattg ttttcctggg |
| 121 | taaactaaaa gtcccctcga ggaaaggccc ctaaagtgaa acagtgcaaa acgttcaaaa |
| 181 | actgtctggc aatacaagtt ccactttggg acaaatcggc tggcagtgaa aggg. |

[0299] In certain embodiments, the piggyBac or piggyBac-like transposon comprises a 5′ transposon end sequence selected from SEQ ID NO: 14573 and SEQ ID NOs: 14579-14585. In certain embodiments, the 5′ transposon end sequence is preceded by a 5′ target sequence. In certain embodiments, the piggyBac or piggyBac-like transposon comprises at a sequence of:

| (SEQ ID NO: 14587) | |
|---|---|
| 1 | tttgcatttt tagacattta gaagcctata tcttgttaca gaattggaat tacacaaaaa |
| 61 | ttctaccata ttttgaaagc ttaggttgtt ctgaaaaaaa caatatattg ttttcctggg |
| 121 | taaactaaaa gtcccctcga ggaaaggccc ctaaagtgaa acagtgcaaa acgttcaaaa |
| 181 | actgtctggc aatacaagtt ccactttgac caaaacggct ggcagtaaaa ggg. |

[0300] In certain embodiments, the piggyBac or piggyBac-like transposon comprises at a sequence of:

| (SEQ ID NO: 14588) | |
|---|---|
| 1 | ttgttctgaa aaaaacaata tattgttttc ctgggtaaac taaaagtccc ctcgaggaaa |
| 61 | ggcccctaaa gtgaaacagt gcaaaacgtt caaaaactgt ctggcaatac aagttccact |
| 121 | ttgaccaaaa cggctggcag taaaaggg. |

[0301] In certain embodiments, the piggyBac or piggyBac-like transposon comprises at a sequence of:

| (SEQ ID NO: 14589) | |
|---|---|
| 1 | tttgcatttt tagacattta gaagcctata tcttgttaca gaattggaat tacacaaaaa |
| 61 | ttctaccata ttttgaaagc ttaggttgtt ctgaaaaaaa caatatattg ttttcctggg |
| 121 | taaactaaaa gtcccctcga ggaaaggccc ctaaagtgaa acagtgcaaa acgttcaaaa |
| 181 | actgtctggc aatacaagtt ccactttgac caaaacggct ggcagtaaaa gggttat. |

[0302] In certain embodiments, the piggyBac or piggyBac-like transposon comprises at a sequence of:

| (SEQ ID NO: 14590) | |
|---|---|
| 1 | ttgttctgaa aaaaacaata tattgttttc ctgggtaaac taaaagtccc ctcgaggaaa |
| 61 | ggcccctaaa gtgaaacagt gcaaaacgtt caaaaactgt ctggcaatac aagttccact |
| 121 | ttgggacaaa tcggctggca gtgaaaggg. |

[0303] In certain embodiments, the piggyBac or piggyBac-like transposon comprises a 3′ transposon end sequence selected from SEQ ID NO: 14574 and SEQ ID NOs: 14587-14590. In certain embodiments, the 3′ transposon end sequence is followed by a 3′ target sequence. In certain embodiments, the 5′ and 3′ transposon ends share a 14 repeated sequence inverted in orientation in the two ends (SEQ ID NO: 14575) adjacent to the target sequence. In certain embodiments, the piggyBac or piggyBac-like transposon comprises a 5′ transposon end comprising a target sequence and a sequence that is selected from SEQ ID NOs: 14582-14584 and 14573, and a 3′ transposon end comprising a sequence selected from SEQ ID NOs: 14588-14590 and 14574 followed by a 3′ target sequence.

[0304] In certain embodiments, the 5′ transposon end of the piggyBac or piggyBac-like transposon comprises
[0305] 1 atcacgcatg ggatacgtcg tggcagtaaa agggcttaaa tgccaacgac gcgtcccata 61 cgtt
   (SEQ ID NO: 14591), and an ITR. In certain embodiments, the 5′ transposon end comprises
[0306] 1 atgacgcatg ggatacgtcg tggcagtaaa agggcttaaa tgccaacgac gcgtcccata 61 cgttgttggc attttaagtc tt
   (SEQ ID NO: 14592) and an ITR. In certain embodiments, the 3′ transposon end of the piggyBac or piggyBac-like transposon comprises
[0307] 1 cctgggtaaa ctaaaagtcc cctcgaggaa aggcccctaa agtgaaacag tgcaaaacgt 61 tcaaaaactg tctggcaata caagttccac tttgggacaa atcggc
   (SEQ ID NO: 14593) and an ITR. In certain embodiments, the 3′ transposon end comprises
[0308] 1 ttgttctgaa aaaaacaata tattgttttc ctgggtaaac taaaagtccc ctcgaggaaa 61 ggcccctaaa gtgaaacagt gcaaaacgtt caaaaactgt ctggcaatac aagttccact 121 ttgaccaaaa cggc

### (SEQ ID NO: 14594) and an ITR.

[0309] In certain embodiments, one transposon end comprises a sequence that is at least 90%, at least 95%, at least 99% or any percentage in between identical to SEQ ID NO: 14573 and the other transposon end comprises a sequence that is at least 90%, at least 95%, at least 99% or any percentage in between identical to SEQ ID NO: 14574. In certain embodiments, one transposon end comprises at least 14, at least 16, at least 18, at least 20 or at least 25 contiguous nucleotides from SEQ ID NO: 14573 and one transposon end comprises at least 14, at least 16, at least 18, at least 20 or at least 25 contiguous nucleotides from SEQ ID NO: 14574. In certain embodiments, one transposon end comprises at least 14, at least 16, at least 18, at least 20 from SEQ ID NO: 14591, and the other end comprises at least 14, at least 16, at least 18, at least 20 from SEQ ID NO: 14593. In certain embodiments, each transposon end comprises SEQ ID NO: 14575 in inverted orientations.

[0310] In certain embodiments, the piggyBac or piggyBac-like transposon comprises a sequence selected from of SEQ ID NO: 14573, SEQ ID NO: 14579, SEQ ID NO: 14581, SEQ ID NO: 14582, SEQ ID NO: 14583, and SEQ ID NO: 14588, and a sequence selected from SEQ ID NO: 14587, SEQ ID NO: 14588, SEQ ID NO: 14589 and SEQ ID NO: 14586 and the piggyBac or piggyBac-like transposase comprises SEQ ID NO: 14517 or SEQ ID NO: 14518.

[0311] In certain embodiments, the piggyBac or piggyBac-like transposon comprises ITRs of CCCTTTGCCTGCCA (SEQ ID NO: 14622) (5′ ITR) and TGGCAGTGAAAGGG (SEQ ID NO: 14623) (3′ ITR) adjacent to the target sequences.

[0312] In certain embodiments of the methods of the disclosure, the transposase enzyme is a piggyBac or piggyBac-like transposase enzyme. In certain embodiments, the piggyBac or piggyBac-like transposase enzyme is isolated or derived from Helicoverpa armigera. The piggyBac or piggyBac-like transposase enzyme may comprise or consist of an amino acid sequence at least 5%, 10%, 15%, 20%, 25%, 30%, 35%, 40%, 45%, 50%, 55%, 60%, 65%, 70%, 75%, 80%, 85%, 90%, 95%, 99% or any percentage in between identical to:

| (SEQ ID NO: 14525) | |
|---|---|
| 1 | MASRQRLNHD EIATILENDD DYSPLDSESE KEDCVVEDDV WSDNEDAIVD FVEDTSAQED |
| 61 | PDNNIASRES PNLEVTSLTS HRIITLPQRS IRGKNNHVWS TTKGRTTGRT SAINIIRTNR |
| 121 | GPTRMCRNIV DPLLCFQLFI TDEIIHEIVK WTNVEIIVKR QNLKDISASY RDINTMEIWA |
| 181 | LVGILTLTAV MKDNHLSTDE LFDATFSGTR YVSVMSRERF EFLIRCIRMD DKTLRPTLRS |
| 241 | DDAFLPVRKI WEIFINQCRQ NHVPGSNLTV DEQLLGFRGR CPFRMYIPNK PDKYGIKFPM |
| 301 | MCAAATKYMI DAIPYLGKST KTNGLPLGEF YVKDLTKTVH GTNRNITCDN WFTSIPLAKN |
| 361 | MLQAPYNLTI VGTIRSNKRE MPEEIKNSRS RPVGSSMFCF DGPLTLVSYK PKPSKMVFLL |
| 421 | SSCDENAVIN ESNGKPDMIL FYNQTKGGVD SFDQMCKSMS ANRKTNRWPM AVFYGMLNMA |
| 481 | FVNSYIIYCH NKINKQEKPI SRKEFMKKLS IQLTTPWMQE RLQAPTLKRT LRDNITNVLK |
| 541 | NVVPASSENI SNEPEPKKRR YCGVCSYKKR RMTKAQCCKC KKAICGEHNI DVCQDCI. |

[0313] In certain embodiments, the piggyBac or piggyBac-like transposon is isolated or derived from Helicoverpa armigera. In certain embodiments, the piggyBac or piggyBac-like transposon comprises a sequence of:
[0314] 1 ttaaccctag aagcccaatc tacgtaaatt tgacgtatac cgcggcgaaa tatctctgtc
[0315] 61 tctttcatgt ttaccgtcgg atcgccgcta acttctgaac caactcagta gccattggga
[0316] 121 cctcgcagga cacagttgcg tcatctcggt aagtgccgcc attttgttgt actctctatt
[0317] 181 acaacacacg tcacgtcacg tcgttgcacg tcattttgac gtataattgg gctttgtgta
[0318] 241 acttttgaat ttgtttcaaa ttttttatgt ttgtgattta tttgagttaa tcgtattgtt
[0319] 301 tcgttacatt tttcatataa taataatatt ttcaggttga gtacaaa (SEQ ID NO: 14570). In certain embodiments, the piggyBac or piggyBac-like transposon comprises a sequence of:

| (SEQ ID NO: 14528) | |
|---|---|
| 1 | agactgtttt tttctaagag acttctaaaa tattattacg agttgattta attttatgaa |
| 61 | aacatttaaa actagttgat tttttttata attacataat tttaagaaaa agtgttagag |
| 121 | gcttgatttt tttgttgatt ttttctaaga tttgattaaa gtgccataat agtattaata |
| 181 | aagagtattt tttaacttaa aatgtatttt atttattaat taaaacttca attatgataa |
| 241 | ctcatgcaaa aatatagttc attaacagaa aaaaatagga aaactttgaa gttttgtttt |
| 301 | tacacgtcat ttttacgtat gattgggctt tatagctagt taaatatgat tgggcttcta |
| 361 | gggttaa. |

[0320] in certain embodiments of the methods of the disclosure, the transposase enzyme is a piggyBac or piggyBac-like transposase enzyme. In certain embodiments, the piggyBac or piggyBac-like transposase enzyme is isolated or derived from Pectinophora gossypiella. The piggyBac or piggyBac-like transposase enzyme may comprise or consist of an amino acid sequence at least 5%, 10%, 15%, 20%, 25%, 30%, 35%, 40%, 45%, 50%, 55%, 60%, 65%, 70%, 75%, 80%, 85%, 90%, 95%, 99% or any percentage in between identical to:

| (SEQ ID NO: 14530) | |
|---|---|
| 1 | MDLRKQDEKI RQWLEQDIEE DSKGESDNSS SETEDIVEME VHKNTSSESE VSSESDYEPV |
| 61 | CPSKRQRTQI IESEESDNSE SIRPSRRQTS RVIDSDETDE DVMSSTPQNI PRNPNVIQPS |
| 121 | SRFLYGKNKH KWSSAAKPSS VRTSRRNIIH FIPGPKERAR EVSEPIDIFS LFISEDMLQQ |
| 181 | VVTFTNAEML IRKNKYKTET FTVSPTNLEE IRALLGLLFN AAAMKSNHLP TRMLFNTHRS |
| 241 | GTIFKACMSA ERLNFLIKCL RFDDKLTRNV RQRDDRFAPI RDLWQALISN FQKWYTPGSY |
| 301 | ITVDEQLVGF RGRCSFRMYI PNKPNKYGIK LVMAADVNSK YIVNAIPYLG KGTDPQNQPL |
| 361 | ATFFIKEITS TLHGTNRNIT MDNWFTSVPL ANELLMAPYN LTLVGTLRSN KREIPEKLKN |
| 421 | SKSRAIGTSM FCYDGDKTLV SYKAKSNKVV FILSTIHDQP DINQETGKPE MIHFYNSTKG |
| 481 | AVDTVDQMCS SISTNRKTQR WPLCVFYNML NLSIINAYVV YVYNNVRNNK KPMSRRDFVI |
| 541 | KLGDQLMEPW LRQRLQTVTL RRDIKVMIQD ILGESSDLEA PVPSVSNVRK IYYLCPSKAR |
| 601 | RMTKHRCIKC KQAICGPHNI DICSRCIE. |

[0321] In certain embodiments, the piggyBac or piggyBac-like transposon is isolated or derived from Pectinophora gossypiella. In certain embodiments, the piggyBac or piggyBac-like transposon comprises a sequence of:
[0322] 1 ttaaccctag ataactaaac attcgtccgc tcgacgacgc gctatgccgc gaaattgaag
[0323] 61 tttacctatt attccgcgtc ccccgccccc gccgcttttt ctagcttcct gatttgcaaa
[0324] 121 atagtgcatc gcgtgacacg ctcgaggtca cacgacaatt aggtcgaaag ttacaggaat
[0325] 181 ttcgtcgtcc gctcgacgaa agtttagtaa ttacgtaagt ttggcaaagg taagtgaatg
[0326] 241 aagtattttt ttataattat tttttaattc tttatagtga taacgtaagg tttatttaaa
[0327] 301 tttattactt ttatagttat ttagccaatt gttataaatt ccttgttatt gctgaaaaat
[0328] 361 ttgcctgttt tagtcaaaat ttattaactt ttcgatcgtt ttttag (SEQ ID NO: 14532). In certain embodiments, the piggyBac or piggyBac-like transposon comprises a sequence of:

| (SEQ ID NO: 14571) | |
|---|---|
| 1 | tttcactaag taattttgtt cctatttagt agataagtaa cacataatta ttgtgatatt |
| 61 | caaaacttaa gaggtttaat aaataataat aaaaaaaaaa tggtttttat ttcgtagtct |
| 121 | gctcgacgaa tgtttagtta ttacgtaacc gtgaatatag tttagtagtc tagggttaa. |

[0329] In certain embodiments of the methods of the disclosure, the transposase enzyme is a piggyBac or piggyBac-like transposase enzyme. In certain embodiments, the piggyBac or piggyBac-like transposase enzyme is isolated or derived from Ctenoplusia agnata. The piggyBac or piggyBac-like transposase enzyme may comprise or consist of an amino acid sequence at least 5%, 10%, 15%, 20%, 25%, 30%, 35%, 40%, 45%, 50%, 55%, 60%, 65%, 70%, 75%, 80%, 85%, 90%, 95%, 99% or any percentage in between identical to:

| (SEQ ID NO: 14534) | |
|---|---|
| 1 | MASRQHLYQD EIAAILENED DYSPHDTDSE MEDCVTQDDV RSDVEDEMVD NIGNGTSPAS |
| 61 | RHEDPETPDP SSEASNLEVT LSSHRIIILP QRSIREKNNH IWSTTKGQSS GRTAAINIVR |
| 121 | TNRGPTRMCR NIVDPLLCFQ LFIKEEIVEE IVKWTNVEMV QKRVNLKDIS ASYRDTNEME |
| 181 | IWAIISMLTL SAVMKDNHLS TDELFNVSYG TRYVSVMSRE RFEFLLRLLR MGDKLLRPNL |
| 241 | RQEDAFTPVR KIWEIFINQC RLNYVPGTNL TVDEQLLGFR GRCPFRMYIP NKPDKYGIKF |
| 301 | PMVCDAATKY MVDAIPYLGK STKTQGLPLG EFYVKELTQT VHGTNRNVTC DNWFTSVPLA |
| 361 | KSLLNSPYNL TLVGTIRSNK REIPEEVKNS RSRQVGSSMF CFDGPLTLVS YKPKPSKMVF |
| 421 | LLSSCNEDAV VNQSNGKPDM ILFYNQTKGG VDSFDQMCSS MSTNRKTNRW PMAVFYGMLN |
| 481 | MAFVNSYIIY CHNMLAKKEK PLSRKDFMKK LSTDLTTPSM QKRLEAPTLK RSLRDNITNV |
| 541 | LKIVPQAAID TSFDEPEPKK RRYCGFCSYK KKRMTKTQCF KCKKPVCGEH NIDVCQDCI. |

[0330] In certain embodiments, the piggyBac or piggyBac-like transposon is isolated or derived from Ctenoplusia agnata. In certain embodiments, the piggyBac or piggyBac-like transposon comprises a sequence of:

| (SEQ ID NO: 14535) | |
|---|---|
| 1 | ttaaccctag aagcccaatc tacgtcattc tgacgtgtat gtcgccgaaa atactctgtc |
| 61 | tctttctcct gcacgatcgg attgccgcga acgctcgatt caacccagtt ggcgccgaga |
| 121 | tctattggag gactgcggcg ttgattcggt aagtcccgcc attttgtcat agtaacagta |
| 181 | ttgcacgtca gcttgacgta tatttgggct ttgtgttatt tttgtaaatt ttcaacgtta |
| 241 | gtttattatt gcatcttttt gttacattac tggtttattt gcatgtatta ctcaaatatt |
| 301 | atttttattt tagcgtagaa aataca. |

In certain embodiments, the piggyBac or piggyBac-like transposon comprises a sequence of:

| (SEQ ID NO: 14536) | |
|---|---|
| 1 | agactgtttt ttttgtattt gcattatata ttatattcta aagttgattt aattctaaga |
| 61 | aaaacattaa aataagtttc tttttgtaaa atttaattaa ttataagaaa aagtttaagt |
| 121 | tgatctcatt ttttataaaa atttgcaatg tttccaaagt tattattgta aaagaataaa |
| 181 | taaaagtaaa ctgagtttta attgatgttt tattatatca ttatactata tattacttaa |
| 241 | ataaaacaat aactgaatgt atttctaaaa ggaatcacta gaaaatatag tgatcaaaaa |
| 301 | tttacacgtc atttttgcgt atgattgggc tttataggtt ctaaaaatat gattgggcct |
| 361 | ctagggttaa. |

In certain embodiments, the piggyBac or piggyBac-like transposon comprises an ITR sequence of CCCTAGAAGCCCAATC (SEQ ID NO: 14564).

[0331] In certain embodiments of the methods of the disclosure, the transposase enzyme is a piggyBac or piggyBac-like transposase enzyme. In certain embodiments, the piggyBac or piggyBac-like transposase enzyme is isolated or derived from Agrotis ipsilon. The piggyBac (PB) or piggyBac-like transposase enzyme may comprise or consist of an amino acid sequence at least 5%, 10%, 15%, 20%, 25%, 30%, 35%, 40%, 45%, 50%, 55%, 60%, 65%, 70%, 75%, 80%, 85%, 90%, 95%, 99% or any percentage in between identical to:

| (SEQ ID NO: 14537) | |
|---|---|
| 1 | MESRQRLNQD EIATILENDD DYSPLDSDSE AEDRVVEDDV WSDNEDAMID YVEDTSRQED |
| 61 | PDNNIASQES ANLEVTSLTS HRIISLPQRS ICGKNNHVWS TTKGRTTGRT SAINIIRTNR |
| 121 | GPTRMCRNIV DPLLCFQLFI TDEIIHEIVK WTNVEMIVKR QNLIDISASY RDTNTMEMWA |
| 181 | LVGILTLTAV MKDNHLSTDE LFDATFSGTR YVSVMSRERF EFLIRCMRMD DKTLRPTLRS |
| 241 | DDAFIPVRKL WEIFINQCRL NYVPGGNLTV DEQLLGFRGR CPFRMYIPNK PDKYGIRFPM |
| 301 | MCDAATKYMI DAIPYLGKST KTNGLPLGEF YVKELTKTVH GTNRNVTCDN WFTSIPLAKN |
| 361 | MLQAPYNLTI VGTIRSNKRE IPEEIKNSRS RPVGSSMFCF DGPLTLVSYK PKPSRMVFLL |
| 421 | SSCDENAVIN ESNGKPDMIL FYNQTKGGVD SFDQMCKSMS ANRKTNRWPM AVFYGMLNMA |
| 481 | FVNSYIIYCH NKINKQKKPI NRKEFMKNLS TDLTTPWMQE RLKAPTLKRT LRDNITNVLK |
| 541 | NVVPPSPANN SEEPGPKKRS YCGFCSYKKR RMTKTQFYKC KKAICGEHNI DVCQDCV. |

[0332] In certain embodiments, the piggyBac or piggyBac-like transposon is isolated or derived from Agrotis ipsilon. In certain embodiments, the piggyBac or piggyBac-like transposon comprises a sequence of:
[0333] 1 ttaaccctag aagcccaatc tacgtaaatt tgacgtatac cgcggcgaaa tatatctgtc
[0334] 61 tctttcacgt ttaccgtcgg attcccgcta acttcggaac caactcagta gccattgaga
[0335] 121 actcccagga cacagttgcg tcatctcggt aagtgccgcc attttgttgt aatagacagg
[0336] 181 ttgcacgtca ttttgacgta taattgggct ttgtgtaact tttgaaatta tttataattt
[0337] 241 ttattgatgt gatttatttg agttaatcgt attgtttcgt tacatttttc atatgatatt
[0338] 301 aatattttca gattgaatat aaa (SEQ ID NO: 14538). In certain embodiments, the piggyBac or piggyBac-like transposon comprises a sequence of:

| (SEQ ID NO: 14539) | |
|---|---|
| 1 | agactgtttt ttttaaaagg cttataaagt attactattg cgtgatttaa ttttataaaa |
| 61 | atatttaaaa ccagttgatt tttttaataa ttacctaatt ttaagaaaaa atgttagaag |
| 121 | cttgatattt ttgttgattt ttttctaaga tttgattaaa aggccataat tgtattaata |
| 181 | aagagtattt ttaacttcaa atttatttta tttattaatt aaaacttcaa ttatgataat |
| 241 | acatgcaaaa atatagttca tcaacagaaa aatataggaa aactctaata gttttatttt |
| 301 | tacacgtcat ttttacgtat gattgggctt tatagctagt caaatatgat tgggcttcta |
| 361 | gggttaa. |

[0339] In certain embodiments of the methods of the disclosure, the transposase enzyme is a piggyBac or piggyBac-like transposase enzyme. In certain embodiments, the piggyBac or piggyBac-like transposase enzyme is isolated or derived from Megachile rotundata. The piggyBac (PB) or piggyBac-like transposase enzyme may comprise or consist of an amino acid sequence at least 5%, 10%, 15%, 20%, 25%, 30%, 35%, 40%, 45%, 50%, 55%, 60%, 65%, 70%, 75%, 80%, 85%, 90%, 95%, 99% or any percentage in between identical to:

| (SEQ ID NO: 14540) | |
|---|---|
| 1 | MNGKDSLGEF YLDDLSDCLD CRSASSTDDE SDSSNIAIRK RCPIPLIYSD SEDEDMNNNV |
| 61 | EDNNHFVKES NRYHYQIVEK YKITSKTKKW KDVTVTEMKK FLGLIILMGQ VKKDVLYDYW |
| 121 | STDPSIETPF FSKVMSRNRF LQIMQSWHFY NNNDISPNSH RLVKIQPVID YFKEKFNNVY |
| 181 | KSDQQLSLDE CLIPWRGRLS IKTYNPAKIT KYGILVRVLS EARTGYVSNF CVYAADGKKI |
| 241 | EETVLSVIGP YKNMWHHVYQ DNYYNSVNIA KIFLKNKLRV CGTIRKNRSL PQILQTVKLS |
| 301 | RGQHQFLRNG HTLLEVWNNG KRNVNMISTI HSAQMAESRN RSRTSDCPIQ KPISIIDYNK |
| 361 | YMKGVDRADQ YLSYYSIFRK TKKWTKRVVM FFINCALFNS FKVYTTLNGQ KITYKNFLHK |
| 421 | AALSLIEDCG TEEQGTDLPN SEPTTTRTTS RVDHPGRLEN FGKHKLVNIV TSGQCKKPLR |
| 481 | QCRVCASKKK LSRTGFACKY CNVPLHKGDC FERYHSLKKY. |

[0340] In certain embodiments, the piggyBac or piggyBac-like transposon is isolated or derived from Megachile rotundata. In certain embodiments, the piggyBac or piggyBac-like transposon comprises a sequence of:

| (SEQ ID NO: 14541) | |
|---|---|
| 1 | ttaaataatg cccactctag atgaacttaa cactttaccg accggccgtc gattattcga |
| 61 | cgtttgctcc ccagcgctta ccgaccggcc atcgattatt cgacgtttgc ttcccagcgc |
| 121 | ttaccgaccg gtcatcgact tttgatcttt ccgttagatt tggttaggtc agattgacaa |
| 181 | gtagcaagca tttcgcattc tttattcaaa taatcggtgc ttttttctaa gctttagccc |
| 241 | ttagaa. |

In certain embodiments, the piggyBac or piggyBac-like transposon comprises a sequence of:

| (SEQ ID NO: 14542) | |
|---|---|
| 1 | acaacttctt ttttcaacaa atattgttat atggattatt tatttattta tttatttatg |
| 61 | gtatatttta tgtttattta tttatggtta ttatggtata ttttatgtaa ataataaact |
| 121 | gaaaacgatt gtaatagatg aaataaatat tgttttaaca ctaatataat taaagtaaaa |
| 181 | gattttaata aatttcgtta ccctacaata acacgaagcg tacaatttta ccagagttta |
| 241 | ttaa. |

[0341] In certain embodiments of the methods of the disclosure, the transposase enzyme is a piggyBac or piggyBac-like transposase enzyme. In certain embodiments, the piggyBac or piggyBac-like transposase enzyme is isolated or derived from Bombus impatiens. The piggyBac (PB) or piggyBac-like transposase enzyme may comprise or consist of an amino acid sequence at least 5%, 10%, 15%, 20%, 25%, 30%, 35%, 40%, 45%, 50%, 55%, 60%, 65%, 70%, 75%, 80%, 85%, 90%, 95%, 99% or any percentage in between identical to:

| (SEQ ID NO: 14543) | |
|---|---|
| 1 | MNEKNGIGEF YLDDLSDCPD SYSRSNSGDE SDGSDTIIRK RGSVLPPRYS DSEDDEINNV |
| 61 | EDNANNVENN DDIWSTNDEA IILEPFEGSP GLKIMPSSAE SVTDNVNLFF GDDFFEHLVR |
| 121 | ESNRYHYQVM EKYKIPSKAK KWTDITVPEM KKFLGLIVLM GQIKKDVLYD YWSTDPSIET |
| 181 | PFFSQVMSRN RFVQIMQSWH FCNNDNIPHD SHRLAKIQPV IDYFRRKFND VYKPCQQLSL |
| 241 | DESIIPWRGR LSIKTYNPAK ITKYGILVRV LSEAVTGYVC NFDVYAADGK KLEDTAVIEP |
| 301 | YKNIWHQIYQ DNYYNSVKMA RILLKNKVRV CGTIRKNRGL PRSLKTIQLS RGQYEFRRNH |
| 361 | QILLEVWNNG RRNVNMISTI HSAQLMESRS KSKRSDVPIQ KPNSIIDYNK YMKGVDRADQ |
| 421 | YLAYYSIFRK TKKWTKRVVM FFINCALFNS FRVYTILNGK NITYKNFLHK VAVSWIEDGE |
| 481 | TNCTEQDDNL PNSEPTRRAP RLDHPGRLSN YGKHKLINIV TSGRSLKPQR QCRVCAVQKK |
| 541 | RSRTCFVCKF CNVPLHKGDC FERYHTLKKY. |

[0342] In certain embodiments, the piggyBac or piggyBac-like transposon is isolated or derived from Bombus impatiens. In certain embodiments, the piggyBac or piggyBac-like transposon comprises a sequence of:

| (SEQ ID NO: 14544) | |
|---|---|
| 1 | ttaatttttt aacattttac cgaccgatag ccgattaatc gggtttttgc cgctgacgct |
| 61 | taccgaccga taacctatta atcggctttt tgtcgtcgaa gcttaccaac ctatagccta |
| 121 | cctatagtta atcggttgcc atggcgataa acaatctttc tcattatatg agcagtaatt |
| 181 | tgttatttag tactaaggta ccttgctcag ttgcgtcagt tgcgttgctt tgtaagctcc |
| 241 | cacagtttta taccaattcg aaaaacttac cgttcgcg. |

In certain embodiments, the piggyBac or piggyBac-like transposon comprises a sequence of:

| (SEQ ID NO: 14545) | |
|---|---|
| 1 | actatttcac atttgaacta aaaaccgttg taatagataa aataaatata atttagtatt |
| 61 | aatattatgg aaacaaaaga ttttattcaa tttaattatc ctatagtaac aaaaagcggc |
| 121 | caattttatc tgagcatacg aaaagcacag atactcccgc ccgacagtct aaaccgaaac |
| 181 | agagccggcg ccagggagaa tctgcgcctg agcagccggt cggacgtgcg tttgctgttg |
| 241 | aaccgctagt ggtcagtaaa ccagaaccag tcagtaagcc agtaactgat cagttaacta |
| 301 | gattgtatag ttcaaattga acttaatcta gtttttaagc gtttgaatgt tgtctaactt |
| 361 | cgttatatat tatattcttt ttaa. |

[0343] In certain embodiments of the methods of the disclosure, the transposase enzyme is a piggyBac or piggyBac-like transposase enzyme. In certain embodiments, the piggyBac or piggyBac-like transposase enzyme is isolated or derived from Mamestra brassicae. The piggyBac (PB) or piggyBac-like transposase enzyme may comprise or consist of an amino acid sequence at least 5%, 10%, 15%, 20%, 25%, 30%, 35%, 40%, 45%, 50%, 55%, 60%, 65%, 70%, 75%, 80%, 85%, 90%, 95%, 99% or an percentage in between identical to:

| (SEQ ID NO: 14546) | |
|---|---|
| 1 | MFSFVPNKEQ TRTVLIFCFH LKTTAAESHR PLVEAFGEQV PTVKTCERWF QRFKSGDFDV |
| 61 | DDKEHGKPPK RYEDAELQAL LDEDDAQTQK QLAEQLEVSQ QAVSNRLREG GKIQKVGRWV |
| 121 | PHELNERQRE RRKNTCEILL SRYKRKSFLH RIVTGEEKWI FFVNPKRKKS YVDPGQPATS |
| 181 | TARPNRFGKK TRLCVWWDQS GVIYYELLKP GETVNTARYQ QQLINLNRAL QRKRPEYQKR |
| 241 | QHRVIFLHDN APSHTARAVR DTLETLNWEV LPHAAYSPDL APSDYHLFAS MGHALAEQRF |
| 301 | DSYESVEEWL DEWFAAKDDE FYWRGIHKLP ERWDNCVASD GKYFE. |

[0344] In certain embodiments, the piggyBac or piggyBac-like transposon is isolated or derived from Mamestra brassicae. In certain embodiments, the piggyBac or piggyBac-like transposon comprises a sequence of:

| (SEQ ID NO: 14547) | |
|---|---|
| 1 | ttattgggtt gcccaaaaag taattgcgga tttttcatat acctgtcttt taaacgtaca |
| 61 | tagggatcga actcagtaaa actttgacct tgtgaaataa caaacttgac tgtccaacca |
| 121 | ccatagtttg gcgcgaattg agcgtcataa ttgttttgac tttttgcagt caac. |

In certain embodiments, the piggyBac or piggyBac-like transposon comprises a sequence of:

| (SEQ ID NO: 14548) | |
|---|---|
| 1 | atgatttttt ctttttaaac caattttaat tagttaattg atataaaaat ccgcaattac |
| 61 | tttttgggca acccaataa. |

[0345] In certain embodiments of the methods of the disclosure, the transposase enzyme is a piggyBac or piggyBac-like transposase enzyme. In certain embodiments, the piggyBac or piggyBac-like transposase enzyme is isolated or derived from Mayetiola destructor. The piggyBac (PB) or piggyBac-like transposase enzyme may comprise or consist of an amino acid sequence at least 5%, 10%, 15%, 20%, 25%, 30%, 35%, 40%, 45%, 50%, 55%, 60%, 65%, 70%, 75%, 80%, 85%, 90%, 95%, 99% or any percentage in between identical to:

| (SEQ ID NO: 14549) | |
|---|---|
| 1 | MENFENWRKR RHLREVLLGH FFAKKTAAES HRLLVEVYGE HALAKTQCFE WFQRFKSGDF |
| 61 | DTEDKERPGQ PKKFEDEELE ALLDEDCCQT QEELAKSLGV TQQAISKRLK AAGYIQKQGN |
| 121 | WVPHELKPRD VERRFCMSEM LLQRHKKKSF LSRIITGDEK WIHYDNSKRK KSYVKRGGRA |
| 181 | KSTPKSNLHG AKVMLCIWWD QRGVLYYELL EPGQTITGDL YRTQLIRLKQ ALAEKRPEYA |
| 241 | KRHGAVIFHH DNARPHVALP VKNYLENSGW EVLPHPPYSP DLAPSDYHLF RSMQNDLAGK |
| 301 | RFTSEQGIRK WLDSFLAAKP AKFFEKGIHE LSERWEKVIA SDGQYFE. |

[0346] In certain embodiments, the piggyBac or piggyBac-like transposon is isolated or derived from Mayetiola destructor. In certain embodiments, the piggyBac or piggyBac-like transposon comprises a sequence of:

| (SEQ ID NO: 14550) | |
|---|---|
| 1 | taagacttcc aaaatttcca cccgaacttt accttccccg cgcattatgt ctctcttttc |
| 61 | accctctgat ccctggtatt gttgtcgagc acgatttata ttgggtgtac aacttaaaaa |
| 121 | ccggaattgg acgctagatg tccacactaa cgaatagtgt aaaagcacaa atttcatata |
| 181 | tacgtcattt tgaaggtaca tttgacagct atcaaaatca gtcaataaaa ctattctatc |
| 241 | tgtgtgcatc atattttttt attaact. |

In certain embodiments, the piggyBac or piggyBac-like transposon comprises a sequence of:

| (SEQ ID NO: 14551) | |
|---|---|
| 1 | tgcattcatt cattttgtta tcgaaataaa gcattaattt tcactaaaaa attccggttt |
| 61 | ttaagttgta cacccaatat catccttagt gacaattttc aaatggcttt cccattgagc |
| 121 | tgaaaccgtg gctctagtaa gaaaaacgcc caacccgtca tcatatgcct tttttttctc |
| 181 | aacatccg. |

[0347] In certain embodiments of the methods of the disclosure, the transposase enzyme is a piggyBac or piggyBac-like transposase enzyme. In certain embodiments, the piggyBac or piggyBac-like transposase enzyme is isolated or derived from Apis mellifera. The piggyBac (PB) or piggyBac-like transposase enzyme may comprise or consist of an amino acid sequence at least 5%, 10%, 15%, 20%, 25%, 30%, 35%, 40%, 45%, 50%, 55%, 60%, 65%, 70%, 75%, 80%, 85%, 90%, 95%, 99% or any percentage in between identical to:

| (SEQ ID NO: 14552) | |
|---|---|
| 1 | MENQKEHYRH ILLFYFRKGK NASQAHKKLC AVYGDEALKE RQCQNWFDKF RSGDFSLKDE |
| 61 | KRSGRPVEVD DDLIKAIIDS DRHSTTREIA EKLHVSHTCI ENHLKQLGYV QKLDTWVPHE |
| 121 | LKEKHLTQRI NSCDLLKKRN ENDPFLKRLI TGDEKWVVYN NIKRKRSWSR PREPAQTTSK |
| 181 | AGIHRKKVLL SVWWDYKGIV YFELLPPNRT INSVVYIEQL TKLNNAVEEK RPELTNRKGV |
| 241 | VFHHDNARPH TSLVTRQKLL ELGWDVLPHP PYSPDLAPSD YFLFRSLQNS LNGKNFNNDD |
| 301 | DIKSYLIQFF ANKNQKFYER GIMMLPERWQ KVIDQNGQHI TE. |

[0348] In certain embodiments, the piggyBac or piggyBac-like transposon is isolated or derived from Apis mellifera. In certain embodiments, the piggyBac or piggyBac-like transposon comprises a sequence of:

| (SEQ ID NO: 14553) | |
|---|---|
| 1 | ttgggttggc aactaagtaa ttgcggattt cactcataga tggcttcagt tgaattttta |
| 61 | ggtttgctgg cgtagtccaa atgtaaaaca cattttgtta tttgatagtt ggcaattcag |
| 121 | ctgtcaatca gtaaaaaaag ttttttgatc ggttgcgtag ttttcgtttg gcgttcgttg |
| 181 | aaaa. |

In certain embodiments, the piggyBac or piggyBac-like transposon comprises a sequence of:

| (SEQ ID NO: 14554) | |
|---|---|
| 1 | agttatttag ttccatgaaa aaattgtctt tgattttcta aaaaaaatcc gcaattactt |
| 61 | agttgccaat ccaa. |

[0349] In certain embodiments of the methods of the disclosure, the transposase enzyme is a piggyBac or piggyBac-like transposase enzyme. In certain embodiments, the piggyBac or piggyBac-like transposase enzyme is isolated or derived from Messor bouvieri. The piggyBac (PB) or piggyBac-like transposase enzyme may comprise or consist of an amino acid sequence at least 5%, 10%, 15%, 20%, 25%, 30%, 35%, 40%, 45%, 50%, 55%, 60%, 65%, 70%, 75%, 80%, 85%, 90%, 95%, 99% or any percentage in between identical to:

| (SEQ ID NO: 14555) | |
|---|---|
| 1 | MSSFVPENVH LRHALLFLFH QKKRAAESHR LLVETYGEHA PTIRTCETWF RQFKCGDFNV |
| 61 | QDKERPGRPK TFEDAELQEL LDEDSTQTQK QLAEKLNVSR VAICERLQAM GKIQKMGRWV |
| 121 | PHELNDRQME NRKIVSEMLL QRYERKSFLH RIVTGDEKWI YFENPKRKKS WLSPGEAGPS |
| 181 | TARPNRFGRK TMLCVWWDQI GVVYYELLKP GETVNTDRYR QQMINLNCAL IEKRPQYAQR |
| 241 | HDKVILQHDN APSHTAKPVK EMLKSLGWEV LSHPPYSPDL APSDYHLFAS MGHALAEQHF |
| 301 | ADFEEVKKWL DEWFSSKEKL FFWNGIHKLS ERWTKCIESN GQYFE. |

[0350] In certain embodiments, the piggyBac or piggyBac-like transposon is isolated or derived from Messor bouvieri. In certain embodiments, the piggyBac or piggyBac-like transposon comprises a sequence of:

| (SEQ ID NO: 14556) | |
|---|---|
| 1 | agtcagaaat gacacctcga tcgacgacta atcgacgtct aatcgacgtc gattttatgt |
| 61 | caacatgtta ccaggtgtgt cggtaattcc tttccggttt ttccggcaga tgtcactagc |
| 121 | cataagtatg aaatgttatg atttgataca tatgtcattt tattctactg acattaacct |
| 181 | taaaactaca caagttacgt tccgccaaaa taacagcgtt atagatttat aattttttga |
| 241 | aa. |

In certain embodiments, the piggyBac or piggyBac-like transposon comprises a sequence of:

| (SEQ ID NO: 14557) | |
|---|---|
| 1 | ataaatttga actatccatt ctaagtaacg tgttttcttt aacgaaaaaa ccggaaaaga |
| 61 | attaccgaca ctcctggtat gtcaacatgt tattttcgac attgaatcgc gtcgattcga |
| 121 | agtcgatcga ggtgtcattt ctgact. |

[0351] In certain embodiments of the methods of the disclosure, the transposase enzyme is a piggyBac or piggyBac-like transposase enzyme. In certain embodiments, the piggyBac or piggyBac-like transposase enzyme is isolated or derived from Trichoplusia ni. The piggyBac (PB) or piggyBac-like transposase enzyme may comprise or consist of an amino acid sequence at least 5%, 10%, 15%, 20%, 25%, 30%, 35%, 40%, 45%, 50%, 55%, 60%, 65%, 70%, 75%, 80%, 85%, 90%, 95%, 99% or any percentage in between identical to:

| (SEQ ID NO: 14558) | |
|---|---|
| 1 | MGSSLDDEHI LSALLQSDDE LVGEDSDSEV SDHVSEDDVQ SDTEEAFIDE VHEVQPTSSG |
| 61 | SEILDEQNVI EQPGSSLASN RILTLPQRTI RGKNKHCWST SKSTRRSRVS ALNIVRSQRG |
| 121 | PTRMCRNIYD PLLCFKLFFT DEIISEIVKW TNAEISLKRR ESMTSATFRD TNEDEIYAFF |
| 181 | GILVMTAVRK DNHMSTDDLF DRSLSMVYVS VMSRDRFDFL IRCLRMDDKS IRPTLRENDV |
| 241 | FTPVRKIWDL FIHQCIQNYT PGAHLTIDEQ LLGFRGRCPF RVYIPNKPSK YGIKILMMCD |
| 301 | SGTKYMINGM PYLGRGTQTN GVPLGEYYVK ELSKPVHGSC RNITCDNWFT SIPLAKNLLQ |
| 361 | EPYKLTIVGT VRSNKREIPE VLKNSRSRPV GTSMFCFDGP LTLVSYKPKP AKMVYLLSSC |
| 421 | DEDASINEST GKPQMVMYYN QTKGGVDTLD QMCSVMTCSR KTNRWPMALL YGMINIACIN |
| 481 | SFIIYSHNVS SKGEKVQSRK KFMRNLYMSL TSSFMRKRLE APTLKRYLRD NISNILPKEV |
| 541 | PGTSDDSTEE PVMKKRTYCT YCPSKIRRKA NASCKKCKKV ICREHNIDMC QSCF. |

[0352] In certain embodiments, the piggyBac or piggyBac-like transposon is isolated or derived from Trichoplusia ni. In certain embodiments, the piggyBac or piggyBac-like transposon comprises a sequence of:

| (SEQ ID NO: 14559) | |
|---|---|
| 1 | ttaaccctag aaagatagtc tgcgtaaaat tgacgcatgc attcttgaaa tattgctctc |
| 61 | tctttctaaa tagcgcgaat ccgtcgctgt gcatttagga catctcagtc gccgcttgga |
| 121 | gctcccgtga ggcgtgcttg tcaatgcggt aagtgtcact gattttgaac tataacgacc |
| 181 | gcgtgagtca aaatgacgca tgattatctt ttacgtgact tttaagattt aactcatacg |
| 241 | ataattatat tgttatttca tgttctactt acgtgataac ttattatata tatattttct |
| 301 | tgttatagat atc. |

In certain embodiments, the piggyBac or piggyBac-like transposon comprises a sequence of:

| (SEQ ID NO: 14560) | |
|---|---|
| 1 | tttgttactt tatagaagaa attttgagtt tttgtttttt tttaataaat aaataaacat |
| 61 | aaataaattg tttgttgaat ttattattag tatgtaagtg taaatataat aaaacttaat |
| 121 | atctattcaa attaataaat aaacctcgat atacagaccg ataaaacaca tgcgtcaatt |
| 181 | ttacgcatga ttatctttaa cgtacgtcac aatatgatta tctttctagg gttaa. |

In certain embodiments, the piggyBac or piggyBac-like transposon comprises a sequence of:

| (SEQ ID NO: 14561) | |
|---|---|
| 1 | ccctagaaag atagtctgcg taaaattgac gcatgcattc ttgaaatatt gctctctctt |
| 61 | tctaaatagc gcgaatccgt cgctgtgcat ttaggacatc tcagtcgccg cttggagctc |
| 121 | ccgtgaggcg tgcttgtcaa tgcggtaagt gtcactgatt ttgaactata acgaccgcgt |
| 181 | gagtcaaaat gacgcatgat tatcttttac gtgactttta agatttaact catacgataa |
| 241 | ttatattgtt atttcatgtt ctacttacgt gataacttat tatatatata ttttcttgtt |
| 301 | atagatatc. |

In certain embodiments, the piggyBac or piggyBac-like transposon comprises a sequence of:

| (SEQ ID NO: 14562) | |
|---|---|
| 1 | tttgttactt tatagaagaa attttgagtt tttgtttttt tttaataaat aaataaacat |
| 61 | aaataaattg tttgttgaat ttattattag tatgtaagtg taaatataat aaaacttaat |
| 121 | atctattcaa attaataaat aaacctcgat atacagaccg ataaaacaca tgcgtcaatt |
| 181 | ttacgcatga ttatctttaa cgtacgtcac aatatgatta tctttctagg g. |

In certain embodiments, the piggyBac or piggyBac-like transposon comprises a sequence of:

| (SEQ ID NO: 14609) | |
|---|---|
| 1 | tctaaatagc gcgaatccgt cgctgtgcat ttaggacatc tcagtcgccg cttggagctc |
| 61 | ccgtgaggcg tgcttgtcaa tgcggtaagt gtcactgatt ttgaactata acgaccgcgt |
| 121 | gagtcaaaat gacgcatgat tatcttttac gtgactttta agatttaact catacgataa |
| 181 | ttatattgtt atttcatgtt ctacttacgt gataacttat tatatatata ttttcttgtt |
| 241 | atagatatc. |

In certain embodiments, the piggyBac or piggyBac-like transposon comprises a sequence of:

| (SEQ ID NO: 14610) | |
|---|---|
| 1 | tttgttactt tatagaagaa attttgagtt tttgtttttt tttaataaat aaataaacat |
| 61 | aaataaattg tttgttgaat ttattattag tatgtaagtg taaatataat aaaacttaat |
| 121 | atctattcaa attaataaat aaacctcgat atacagaccg ataaaacaca tgcgtcaatt |
| 181 | ttacgcatga ttatctttaa cgtacgtcac aatatgatta tctttctagg g. |

[0353] In certain embodiments, the piggyBac or piggyBac-like transposon comprises SEQ ID NO: 14561 and SEQ ID NO: 14562, and the piggyBac or piggyBac-like transposase comprises SEQ ID NO: 14558. In certain embodiments, the piggyBac or piggyBac-like transposon comprises SEQ ID NO: 14609 and SEQ ID NO: 14610, and the piggyBac or piggyBac-like transposase comprises SEQ ID NO: 14558.

[0354] In certain embodiments, the piggyBac or piggyBac-like transposon is isolated or derived from Aphis gossypii. In certain embodiments, the piggyBac or piggyBac-like transposon comprises an ITR sequence of CCTTCCAGCGGGCGCGC (SEQ ID NO: 14565).

[0355] In certain embodiments, the piggyBac or piggyBac-like transposon is isolated or derived from Chilo suppressalis. In certain embodiments, the piggyBac or piggyBac-like transposon comprises an ITR sequence of CCCAGATTAGCCT (SEQ ID NO: 14566).

[0356] In certain embodiments, the piggyBac or piggyBac-like transposon is isolated or derived from Heliothis virescens. In certain embodiments, the piggyBac or piggyBac-like transposon comprises an ITR sequence of CCCTTAATTACTCGCG (SEQ ID NO: 14567).

[0357] In certain embodiments, the piggyBac or piggyBac-like transposon is isolated or derived from Pectinophora gossypiella. In certain embodiments, the piggyBac or piggyBac-like transposon comprises an ITR sequence of CCCTAGATAACTAAAC (SEQ ID NO: 14568).

[0358] In certain embodiments, the piggyBac or piggyBac-like transposon is isolated or derived from Anopheles stephensi. In certain embodiments, the piggyBac or piggyBac-like transposon comprises an ITR sequence of CCCTAGAAAGATA (SEQ ID NO: 14569).

### Non-Transposition Based Methods of Genetic Modification

[0359] In some embodiments of the methods of the disclosure, a modified HSCor modified HSC descendent cell of the disclosure may be produced by introducing a transgene into an HSC or an HSC descendent cell of the disclosure. The introducing step may comprise delivery of a nucleic acid sequence and/or a genomic editing construct via a non-transposition delivery system.

[0360] In some embodiments of the methods of the disclosure, introducing a nucleic acid sequence and/or a genomic editing construct into an HSC or HSC descendent cell ex vivo, in vivo, in vitro or in situ comprises one or more of topical delivery, adsorption, absorption, electroporation, spin-fection, co-culture, transfection, mechanical delivery, sonic delivery, vibrational delivery, magnetofection or by nanoparticle-mediated delivery. In some embodiments of the methods of the disclosure, introducing a nucleic acid sequence and/or a genomic editing construct into an HSC or HSC descendent cell ex vivo, in vivo, in vitro or in situ comprises liposomal transfection, calcium phosphate transfection, fugene transfection, and dendrimer-mediated transfection. In some embodiments of the methods of the disclosure, introducing a nucleic acid sequence and/or a genomic editing construct into an HSC or HSC descendent cell ex vivo, in vivo, in vitro or in situ by mechanical transfection comprises cell squeezing, cell bombardment, or gene gun techniques. In some embodiments of the methods of the disclosure, introducing a nucleic acid sequence and/or a genomic editing construct into an HSC or HSC descendent cell ex vivo, in vivo, in vitro or in situ by nanoparticle-mediated transfection comprises liposomal delivery, delivery by micelles, and delivery by polymerosomes.

[0361] In some embodiments of the methods of the disclosure, introducing a nucleic acid sequence and/or a genomic editing construct into an HSC or HSC descendent cell ex vivo, in vivo, in vitro or in situ comprises a non-viral vector. In some embodiments, the non-viral vector comprises a nucleic acid. In some embodiments, the non-viral vector comprises plasmid DNA, linear double-stranded DNA (dsDNA), linear single-stranded DNA (ssDNA), DoggyBone™ DNA, nanoplasmids, minicircle DNA, single-stranded oligodeoxynucleotides (ssODN), DDNA oligonucleotides, single-stranded mRNA (ssRNA), and double-stranded mRNA (dsRNA). In some embodiments, the non-viral vector comprises a transposon of the disclosure.

[0362] In some embodiments of the methods of the disclosure, introducing a nucleic acid sequence and/or a genomic editing construct into an HSC or HSC descendent cell ex vivo, in vivo, in vitro or in situ comprises a viral vector. In some embodiments, the viral vector is a non-integrating non-chromosomal vector. Exemplary non-integrating non-chromosomal vectors include, but are not limited to, adeno-associated virus (AAV), adenovirus, and herpes viruses. In some embodiments, the viral vector is an integrating chromosomal vector. Integrating chromosomal vectors include, but are not limited to, adeno-associated vectors (AAV), Lentiviruses, and gamma-retroviruses.

[0363] In some embodiments of the methods of the disclosure, introducing a nucleic acid sequence and/or a genomic editing construct into an HSC or HSC descendent cell ex vivo, in vivo, in vitro or in situ comprises a combination of vectors. Exemplary, non-limiting vector combinations include: viral and non-viral vectors, a plurality of non-viral vectors, or a plurality of viral vectors. Exemplary but non-limiting vectors combinations include: a combination of a DNA-derived and an RNA-derived vector, a combination of an RNA and a reverse transcriptase, a combination of a transposon and a transposase, a combination of a non-viral vector and an endonuclease, and a combination of a viral vector and an endonuclease.

[0364] In some embodiments of the methods of the disclosure, genome modification comprising introducing a nucleic acid sequence and/or a genomic editing construct into an HSC or HSC descendent cell ex vivo, in vivo, in vitro or in situ stably integrates a nucleic acid sequence, transciently integrates a nucleic acid sequence, produces site-specific integration a nucleic acid sequence, or produces a biased integration of a nucleic acid sequence. In some embodiments, the nucleic acid sequence is a transgene.

[0365] In some embodiments of the methods of the disclosure, genome modification comprising introducing a nucleic acid sequence and/or a genomic editing construct into an HSC or HSC descendent cell ex vivo, in vivo, in vitro or in situ stably integrates a nucleic acid sequence. In some embodiments, the stable chromosomal integration can be a random integration, a site-specific integration, or a biased integration. In some embodiments, the site-specific integration can be non-assisted or assisted. In some embodiments, the assisted site-specific integration is co-delivered with a site-directed nuclease. In some embodiments, the site-directed nuclease comprises a transgene with 5′ and 3′ nucleotide sequence extensions that contain a percentage homology to upstream and downstream regions of the site of genomic integration. In some embodiments, the transgene with homologous nucleotide extensions enable genomic integration by homologous recombination, microhomology-mediated end joining, or nonhomologous end-joining. In some embodiments the site-specific integration occurs at a safe harbor site. Genomic safe harbor sites are able to accommodate the integration of new genetic material in a manner that ensures that the newly inserted genetic elements function reliably (for example, are expressed at a therapeutically effective level of expression) and do not cause deleterious alterations to the host genome that cause a risk to the host organism. Potential genomic safe harbors include, but are not limited to, intronic sequences of the human albumin gene, the adeno-associated virus site 1 (AAVS1), a naturally occurring site of integration of AAV virus on chromosome 19, the site of the chemokine (C-C motif) receptor 5 (CCR5) gene and the site of the human ortholog of the mouse Rosa26 locus.

[0366] In some embodiments, the site-specific transgene integration occurs at a site that disrupts expression of a target gene. In some embodiments, disruption of target gene expression occurs by site-specific integration at introns, exons, promoters, genetic elements, enhancers, suppressors, start codons, stop codons, and response elements. In some embodiments, exemplary target genes targeted by site-specific integration include but are not limited to TRAC, TRAB, PD1, any immunosuppressive gene, and genes involved in allo-rejection.

[0367] In some embodiments, the site-specific transgene integration occurs at a site that results in enhanced expression of a target gene. In some embodiments, enhancement of target gene expression occurs by site-specific integration at introns, exons, promoters, genetic elements, enhancers, suppressors, start codons, stop codons, and response elements.

[0368] In some embodiments of the methods of the disclosure, enzymes may be used to create strand breaks in the host genome to facilitate delivery or integration of the transgene. In some embodiments, enzymes create single-strand breaks. In some embodiments, enzymes create double-strand breaks. In some embodiments, examples of break-inducing enzymes include but are not limited to: transposases, integrases, endonucleases, CRISPR-Cas9, transcription activator-like effector nucleases (TALEN), zinc finger nucleases (ZFN), Cas-CLOVER™, and Cpf1. In some embodiments, break-inducing enzymes can be delivered to the cell encoded in DNA, encoded in mRNA, as a protein, as a nucleoprotein complex with a guide RNA (gRNA).

[0369] In some embodiments of the methods of the disclosure, the site-specific transgene integration is controlled by a vector-mediated integration site bias. In some embodiments vector-mediated integration site bias is controlled by the chosen lentiviral vector. In some embodiments vector-mediated integration site bias is controlled by the chosen gamma-retroviral vector.

[0370] In some embodiments of the methods of the disclosure, the site-specific transgene integration site is a non-stable chromosomal insertion. In some embodiments, the integrated transgene may become silenced, removed, excised, or further modified.

[0371] In some embodiments of the methods of the disclosure, the genome modification is a non-stable integration of a transgene. In some embodiments, the non-stable integration can be a transient non-chromosomal integration, a semi-stable non chromosomal integration, a semi-persistent non-chromosomal insertion, or a non-stable chromosomal insertion. In some embodiments, the transient non-chromosomal insertion can be epi-chromosomal or cytoplasmic.

[0372] In some embodiments, the transient non-chromosomal insertion of a transgene does not integrate into a chromosome and the modified genetic material is not replicated during cell division.

[0373] In some embodiments of the methods of the disclosure, the genome modification is a semi-stable or persistent non-chromosomal integration of a transgene. In some embodiments, a DNA vector encodes a Scaffold/matrix attachment region (S-MAR) module that binds to nuclear matrix proteins for episomal retention of a non-viral vector allowing for autonomous replication in the nucleus of dividing cells.

[0374] In some embodiments of the methods of the disclosure, the genome modification is a non-stable chromosomal integration of a transgene. In some embodiments, the integrated transgene may become silenced, removed, excised, or further modified.

[0375] In some embodiments of the methods of the disclosure, the modification to the genome by transgene insertion can occur via host cell-directed double-strand breakage repair (homology-directed repair) by homologous recombination (HR), microhomology-mediated end joining (MMEJ), nonhomologous end joining (NHEJ), transposase enzyme-mediated modification, integrase enzyme-mediated modification, endonuclease enzyme-mediated modification, or recombinant enzyme-mediated modification. In some embodiments, the modification to the genome by transgene insertion can occur via CRISPR-Cas9, TALEN, ZFNs, Cas-CLOVER, and Cpf1.

[0376] In gene editing systems that involve inserting new or existing nucleotides/nucleic acids, insertion tools (e.g., DNA template vectors, transposable elements (transposons or retrotransposons) must be delivered to the cell in addition to the cutting enzyme (e.g., a nuclease, recombinase, integrase or transposase). Examples of such insertion tools for a recombinase may include a DNA vector. Other gene editing systems require the delivery of an integrase along with an insertion vector, a transposase along with a transposon/retrotransposon, etc. In some embodiments, an example recombinase that may be used as a cutting enzyme is the CRE recombinase. In various embodiments, example integrases that may be used in insertion tools include viral based enzymes taken from any of a number of viruses including, but not limited to, AAV, gamma retrovirus, and lentivirus. Example transposons/retrotransposons that may be used in insertion tools include, but are not limited to, the piggyBac transposon, Sleeping Beauty transposon, and the L1 retrotransposon.

[0377] In certain embodiments of the methods of the disclosure, the transgene is delivered in vivo. In certain embodiments of the methods of the disclosure, in vivo transgene delivery can occur by: topical delivery, adsorption, absorption, electroporation, spin-fection, co-culture, transfection, mechanical delivery, sonic delivery, vibrational delivery, magnetofection or by nanoparticle-mediated delivery. In certain embodiments of the methods of the disclosure, in vivo transgene delivery by transfection can occur by liposomal transfection, calcium phosphate transfection, fugene transfection, and dendrimer-mediated transfection. In certain embodiments of the methods of the disclosure, in vivo mechanical transgene delivery can occur by cell squeezing, bombardment, and gene gun. In certain embodiments of the methods of the disclosure, in vivo nanoparticle-mediated transgene delivery can occur by liposomal delivery, delivery by micelles, and delivery by polymerosomes. In various embodiments, nucleases that may be used as cutting enzymes include, but are not limited to, Cas9, transcription activator-like effector nucleases (TALENs) and zinc finger nucleases.

[0378] In certain embodiments of the methods of the disclosure, non-viral vectors are used for transgene delivery. In certain embodiments, the non-viral vector is a nucleic acid. In certain embodiments, the nucleic acid non-viral vector is plasmid DNA, linear double-stranded DNA (dsDNA), linear single-stranded DNA (ssDNA), DoggyBone™ DNA, nanoplasmids, minicircle DNA, single-stranded oligodeoxynucleotides (ssODN), DDNA oligonucleotides, single-stranded mRNA (ssRNA), and double-stranded mRNA (dsRNA). In certain embodiments, the non-viral vector is a transposon. In certain embodiments, the transposon is piggyBac.

[0379] In certain embodiments of the methods of the disclosure, transgene delivery can occur via viral vector. In certain embodiments, the viral vector is a non-integrating non-chromosomal vectors. Non-integrating non-chromosomal vectors can include adeno-associated virus (AAV), adenovirus, and herpes viruses. In certain embodiments, the viral vector is an integrating chromosomal vectors. Integrating chromosomal vectors can include adeno-associated vectors (AAV), Lentiviruses, and gamma-retroviruses.

[0380] In certain embodiments of the methods of the disclosure, transgene delivery can occur by a combination of vectors. Exemplary but non-limiting vector combinations can include: viral plus non-viral vectors, more than one non-viral vector, or more than one viral vector. Exemplary but non-limiting vectors combinations can include: DNA-derived plus RNA-derived vectors, RNA plus reverse transcriptase, a transposon and a transposase, a non-viral vectors plus an endonuclease, and a viral vector plus an endonuclease.

[0381] In certain embodiments of the methods of the disclosure, the genome modification can be a stable integration of a transgene, a transient integration of a transgene, a site-specific integration of a transgene, or a biased integration of a transgene.

[0382] In certain embodiments of the methods of the disclosure, the genome modification can be a stable chromosomal integration of a transgene. In certain embodiments, the stable chromosomal integration can be a random integration, a site-specific integration, or a biased integration. In certain embodiments, the site-specific integration can be non-assisted or assisted. In certain embodiments, the assisted site-specific integration is co-delivered with a site-directed nuclease. In certain embodiments, the site-directed nuclease comprises a transgene with 5′ and 3′ nucleotide sequence extensions that contain homology to upstream and downstream regions of the site of genomic integration. In certain embodiments, the transgene with homologous nucleotide extensions enable genomic integration by homologous recombination, microhomology-mediated end joining, or nonhomologous end-joining. In certain embodiments the site-specific integration occurs at a safe harbor site. Genomic safe harbor sites are able to accommodate the integration of new genetic material in a manner that ensures that the newly inserted genetic elements function reliably (for example, are expressed at a therapeutically effective level of expression) and do not cause deleterious alterations to the host genome that cause a risk to the host organism. Potential genomic safe harbors include, but are not limited to, intronic sequences of the human albumin gene, the adeno-associated virus site 1 (AAVS1), a naturally occurring site of integration of AAV virus on chromosome 19, the site of the chemokine (C-C motif) receptor 5 (CCR5) gene and the site of the human ortholog of the mouse Rosa26 locus.

[0383] In certain embodiments, the site-specific transgene integration occurs at a site that disrupts expression of a target gene. In certain embodiments, disruption of target gene expression occurs by site-specific integration at introns, exons, promoters, genetic elements, enhancers, suppressors, start codons, stop codons, and response elements. In certain embodiments, exemplary target genes targeted by site-specific integration include but are not limited to TRAC, TRAB, PDI, any immunosuppressive gene, and genes involved in allo-rejection.

[0384] In certain embodiments, the site-specific transgene integration occurs at a site that results in enhanced expression of a target gene. In certain embodiments, enhancement of target gene expression occurs by site-specific integration at introns, exons, promoters, genetic elements, enhancers, suppressors, start codons, stop codons, and response elements.

[0385] In certain embodiments of the methods of the disclosure, enzymes may be used to create strand breaks in the host genome to facilitate delivery or integration of the transgene. In certain embodiments, enzymes create single-strand breaks. In certain embodiments, enzymes create double-strand breaks. In certain embodiments, examples of break-inducing enzymes include but are not limited to: transposases, integrases, endonucleases, CRISPR-Cas9, transcription activator-like effector nucleases (TALEN), zinc finger nucleases (ZFN), Cas-CLOVER™, and Cpf1. In certain embodiments, break-inducing enzymes can be delivered to the cell encoded in DNA, encoded in mRNA, as a protein, as a nucleoprotein complex with a guide RNA (gRNA).

[0386] In certain embodiments of the methods of the disclosure, the site-specific transgene integration is controlled by a vector-mediated integration site bias. In certain embodiments vector-mediated integration site bias is controlled by the chosen lentiviral vector. In certain embodiments vector-mediated integration site bias is controlled by the chosen gamma-retroviral vector.

[0387] In certain embodiments of the methods of the disclosure, the site-specific transgene integration site is a non-stable chromosomal insertion. In certain embodiments, the integrated transgene may become silenced, removed, excised, or further modified. In certain embodiments of the methods of the disclosure, the genome modification is a non-stable integration of a transgene. In certain embodiments, the non-stable integration can be a transient non-chromosomal integration, a semi-stable non chromosomal integration, a semi-persistent non-chromosomal insertion, or a non-stable chromosomal insertion. In certain embodiments, the transient non-chromosomal insertion can be epi-chromosomal or cytoplasmic. In certain embodiments, the transient non-chromosomal insertion of a transgene does not integrate into a chromosome and the modified genetic material is not replicated during cell division.

[0388] In certain embodiments of the methods of the disclosure, the genome modification is a semi-stable or persistent non-chromosomal integration of a transgene. In certain embodiments, a DNA vector encodes a Scaffold/matrix attachment region (S-MAR) module that binds to nuclear matrix proteins for episomal retention of a non-viral vector allowing for autonomous replication in the nucleus of dividing cells.

[0389] In certain embodiments of the methods of the disclosure, the genome modification is a non-stable chromosomal integration of a transgene. In certain embodiments, the integrated transgene may become silenced, removed, excised, or further modified.

[0390] In certain embodiments of the methods of the disclosure, the modification to the genome by transgene insertion can occur via host cell-directed double-strand breakage repair (homology-directed repair) by homologous recombination (HR), microhomology-mediated end joining (MMEJ), nonhomologous end joining (NHEJ), transposase enzyme-mediated modification, integrase enzyme-mediated modification, endonuclease enzyme-mediated modification, or recombinant enzyme-mediated modification. In certain embodiments, the modification to the genome by transgene insertion can occur via CRISPR-Cas9, TALEN, ZFNs, Cas-CLOVER, and Cpf1.

[0391] In certain embodiments of the methods of the disclosure, a cell with an in vivo or ex vivo genomic modification can be a germline cell or a somatic cell. In certain embodiments the modified cell can be a human, non-human, mammalian, rat, mouse, or dog cell. In certain embodiments, the modified cell can be differentiated, undifferentiated, or immortalized. In certain embodiments, the modified undifferentiated cell can be a stem cell. In certain embodiments, the modified cell can be differentiated, undifferentiated, or immortalized. In certain embodiments, the modified undifferentiated cell can be an induced pluripotent stem cell. In certain embodiments, the modified cell can be a T cell, a hematopoietic stem cell, a natural killer cell, a macrophage, a dendritic cell, a monocyte, a megakaryocyte, or an osteoclast. In certain embodiments, the modified cell can be modified while the cell is quiescent, in an activated state, resting, in interphase, in prophase, in metaphase, in anaphase, or in telophase. In certain embodiments, the modified cell can be fresh, cryopreserved, bulk, sorted into sub-populations, from whole blood, from leukapheresis, or from an immortalized cell line.

### Production and Generation of VCARs

[0392] At least one VHH protein or VCAR of the disclosure can be optionally produced by a cell line, a mixed cell line, an immortalized cell or clonal population of immortalized cells, as well known in the art. See, e.g., Ausubel, et al., ed., Current Protocols in Molecular Biology, John Wiley & Sons, Inc., NY, N.Y. (1987-2001); Sambrook, et al., Molecular Cloning: A Laboratory Manual, 2nd Edition, Cold Spring Harbor, N.Y. (1989); Harlow and Lane, Antibodies, a Laboratory Manual, Cold Spring Harbor, N.Y. (1989); Colligan, et al., eds., Current Protocols in Immunology, John Wiley & Sons, Inc., NY (1994-2001); Colligan et al., Current Protocols in Protein Science, John Wiley & Sons, NY, N.Y., (1997-2001).

[0393] Amino acids from a VHH protein can be altered, added and/or deleted to reduce immunogenicity or reduce, enhance or modify binding, affinity, on-rate, off-rate, avidity, specificity, half-life, stability, solubility or any other suitable characteristic, as known in the art.

[0394] Optionally, VHH proteins can be engineered with retention of high affinity for the antigen and other favorable biological properties. To achieve this goal, the VHH proteins can be optionally prepared by a process of analysis of the parental sequences and various conceptual engineered products using three-dimensional models of the parental and engineered sequences. Three-dimensional models are commonly available and are familiar to those skilled in the art. Computer programs are available which illustrate and display probable three-dimensional conformational structures of selected candidate sequences and can measure possible immunogenicity (e.g., Immunofilter program of Xencor, Inc. of Monrovia, Calif.). Inspection of these displays permits analysis of the likely role of the residues in the functioning of the candidate sequence, i.e., the analysis of residues that influence the ability of the candidate VHH protein to bind its antigen. In this way, residues can be selected and combined from the parent and reference sequences so that the desired characteristic, such as affinity for the target antigen(s), is achieved. Alternatively, or in addition to, the above procedures, other suitable methods of engineering can be used.

### Screening of VHH Proteins

[0395] Screening VHH for specific binding to similar proteins or fragments can be conveniently achieved using nucleotide (DNA or RNA display) or peptide display libraries, for example, in vitro display. This method involves the screening of large collections of peptides for individual members having the desired function or structure. The displayed nucleotide or peptide sequences can be from 3 to 5000 or more nucleotides or amino acids in length, frequently from 5-100 amino acids long, and often from about 8 to 25 amino acids long. In addition to direct chemical synthetic methods for generating peptide libraries, several recombinant DNA methods have been described. One type involves the display of a peptide sequence on the surface of a bacteriophage or cell. Each bacteriophage or cell contains the nucleotide sequence encoding the particular displayed peptide sequence. The VHH proteins of the disclosure can bind human or other mammalian proteins with a wide range of affinities (KD). In a preferred embodiment, at least one VHH of the present invention can optionally bind to a target protein with high affinity, for example, with a KD equal to or less than about 10⁻⁷ M, such as but not limited to, 0.1-9.9 (or any range or value therein)×10⁻⁸, 10⁻⁹, 10⁻¹⁰, 10⁻¹¹, 10⁻¹², 10⁻¹, 10⁻¹⁴, 10⁻¹⁵ or any range or value therein, as determined by surface plasmon resonance or the Kinexa method, as practiced by those of skill in the art.

[0396] The affinity or avidity of a VHH or a VCAR for an antigen can be determined experimentally using any suitable method. (See, for example, Berzofsky, et al., “Antibody-Antigen Interactions,” In Fundamental Immunology, Paul, W. E., Ed., Raven Press: New York, N.Y. (1984); Kuby, Janis Immunology, W.H. Freeman and Company: New York, N.Y. (1992); and methods described herein). The measured affinity of a particular VHH-antigen or VCAR-antigen interaction can vary if measured under different conditions (e.g., salt concentration, pH). Thus, measurements of affinity and other antigen-binding parameters (e.g., KD, Kon, Koff) are preferably made with standardized solutions of VHH or VCAR and antigen, and a standardized buffer, such as the buffer described herein.

[0397] Competitive assays can be performed with the VHH or VCAR of the disclosure in order to determine what proteins, antibodies, and other antagonists compete for binding to a target protein with the VHH or VCAR of the present invention and/or share the epitope region. These assays as readily known to those of ordinary skill in the art evaluate competition between antagonists or ligands for a limited number of binding sites on a protein. The protein and/or antibody is immobilized or insolubilized before or after the competition and the sample bound to the target protein is separated from the unbound sample, for example, by decanting (where the protein/antibody was preinsolubilized) or by centrifuging (where the protein/antibody was precipitated after the competitive reaction). Also, the competitive binding may be determined by whether function is altered by the binding or lack of binding of the VHH or VCAR to the target protein, e.g., whether the VCAR molecule inhibits or potentiates the enzymatic activity of, for example, a label. ELISA and other functional assays may be used, as well known in the art.

### Nucleic Acid Molecules

[0398] Nucleic acid molecules of the disclosure encoding VHH proteins or VCARs can be in the form of RNA, such as mRNA, hnRNA, tRNA or any other form, or in the form of DNA, including, but not limited to, cDNA and genomic DNA obtained by cloning or produced synthetically, or any combinations thereof. The DNA can be triple-stranded, double-stranded or single-stranded, or any combination thereof. Any portion of at least one strand of the DNA or RNA can be the coding strand, also known as the sense strand, or it can be the non-coding strand, also referred to as the anti-sense strand.

[0399] Isolated nucleic acid molecules of the disclosure can include nucleic acid molecules comprising an open reading frame (ORF), optionally, with one or more introns, e.g., but not limited to, at least one specified portion of at least one VCAR; nucleic acid molecules comprising the coding sequence for a VCAR; and nucleic acid molecules which comprise a nucleotide sequence substantially different from those described above but which, due to the degeneracy of the genetic code, still encode the VCAR as described herein and/or as known in the art. Of course, the genetic code is well known in the art. Thus, it would be routine for one skilled in the art to generate such degenerate nucleic acid variants that code for specific VCARs of the present invention. See, e.g., Ausubel, et al., supra, and such nucleic acid variants are included in the present invention.

[0400] As indicated herein, nucleic acid molecules of the disclosure which comprise a nucleic acid encoding a VCAR can include, but are not limited to, those encoding the amino acid sequence of a VHH fragment, by itself; the coding sequence for the entire VCAR or a portion thereof; the coding sequence for a VHH, fragment or portion, as well as additional sequences, such as the coding sequence of at least one signal leader or fusion peptide, with or without the aforementioned additional coding sequences, such as at least one intron, together with additional, non-coding sequences, including but not limited to, non-coding 5′ and 3′ sequences, such as the transcribed, non-translated sequences that play a role in transcription, mRNA processing, including splicing and polyadenylation signals (for example, ribosome binding and stability of mRNA); an additional coding sequence that codes for additional amino acids, such as those that provide additional functionalities. Thus, the sequence encoding a VCAR can be fused to a marker sequence, such as a sequence encoding a peptide that facilitates purification of the fused VCAR comprising a VHH fragment or portion.

### Polynucleotides Selectively Hybridizing to a Polynucleotide as Described Herein

[0401] The disclosure provides isolated nucleic acids that hybridize under selective hybridization conditions to a polynucleotide disclosed herein. Thus, the polynucleotides of this embodiment can be used for isolating, detecting, and/or quantifying nucleic acids comprising such polynucleotides. For example, polynucleotides of the present invention can be used to identify, isolate, or amplify partial or full-length clones in a deposited library. In some embodiments, the polynucleotides are genomic or cDNA sequences isolated, or otherwise complementary to, a cDNA from a human or mammalian nucleic acid library.

[0402] Preferably, the cDNA library comprises at least 80% full-length sequences, preferably, at least 85% or 90% full-length sequences, and, more preferably, at least 95% full-length sequences. The cDNA libraries can be normalized to increase the representation of rare sequences. Low or moderate stringency hybridization conditions are typically, but not exclusively, employed with sequences having a reduced sequence identity relative to complementary sequences. Moderate and high stringency conditions can optionally be employed for sequences of greater identity. Low stringency conditions allow selective hybridization of sequences having about 70% sequence identity and can be employed to identify orthologous or paralogous sequences.

[0403] Optionally, polynucleotides of this invention will encode at least a portion of a VCAR encoded by the polynucleotides described herein. The polynucleotides of this invention embrace nucleic acid sequences that can be employed for selective hybridization to a polynucleotide encoding a VCAR of the present invention. See, e.g., Ausubel, supra; Colligan, supra, each entirely incorporated herein by reference.

### Construction of Nucleic Acids

[0404] The isolated nucleic acids of the disclosure can be made using (a) recombinant methods, (b) synthetic techniques, (c) purification techniques, and/or (d) combinations thereof, as well-known in the art.

[0405] The nucleic acids can conveniently comprise sequences in addition to a polynucleotide of the present invention. For example, a multi-cloning site comprising one or more endonuclease restriction sites can be inserted into the nucleic acid to aid in isolation of the polynucleotide. Also, translatable sequences can be inserted to aid in the isolation of the translated polynucleotide of the disclosure. For example, a hexa-histidine marker sequence provides a convenient means to purify the proteins of the disclosure. The nucleic acid of the disclosure, excluding the coding sequence, is optionally a vector, adapter, or linker for cloning and/or expression of a polynucleotide of the disclosure.

[0406] Additional sequences can be added to such cloning and/or expression sequences to optimize their function in cloning and/or expression, to aid in isolation of the polynucleotide, or to improve the introduction of the polynucleotide into a cell. Use of cloning vectors, expression vectors, adapters, and linkers is well known in the art. (See, e.g., Ausubel, supra; or Sambrook, supra).

### Recombinant Methods for Constructing Nucleic Acids

[0407] The isolated nucleic acid compositions of this disclosure, such as RNA, cDNA, genomic DNA, or any combination thereof, can be obtained from biological sources using any number of cloning methodologies known to those of skill in the art. In some embodiments, oligonucleotide probes that selectively hybridize, under stringent conditions, to the polynucleotides of the present invention are used to identify the desired sequence in a cDNA or genomic DNA library. The isolation of RNA, and construction of cDNA and genomic libraries are well known to those of ordinary skill in the art. (See, e.g., Ausubel, supra; or Sambrook, supra).

### Nucleic Acid Screening and Isolation Methods

[0408] A cDNA or genomic library can be screened using a probe based upon the sequence of a polynucleotide of the disclosure. Probes can be used to hybridize with genomic DNA or cDNA sequences to isolate homologous genes in the same or different organisms. Those of skill in the art will appreciate that various degrees of stringency of hybridization can be employed in the assay; and either the hybridization or the wash medium can be stringent. As the conditions for hybridization become more stringent, there must be a greater degree of complementarity between the probe and the target for duplex formation to occur. The degree of stringency can be controlled by one or more of temperature, ionic strength, pH and the presence of a partially denaturing solvent, such as formamide. For example, the stringency of hybridization is conveniently varied by changing the polarity of the reactant solution through, for example, manipulation of the concentration of formamide within the range of 0% to 50%. The degree of complementarity (sequence identity) required for detectable binding will vary in accordance with the stringency of the hybridization medium and/or wash medium. The degree of complementarity will optimally be 100%, or 70-100%, or any range or value therein. However, it should be understood that minor sequence variations in the probes and primers can be compensated for by reducing the stringency of the hybridization and/or wash medium.

[0409] Methods of amplification of RNA or DNA are well known in the art and can be used according to the disclosure without undue experimentation, based on the teaching and guidance presented herein.

[0410] Known methods of DNA or RNA amplification include, but are not limited to, polymerase chain reaction (PCR) and related amplification processes (see, e.g., U.S. Pat. Nos. 4,683,195, 4,683,202, 4,800,159, 4,965,188, to Mullis, et al.; 4,795,699 and 4,921,794 to Tabor, et al; U.S. Pat. No. 5,142,033 to Innis; U.S. Pat. No. 5,122,464 to Wilson, et al.; U.S. Pat. No. 5,091,310 to Innis; U.S. Pat. No. 5,066,584 to Gyllensten, et al; U.S. Pat. No. 4,889,818 to Gelfand, et al; U.S. Pat. No. 4,994,370 to Silver, et al; U.S. Pat. No. 4,766,067 to Biswas; U.S. Pat. No. 4,656,134 to Ringold) and RNA mediated amplification that uses anti-sense RNA to the target sequence as a template for double-stranded DNA synthesis (U.S. Pat. No. 5,130,238 to Malek, et al, with the tradename NASBA), the entire contents of which references are incorporated herein by reference. (See, e.g., Ausubel, supra; or Sambrook, supra.)

[0411] For instance, polymerase chain reaction (PCR) technology can be used to amplify the sequences of polynucleotides of the disclosure and related genes directly from genomic DNA or cDNA libraries. PCR and other in vitro amplification methods can also be useful, for example, to clone nucleic acid sequences that code for proteins to be expressed, to make nucleic acids to use as probes for detecting the presence of the desired mRNA in samples, for nucleic acid sequencing, or for other purposes. Examples of techniques sufficient to direct persons of skill through in vitro amplification methods are found in Berger, supra, Sambrook, supra, and Ausubel, supra, as well as Mullis, et al., U.S. Pat. No. 4,683,202 (1987); and Innis, et al., PCR Protocols A Guide to Methods and Applications, Eds., Academic Press Inc., San Diego, Calif. (1990). Commercially available kits for genomic PCR amplification are known in the art. See, e.g., Advantage-GC Genomic PCR Kit (Clontech). Additionally, e.g., the T4 gene 32 protein (Boehringer Mannheim) can be used to improve yield of long PCR products.

### Synthetic Methods for Constructing Nucleic Acids

[0412] The isolated nucleic acids of the disclosure can also be prepared by direct chemical synthesis by known methods (see, e.g., Ausubel, et al., supra). Chemical synthesis generally produces a single-stranded oligonucleotide, which can be converted into double-stranded DNA by hybridization with a complementary sequence, or by polymerization with a DNA polymerase using the single strand as a template. One of skill in the art will recognize that while chemical synthesis of DNA can be limited to sequences of about 100 or more bases, longer sequences can be obtained by the ligation of shorter sequences.

### Recombinant Expression Cassettes

[0413] The disclosure further provides recombinant expression cassettes comprising a nucleic acid of the disclosure. A nucleic acid sequence of the disclosure, for example, a cDNA or a genomic sequence encoding a VCAR of the disclosure, can be used to construct a recombinant expression cassette that can be introduced into at least one desired host cell. A recombinant expression cassette will typically comprise a polynucleotide of the disclosure operably linked to transcriptional initiation regulatory sequences that will direct the transcription of the polynucleotide in the intended host cell. Both heterologous and non-heterologous (i.e., endogenous) promoters can be employed to direct expression of the nucleic acids of the disclosure.

[0414] In some embodiments, isolated nucleic acids that serve as promoter, enhancer, or other elements can be introduced in the appropriate position (upstream, downstream or in the intron) of a non-heterologous form of a polynucleotide of the disclosure so as to up or down regulate expression of a polynucleotide of the disclosure. For example, endogenous promoters can be altered in vivo or in vitro by mutation, deletion and/or substitution.

### Nanotransposons

[0415] The disclosure provides a nanotransposon comprising: (a) a sequence encoding a transposon insert, comprising a sequence encoding a first inverted terminal repeat (ITR), a sequence encoding a second inverted terminal repeat (ITR), and an intra-ITR sequence; (b) a sequence encoding a backbone, wherein the sequence encoding the backbone comprises a sequence encoding an origin of replication having between 1 and 450 nucleotides, inclusive of the endpoints, and a sequence encoding a selectable marker having between 1 and 200 nucleotides, inclusive of the endpoints, and (c) an inter-ITR sequence. In some embodiments, the inter-ITR sequence of (c) comprises the sequence of (b). In some embodiments, the intra-ITR sequence of (a) comprises the sequence of (b).

[0416] In some embodiments of the nanotransposons of the disclosure, the sequence encoding the backbone comprises between 1 and 600 nucleotides, inclusive of the endpoints. In some embodiments, the sequence encoding the backbone consists of between 1 and 50 nucleotides, between 50 and 100 nucleotides, between 100 and 150 nucleotides, between 150 and 200 nucleotides, between 200 and 250 nucleotides, between 250 and 300 nucleotides, between 300 and 350 nucleotides, between 350 and 400 nucleotides, between 400 and 450 nucleotides, between 450 and 500 nucleotides, between 500 and 550 nucleotides, between 550 and 600 nucleotides, each range inclusive of the endpoints.

[0417] In some embodiments of the nanotransposons of the disclosure, the inter-ITR sequence comprises between 1 and 1000 nucleotides, inclusive of the endpoints. In some embodiments, the inter-ITR sequence consists of between 1 and 50 nucleotides, between 50 and 100 nucleotides, between 100 and 150 nucleotides, between 150 and 200 nucleotides, between 200 and 250 nucleotides, between 250 and 300 nucleotides, between 300 and 350 nucleotides, between 350 and 400 nucleotides, between 400 and 450 nucleotides, between 450 and 500 nucleotides, between 500 and 550 nucleotides, between 550 and 600 nucleotides, between 600 and 650 nucleotides, between 650 and 700 nucleotides, between 700 and 750 nucleotides, between 750 and 800 nucleotides, between 800 and 850 nucleotides, between 850 and 900 nucleotides, between 900 and 950 nucleotides, or between 950 and 1000 nucleotides, each range inclusive of the endpoints.

[0418] In some embodiments of the nanotransposons of the disclosure, including the short nanotransposons (SNTs) of the disclosure, the inter-ITR sequence comprises between 1 and 200 nucleotides, inclusive of the endpoints. In some embodiments, the inter-ITR sequence consists of between 1 and 10 nucleotides, between 10 and 20 nucleotides, between 20 and 30 nucleotides, between 30 and 40 nucleotides, between 40 and 50 nucleotides, between 50 and 60 nucleotides, between 60 and 70 nucleotides, between 70 and 80 nucleotides, between 80 and 90 nucleotides, or between 90 and 100 nucleotides, each range inclusive of the endpoints.

[0419] In some embodiments of the nanotransposons of the disclosure, the selectable marker having between 1 and 200 nucleotides, inclusive of the endpoints, comprises a sequence encoding a sucrose-selectable marker. In some embodiments, the sequence encoding a sucrose-selectable marker comprises a sequence encoding an RNA-OUT sequence. In some embodiments, the sequence encoding an RNA-OUT sequence comprises or consists of 137 base pairs (bp). In some embodiments, the selectable marker having between 1 and 200 nucleotides, inclusive of the endpoints, comprises a sequence encoding a fluorescent marker. In some embodiments, the selectable marker having between 1 and 200 nucleotides, inclusive of the endpoints, comprises a sequence encoding a cell surface marker.

[0420] In some embodiments of the nanotransposons of the disclosure, the sequence encoding an origin of replication having between 1 and 450 nucleotides, inclusive of the endpoints, comprises a sequence encoding a mini origin of replication. In some embodiments, the sequence encoding an origin of replication having between 1 and 450 nucleotides, inclusive of the endpoints, comprises a sequence encoding an R6K origin of replication. In some embodiments, the R6K origin of replication comprises an R6K gamma origin of replication. In some embodiments, the R6K origin of replication comprises an R6K mini origin of replication. In some embodiments, the R6K origin of replication comprises an R6K gamma mini origin of replication. In some embodiments, the R6K gamma mini origin of replication comprises or consists of 281 base pairs (bp).

[0421] In some embodiments of the nanotransposons of the disclosure, the sequence encoding the backbone does not comprise a recombination site, an excision site, a ligation site or a combination thereof. In some embodiments, neither the nanotransposon nor the sequence encoding the backbone comprises a product of a recombination site, an excision site, a ligation site or a combination thereof. In some embodiments, neither the nanotransposon nor the sequence encoding the backbone is derived from a recombination site, an excision site, a ligation site or a combination thereof.

[0422] In some embodiments of the nanotransposons of the disclosure, a recombination site comprises a sequence resulting from a recombination event. In some embodiments, a recombination site comprises a sequence that is a product of a recombination event. In some embodiments, the recombination event comprises an activity of a recombinase (e.g., a recombinase site).

[0423] In some embodiments of the nanotransposons of the disclosure, the sequence encoding the backbone does not further comprise a sequence encoding foreign DNA.

[0424] In some embodiments of the nanotransposons of the disclosure, the inter-ITR sequence does not comprise a recombination site, an excision site, a ligation site or a combination thereof. In some embodiments, the inter-ITR sequence does not comprise a product of a recombination event, an excision event, a ligation event or a combination thereof. In some embodiments, the inter-ITR sequence is not derived from a recombination event, an excision event, a ligation event or a combination thereof.

[0425] In some embodiments of the nanotransposons of the disclosure, the inter-ITR sequence comprises a sequence encoding foreign DNA.

[0426] In some embodiments of the nanotransposons of the disclosure, the intra-ITR sequence comprises at least one sequence encoding an insulator and a sequence encoding a promoter capable of expressing an exogenous sequence in a mammalian cell. In some embodiments, the mammalian cell is a human cell.

[0427] In some embodiments of the nanotransposons of the disclosure, the intra-ITR sequence comprises a first sequence encoding an insulator, a sequence encoding a promoter capable of expressing an exogenous sequence in a mammalian cell and a second sequence encoding an insulator.

[0428] In some embodiments of the nanotransposons of the disclosure, the intra-ITR sequence comprises a first sequence encoding an insulator, a sequence encoding a promoter capable of expressing an exogenous sequence in a mammalian cell, a polyadenosine (polyA) sequence and a second sequence encoding an insulator.

[0429] In some embodiments of the nanotransposons of the disclosure, the intra-ITR sequence comprises a first sequence encoding an insulator, a sequence encoding a promoter capable of expressing an exogenous sequence in a mammalian cell, at least one exogenous sequence, a polyadenosine (polyA) sequence and a second sequence encoding an insulator.

[0430] In some embodiments of the nanotransposons of the disclosure, the sequence encoding a promoter capable of expressing an exogenous sequence in a mammalian cell is capable of expressing an exogenous sequence in a human cell. In some embodiments, the sequence encoding a promoter capable of expressing an exogenous sequence in a mammalian cell comprises a sequence encoding a constitutive promoter. In some embodiments, the sequence encoding a promoter capable of expressing an exogenous sequence in a mammalian cell comprises a sequence encoding an inducible promoter. In some embodiments, the intra-ITR sequence comprises a first sequence encoding a first promoter capable of expressing an exogenous sequence in a mammalian cell and a second sequence encoding a second promoter capable of expressing an exogenous sequence in mammalian cell, wherein the first promoter is a constitutive promoter, wherein the second promoter is an inducible promoter, and wherein the first sequence encoding the first promoter and the second sequence encoding the second promoter are oriented in opposite directions. In some embodiments, the sequence encoding a promoter capable of expressing an exogenous sequence in a mammalian cell comprises a sequence encoding a cell-type or tissue-type specific promoter. In some embodiments, the sequence encoding a promoter capable of expressing an exogenous sequence in a mammalian cell comprises a sequence encoding an EF1a promoter, a sequence encoding a CMV promoter, a sequence encoding an MND promoter, a sequence encoding an SV40 promoter, a sequence encoding a PGK1 promoter, a sequence encoding a Ubc promoter, a sequence encoding a CAG promoter, a sequence encoding an H1 promoter, or a sequence encoding a U6 promoter.

[0431] In some embodiments of the nanotransposons of the disclosure, the polyadenosine (polyA) sequence is isolated or derived from a viral polyA sequence. In some embodiments, the polyadenosine (polyA) sequence is isolated or derived from an (SV40) polyA sequence.

[0432] In some embodiments of the nanotransposons of the disclosure, the at least one exogenous sequence comprises an inducible proapoptotic polypeptide. In some embodiments, the inducible caspase polypeptide comprises (a) a ligand binding region, (b) a linker, and (c) a caspase polypeptide, wherein the inducible proapoptotic polypeptide does not comprise a non-human sequence. In some embodiments, the inducible caspase polypeptide comprises (a) a ligand binding region, (b) a linker, and (c) a truncated caspase 9 polypeptide, wherein the inducible proapoptotic polypeptide does not comprise a non-human sequence.

[0433] In some embodiments of the nanotransposons of the disclosure, including those wherein the at least one exogenous sequence comprises an inducible proapoptotic polypeptide, the ligand binding region comprises a FK506 binding protein 12 (FKBP12) polypeptide. In some embodiments, the amino acid sequence of the ligand binding region comprises a FK506 binding protein 12 (FKBP12) polypeptide. In some embodiments, the FK506 binding protein 12 (FKBP12) polypeptide comprises a modification at position 36 of the sequence. In some embodiments, the modification comprises a substitution of valine (V) for phenylalanine (F) at position 36 (F36V). In some embodiments, the FKBP12 polypeptide is encoded by an amino acid sequence comprising

(SEQ ID NO: 14636)
GGGGTCCAGGTCGAGACTATTTCACCAGGGGATGGGCGAACATTTCC
AAAAAGGGGCCAGACTTGCGTCGTGCATTACACCGGGATGCTGGAGG
ACGGGAAGAAAGTGGACAGCTCCAGGGATCGCAACAAGCCCTTCAAG
TTCATGCTGGGAAAGCAGGAAGTGATCCGAGGATGGGAGGAAGGCGT
GGCACAGATGTCAGTCGGCCAGCGGGCCAAACTGACCATTAGCCCTG
ACTACGCTTATGGAGCAACAGGCCACCCAGGGATCATTCCCCCTCAT
GCCACCCTGGTCTTCGATGTGGAACTGCTGAAGCTGGAG.

[0434] In some embodiments of the nanotransposons of the disclosure, including those wherein the at least one exogenous sequence comprises an inducible proapoptotic polypeptide, the linker region is encoded by an amino acid comprising GGGGS (SEQ ID NO: 14637) or a nucleic acid sequence comprising GGAGGAGGAGGATCC (SEQ ID NO: 14638). In some embodiments, the nucleic acid sequence encoding the linker does not comprise a restriction site.

[0435] In some embodiments of the nanotransposons of the disclosure, including those wherein the at least one exogenous sequence comprises an inducible proapoptotic polypeptide, the truncated caspase 9 polypeptide is encoded by an amino acid sequence that does not comprise an arginine (R) at position 87 of the sequence. In some embodiments, the truncated caspase 9 polypeptide is encoded by an amino acid sequence that does not comprise an alanine (A) at position 282 the sequence. In some embodiments, the truncated caspase 9 polypeptide is encoded by an amino acid comprising GFGDVGALESLRGNADLAYILSMEPCGHCLIINNVNFCRESGLRTRTGSNIDCEKLRRRF SSLHFMVEVKGDLTAKKMVLALLELAQQDHGALDCCVVVILSHGCQASHLQFPGAVY GTDGCPVSVEKIVNIFNGTSCPSLGGKPKLFFIQACGGEQKDHGFEVASTSPEDESPGSNP EPDATPFQEGLRTFDQLDAISSLPTPSDIFVSYSTFPGFVSWRDPKSGSWYVETLDDIFEQ WAHSEDLQSLLLRVANAVSVKGIYKQMPGCFNFLRKKLFFKTS (SEQ ID NO: 14639). In some embodiments, the truncated caspase 9 polypeptide is encoded by a nucleic acid sequence comprising

(SEQ ID NO: 14640)
GGATTTGGGGACGTGGGGGCCCTGGAGTCTCTGCGAGGAAATGCCGA
TCTGGCTTACATCCTGAGCATGGAACCCTGCGGCCACTGTCTGATCA
TTAACAATGTGAACTTCTGCAGAGAAAGCGGACTGCGAACACGGACT
GGCTCCAATATTGACTGTGAGAAGCTGCGGAGAAGGTTCTCTAGTCT
GCACTTTATGGTCGAAGTGAAAGGGGATCTGACCGCCAAGAAAATGG
TGCTGGCCCTGCTGGAGCTGGCTCAGCAGGACCATGGAGCTCTGGAT
TGCTGCGTGGTCGTGATCCTGTCCCACGGGTGCCAGGCTTCTCATCT
GCAGTTCCCCGGAGCAGTGTACGGAACAGACGGCTGTCCTGTCAGCG
TGGAGAAGATCGTCAACATCTTCAACGGCACTTCTTGCCCTAGTCTG
GGGGGAAAGCCAAAACTGTTCTTTATCCAGGCCTGTGGCGGGGAACA
GAAAGATCACGGCTTCGAGGTGGCCAGCACCAGCCCTGAGGACGAAT
CACCAGGGAGCAACCCTGAACCAGATGCAACTCCATTCCAGGAGGGA
CTGAGGACCTTTGACCAGCTGGATGCTATCTCAAGCCTGCCCACTCC
TAGTGACATTTTCGTGTCTTACAGTACCTTCCCAGGCTTTGTCTCAT
GGCGCGATCCCAAGTCAGGGAGCTGGTACGTGGAGACACTGGACGAC
ATCTTTGAACAGTGGGCCCATTCAGAGGACCTGCAGAGCCTGCTGCT
GCGAGTGGCAAACGCTGTCTCTGTGAAGGGCATCTACAAACAGATGC
CCGGGTGCTTCAATTTTCTGAGAAAGAAACTGTTCTTTAAGACTTCC.

[0436] In some embodiments of the nanotransposons of the disclosure, including those wherein the at least one exogenous sequence comprises an inducible proapoptotic polypeptide, the inducible proapoptotic polypeptide is encoded by an amino acid sequence comprising GVQVETISPGDGRTFPKRGQTCVVHYTGMLEDGKKVDSSRDRNKPFKFMLGKQEVIRG WEEGVAQMSVGQRAKLTISPDYAYGATGHPGIIPPHATLVFDVELLKLEGGGGSGFGDV GALESLRGNADLAYILSMEPCGHCLIINNVNFCRESGLRTRTGSNIDCEKLRRRFSSLHF MVEVKGDLTAKKMVLALLELAQQDHGALDCCVVVILSHGCQASHLQFPGAVYGTDGC PVSVEKIVNIFNGTSCPSLGGKPKLFFIQACGGEQKDHGFEVASTSPEDESPGSNPEPDAT PFQEGLRTFDQLDAISSLPTPSDIFVSYSTFPGFVSWRDPKSGSWYVETLDDIFEQWAHSE DLQSLLLRVANAVSVKGIYKQMPGCFNFLRKKLFFKTS (SEQ ID NO: 14641). In some embodiments, the inducible proapoptotic polypeptide is encoded by a nucleic acid sequence comprising

(SEQ ID NO: 14642)
ggggtccaggtcgagactatttcaccaggggatgggcgaacatttccaaa
aaggggccagacttgcgtcgtgcattacaccgggatgctggaggacggga
agaaagtggacagctccagggatcgcaacaagcccttcaagttcatgctg
ggaaagcaggaagtgatccgaggatgggaggaaggcgtggcacagatgtc
agtcggccagcgggccaaactgaccattagccctgactacgcttatggag
caacaggccacccagggatcattccccctcatgccaccctggtcttcgat
gtggaactgctgaagctggagggaggaggaggatccggatttggggacgt
gggggccctggagtctctgcgaggaaatgccgatctggcttacatcctga
gcatggaaccctgcggccactgtctgatcattaacaatgtgaacttctgc
agagaaagcggactgcgaacacggactggctccaatattgactgtgagaa
gctgcggagaaggttctctagtctgcactttatggtcgaagtgaaagggg
atctgaccgccaagaaaatggtgctggccctgctggagctggctcagcag
gaccatggagctctggattgctgcgtggtcgtgatcctgtcccacgggtg
ccaggcttctcatctgcagttccccggagcagtgtacggaacagacggct
gtcctgtcagcgtggagaagatcgtcaacatcttcaacggcacttcttgc
cctagtctggggggaaagccaaaactgttctttatccaggcctgtggcgg
ggaacagaaagatcacggcttcgaggtggccagcaccagccctgaggacg
aatcaccagggagcaaccctgaaccagatgcaactccattccaggaggga
ctgaggacctttgaccagctggatgctatctcaagcctgcccactcctag
tgacattttcgtgtcttacagtaccttcccaggctttgtctcatggcgcg
atcccaagtcagggagctggtacgtggagacactggacgacatctttgaa
cagtgggcccattcagaggacctgcagagcctgctgctgcgagtggcaaa
cgctgtctctgtgaagggcatctacaaacagatgcccgggtgcttcaatt
ttctgagaaagaaactgttctttaagacttcc.

[0437] In some embodiments of the nanotransposons of the disclosure, including those wherein the at least one exogenous sequence comprises an inducible proapoptotic polypeptide, the exogenous sequence further comprises a sequence encoding a selectable marker. In some embodiments, the sequence encoding the selectable marker comprises a sequence encoding a detectable marker. In some embodiments, the detectable marker comprises a fluorescent marker or a cell-surface marker. In some embodiments, the sequence encoding the selectable marker comprises a sequence encoding a protein that is active in dividing cells and not active in non-dividing cells. In some embodiments, the sequence encoding the selectable marker comprises a sequence encoding a metabolic marker. In some embodiments, the sequence encoding the selectable marker comprises a sequence encoding a dihydrofolate reductase (DHFR) mutein enzyme. In some embodiments, the DHFR mutein enzyme comprises or consists of the amino acid sequence of:
[0438] 1 MVGSLNCIVA VSQNMGIGKN GDFPWPPLRN ESRYFQRMTT TSSVEGKQNL
[0439] 61 VIMGKKTWFS IPEKNRPLKG RINLVLSREL KEPPQGAHFL SRSLDDALKL
[0440] 121 TEQPELANKV DMVWIVGGSS VYKEAMNHPG HLKLFVTRIM QDFESDTFFP
[0441] 181 EIDLEKYKLL PEYPGVLSDV QEEKGIKYKF EVYEKND (SEQ ID NO: 17012).In some embodiments, the DHFR mutein enzyme is encoded by a the nucleic acid sequence comprising or consisting of atggtcgggtctctgaattgtatcgtcgccgtgagtcagaacatgggcattgggaagaatggcgatttcccatggccacctctgcgcaacga gtcccgatactttcagcggatgacaactacctcctctgtggaagggaaacagaatctggtcatcatgggaaagaaaacttggttcagcattcc agagaagaaccggcccctgaaaggcagaatcaatctggtgctgtcccgagaactgaaggagccaccacagggagctcactttctgagcc ggtccctggacgatgcactgaagctgacagaacagcctgagctggccaacaaagtcgatatggtgtggatcgtcgggggaagttcagtgt ataaggaggccatgaatcaccccggccatctgaaactgttcgtcacacggatcatgcaggactttgagagcgatactttctttcctgaaattga cctggagaagtacaaactgctgcccgaatatcctggcgtgctgtccgatgtccaggaagagaaaggcatcaaatacaagttcgaggtctat gagaagaatgac (SEQ ID NO: 170 95). In some embodiments, the amino acid sequence of the DHFR mutein enzyme further comprises a mutation at one or more of positions 80, 113, or 153. In some embodiments, the amino acid sequence of the DHFR mutein enzyme comprises one or more of a substitution of a Phenylalanine (F) or a Leucine (L) at position 80, a substitution of a Leucine (L) or a Valine (V) at position 113, and a substitution of a Valine (V) or an Aspartic Acid (D) at position 153.

[0442] In some embodiments of the nanotransposons of the disclosure, including those wherein the at least one exogenous sequence comprises an inducible proapoptotic polypeptide and/or the exogenous sequence comprises a sequence encoding a selectable marker, the exogenous sequence further comprises a sequence encoding a non-naturally occurring antigen receptor, and/or a sequence encoding a therapeutic polypeptide. In some embodiments, the non-naturally occurring antigen receptor comprises a T cell Receptor (TCR). In some embodiments, a sequence encoding the TCR comprises one or more of an insertion, a deletion, a substitution, an invertion, a transposition or a frameshift compared to a corresponding wild type sequence. In some embodiments, a sequence encoding the TCR comprises a chimeric or recombinant sequence. In some embodiments, the non-naturally occurring antigen receptor comprises a chimeric antigen receptor (CAR). In some embodiments, the CAR comprises: (a) an ectodomain comprising an antigen recognition region, (b) a transmembrane domain, and (c) an endodomain comprising at least one costimulatory domain. In some embodiments, the ectodomain of (a) of the CAR further comprises a signal peptide. In some embodiments, the ectodomain of (a) of the CAR further comprises a hinge between the antigen recognition region and the transmembrane domain. In some embodiments, the endodomain comprises a human CD3ξ endodomain. In some embodiments, the at least one costimulatory domain comprises a human 4-1BB, CD28, CD40, ICOS, MyD88, OX-40 intracellular segment, or any combination thereof. In some embodiments, the at least one costimulatory domain comprises a human CD28 and/or a 4-1BB costimulatory domain. In some embodiments, the antigen recognition region comprises one or more of a scFv, a VHH, a VH, and a Centyrin.

[0443] In some embodiments of the nanotransposons of the disclosure, including those wherein the at least one exogenous sequence comprises an inducible proapoptotic polypeptide and/or the exogenous sequence comprises a sequence encoding a selectable marker, the exogenous sequence further comprises a sequence encoding a transposase.

[0444] In some embodiments of the nanotransposons of the disclosure, the intra-ITR sequence comprises a sequence encoding a selectable marker, an exogenous sequence, a sequence encoding an inducible caspase polypeptide, and at least one sequence encoding a self-cleaving peptide. In some embodiments, the at least one sequence encoding a self-cleaving peptide is positioned between one or more of: (a) the sequence encoding a selectable marker and the exogenous sequence, (b) the sequence encoding a selectable marker and the inducible caspase polypeptide, and (c) the exogenous sequence and the inducible caspase polypeptide. In some embodiments, a first sequence encoding a self-cleaving peptide is positioned between the sequence encoding a selectable marker and the exogenous sequence and a second sequence encoding a self-cleaving peptide is positioned between the exogenous sequence and the inducible caspase polypeptide.

[0445] In some embodiments of the nanotransposons of the disclosure, including those wherein the at least one exogenous sequence comprises one or more of an inducible proapoptotic polypeptide, a sequence encoding a selectable marker, and an exogenous sequence, the sequence encoding a first inverted terminal repeat (ITR) or the sequence encoding a second inverted terminal repeat (ITR) are recognized by a piggyBac transposase or a piggyBac-like transposase. In some embodiments, the sequence encoding a first inverted terminal repeat (ITR) or the sequence encoding a second inverted terminal repeat (ITR) are recognized by a piggyBac transposase. In some embodiments, the sequence encoding a first inverted terminal repeat (ITR) or the sequence encoding a second inverted terminal repeat (ITR) are recognized by a piggyBac-like transposase. In some embodiments, the sequence encoding a first inverted terminal repeat (ITR) or the sequence encoding a second inverted terminal repeat (ITR) comprise a TTAA, a TTAT or a TTAX recognition sequence. In some embodiments, the sequence encoding a first inverted terminal repeat (ITR) or the sequence encoding a second inverted terminal repeat (ITR) comprise a TTAA, a TTAT or a TTAX recognition sequence and a sequence having at least 50% identity to a sequence isolated or derived from a piggyBac transposase or a piggyBac-like transposase. In some embodiments, the sequence encoding a first inverted terminal repeat (ITR) or the sequence encoding a second inverted terminal repeat (ITR) comprise at least 2 nucleotides (nts), 3 nts, 4 nts, 5 nts, 6 nts, 7 nts, 8 nts, 9 nts, 10 nts, 11 nts, 12 nts, 13 nts, 14 nts, 15 nts, 16 nts, 17 nts, 18 nts, 19 nts, or 20 nts.

[0446] In some embodiments of the nanotransposons of the disclosure, including those wherein the at least one exogenous sequence comprises one or more of an inducible proapoptotic polypeptide, a sequence encoding a selectable marker, and an exogenous sequence, the sequence encoding a first inverted terminal repeat (ITR) or the sequence encoding a second inverted terminal repeat (ITR) are recognized by a piggyBac transposase or a piggyBac-like transposase. In some embodiments, the sequence encoding a first inverted terminal repeat (ITR) or the sequence encoding a second inverted terminal repeat (ITR) comprises the sequence of CCCTAGAAAGATAGTCTGCGTAAAATTGACGCATG (SEQ ID NO: 17096) or a sequence having at least 70% identity to the sequence of CCCTAGAAAGATAGTCTGCGTAAAATTGACGCATG (SEQ ID NO: 17096). In some embodiments, the sequence encoding a first inverted terminal repeat (ITR) or the sequence encoding a second inverted terminal repeat (ITR) comprises the sequence of CCCTAGAAAGATAATCATATTGTGACGTACGTTAAAGATAATCATGCGTAAAATTGA CGCATG (SEQ ID NO: 17097). In some embodiments, the sequence encoding a first inverted terminal repeat (ITR) or the sequence encoding a second inverted terminal repeat (ITR) comprises the sequence of CCCTAGAAAGATAGTCTGCGTAAAATTGACGCATG (SEQ ID NO: 17096) and comprises the sequence of CCCTAGAAAGATAATCATATTGTGACGTACGTTAAAGATAATCATGCGTAAAATTGA CGCATG (SEQ ID NO: 17097). In some embodiments, the sequence encoding a first inverted terminal repeat (ITR) or the sequence encoding a second inverted terminal repeat (ITR) comprises the sequence of CCCTAGAAAGATAGTCTGCGTAAAATTGACGCATG (SEQ ID NO: 17096) and comprises the sequence of CCCTAGAAAGATAATCATATTGTGACGTACGTTAAAGATAATCATGTGTAAAATTGA CGCATG (SEQ ID NO: 17098). In some embodiments, the sequence encoding a first inverted terminal repeat (ITR) or the sequence encoding a second inverted terminal repeat (ITR) comprises the sequence of CCCTAGAAAGATAGTCTGCGTAAAATTGACGCATG (SEQ ID NO: 17096) and comprises the sequence of

(SEQ ID NO: 17099)
TTAACCCTAGAAAGATAATCATATTGTGACGTACGTTAAAGATAATCATG
TGTAAAATTGACGCATGTGTTTTATCGGTCTGTATATCGAGGTTTATTTA
TTAATTTGAATAGATATTAAGTTTTATTATATTTACACTTACATACTAAT
AATAAATTCAACAAACAATTTATTTATGTTTATTTATTTATTAAAAAAAA
CAAAAACTCAAAATTTCTTCTATAAAGTAACAAAACTTTTA.

[0447] In some embodiments of the nanotransposons of the disclosure, including those wherein the at least one exogenous sequence comprises one or more of an inducible proapoptotic polypeptide, a sequence encoding a selectable marker, and an exogenous sequence, the sequence encoding a first inverted terminal repeat (ITR) or the sequence encoding a second inverted terminal repeat (ITR) are recognized by a piggyBac transposase or a piggyBac-like transposase. In some embodiments, the sequence encoding a first inverted terminal repeat (ITR) or the sequence encoding a second inverted terminal repeat (ITR) is recognized by a piggyBac transposase having an amino acid sequence of at least 20% identity to the amino acid sequence of
[0448] 1 MGSSLDDEHI LSALLQSDDE LVGEDSDSEI SDHVSEDDVQ SDTEEAFIDE VHEVQPTSSG
[0449] 61 SEILDEQNVI EQPGSSLASN RILTLPQRTI RGKNKHCWST SKSTRRSRVS ALNIVRSQRG
[0450] 121 PTRMCRNIYD PLLCFKLFFT DEIISEIVKW TNAEISLKRR ESMTGATFRD TNEDEIYAFF
[0451] 181 GILVMTAVRK DNHMSTDDLF DRSLSMVYVS VMSRDRFDFL IRCLRMDDKS IRPTLRENDV
[0452] 241 FTPVRKIWDL FIHQCIQNYT PGAHLTIDEQ LLGFRGRCPF RMYIPNKPSK YGIKILMMCD
[0453] 301 SGTKYMINGM PYLGRGTQTN GVPLGEYYVK ELSKPVHGSC RNITCDNWFT SIPLAKNLLQ
[0454] 361 EPYKLTIVGT VRSNKREIPE VLKNSRSRPV GTSMFCFDGP LTLVSYKPKP AKMVYLLSSC
[0455] 421 DEDASINEST GKPQMVMYYN QTKGGVDTLD QMCSVMTCSR KTNRWPMALL YGMINIACIN
[0456] 481 SFIIYSHNVS SKGEKVQSRK KFMRNLYMSL TSSFMRKRLE APTLKRYLRD NISNILPNEV
[0457] 541 PGTSDDSTEE PVMKKRTYCT YCPSKIRRKA NASCKKCKKV ICREHNIDMC QSCF (SEQ ID NO: 14 487). In some embodiments, the sequence encoding a first inverted terminal repeat (ITR) or the sequence encoding a second inverted terminal repeat (ITR) is recognized by a piggyBac transposase having the amino acid sequence of
[0458] 1 MGSSLDDEHI LSALLQSDDE LVGEDSDSEI SDHVSEDDVQ SDTEEAFIDE VHEVQPTSSG
[0459] 61 SEILDEQNVI EQPGSSLASN RILTLPQRTI RGKNKHCWST SKSTRRSRVS ALNIVRSQRG
[0460] 121 PTRMCRNIYD PLLCFKLFFT DEIISEIVKW TNAEISLKRR ESMTGATFRD TNEDEIYAFF
[0461] 181 GILVMTAVRK DNHMSTDDLF DRSLSMVYVS VMSRDRFDFL IRCLRMDDKS IRPTLRENDV
[0462] 241 FTPVRKIWDL FIHQCIQNYT PGAHLTIDEQ LLGFRGRCPF RMYIPNKPSK YGIKILMMCD
[0463] 301 SGTKYMINGM PYLGRGTQTN GVPLGEYYVK ELSKPVHGSC RNITCDNWFT SIPLAKNLLQ
[0464] 361 EPYKLTIVGT VRSNKREIPE VLKNSRSRPV GTSMFCFDGP LTLVSYKPKP AKMVYLLSSC
[0465] 421 DEDASINEST GKPQMVMYYN QTKGGVDTLD QMCSVMTCSR KTNRWPMALL YGMINIACIN
[0466] 481 SFIIYSHNVS SKGEKVQSRK KFMRNLYMSL TSSFMRKRLE APTLKRYLRD NISNILPNEV
[0467] 541 PGTSDDSTEE PVMKKRTYCT YCPSKIRRKA NASCKKCKKV ICREHNIDMC QSCF (SEQ ID NO: 14 4 87) In some embodiments, the sequence encoding a first inverted terminal repeat (ITR) or the sequence encoding a second inverted terminal repeat (ITR) is recognized by a piggyBac transposase having an amino acid sequence of at least 20% identity to the amino acid sequence of
[0468] 1 MGSSLDDEHI LSALLQSDDE LVGEDSDSEV SDHVSEDDVQ SDTEEAFIDE VHEVQPTSSG
[0469] 61 SEILDEQNVI EQPGSSLASN RILTLPQRTI RGKNKHCWST SKSTRRSRVS ALNIVRSQRG
[0470] 121 PTRMCRNIYD PLLCFKLFFT DEIISEIVKW TNAEISLKRR ESMTSATFRD TNEDEIYAFF
[0471] 181 GILVMTAVRK DNHMSTDDLF DRSLSMVYVS VMSRDRFDFL IRCLRMDDKS IRPTLRENDV
[0472] 241 FTPVRKIWDL FIHQCIQNYT PGAHLTIDEQ LLGFRGRCPF RVYIPNKPSK YGIKILMMCD
[0473] 301 SGTKYMINGM PYLGRGTQTN GVPLGEYYVK ELSKPVHGSC RNITCDNWFT SIPLAKNLLQ
[0474] 361 EPYKLTIVGT VRSNKREIPE VLKNSRSRPV GTSMFCFDGP LTLVSYKPKP AKMVYLLSSC
[0475] 421 DEDASINEST GKPQMVMYYN QTKGGVDTLD QMCSVMTCSR KTNRWPMALL YGMINIACIN
[0476] 481 SFIIYSHNVS SKGEKVQSRK KFMRNLYMSL TSSFMRKRLE APTLKRYLRD NISNILPKEV
[0477] 541 PGTSDDSTEE PVMKKRTYCT YCPSKIRRKA NASCKKCKKV ICREHNIDMC QSCF (SEQ ID NO: 14484).In some embodiments, the sequence encoding a first inverted terminal repeat (ITR) or the sequence encoding a second inverted terminal repeat (ITR) is recognized by a piggyBac transposase having the amino acid sequence of

(SEQ ID NO: 14484)

| | |
|---|---|
| 1 | MGSSLDDEHI LSALLQSDDE LVGEDSDSEV SDHVSEDDVQ |
| | SDTEEAFIDE VHEVQPTSSG |
| 61 | SEILDEQNVI EQPGSSLASN RILTLPQRTI RGKNKHCWST |
| | SKSTRRSRVS ALNIVRSQRG |
| 121 | PTRMCRNIYD PLLCFKLFFT DEIISEIVKW TNAEISLKRR |
| | ESMTSATFRD TNEDEIYAFF |
| 181 | GILVMTAVRK DNHMSTDDLF DRSLSMVYVS VMSRDRFDFL |
| | IRCLRMDDKS IRPTLRENDV |
| 241 | FTPVRKIWDL FIHQCIQNYT PGAHLTIDEQ LLGFRGRCPF |
| | RVYIPNKPSK YGIKILMMCD |
| 301 | SGTKYMINGM PYLGRGTQTN GVPLGEYYVK ELSKPVHGSC |
| | RNITCDNWFT SIPLAKNLLQ |
| 361 | EPYKLTIVGT VRSNKREIPE VLKNSRSRPV GTSMFCFDGP |
| | LTLVSYKPKP AKMVYLLSSC |
| 421 | DEDASINEST GKPQMVMYYN QTKGGVDTLD QMCSVMTCSR |
| | KTNRWPMALL YGMINIACIN |
| 481 | SFIIYSHNVS SKGEKVQSRK KFMRNLYMSL TSSFMRKRLE |
| | APTLKRYLRD NISNILPKEV |
| 541 | PGTSDDSTEE PVMKKRTYCT YCPSKIRRKA NASCKKCKKV |
| | ICREHNIDMC QSCF. |

[0478] In some embodiments of the nanotransposons of the disclosure, including those wherein the at least one exogenous sequence comprises one or more of an inducible proapoptotic polypeptide, a sequence encoding a selectable marker, and an exogenous sequence, the sequence encoding a first inverted terminal repeat (ITR) or the sequence encoding a second inverted terminal repeat (ITR) are recognized by a Sleeping Beauty transposase. In some embodiments, the Sleeping Beauty transposase is a hyperactive Sleeping Beauty transposase (SB100X).

[0479] In some embodiments of the nanotransposons of the disclosure, including those wherein the at least one exogenous sequence comprises one or more of an inducible proapoptotic polypeptide, a sequence encoding a selectable marker, and an exogenous sequence, the sequence encoding a first inverted terminal repeat (ITR) or the sequence encoding a second inverted terminal repeat (ITR) are recognized by a Helitron transposase.

[0480] In some embodiments of the nanotransposons of the disclosure, including those wherein the at least one exogenous sequence comprises one or more of an inducible proapoptotic polypeptide, a sequence encoding a selectable marker, and an exogenous sequence, the sequence encoding a first inverted terminal repeat (ITR) or the sequence encoding a second inverted terminal repeat (ITR) are recognized by a Tol2 transposase.

[0481] The disclosure provides a cell comprising a nanotransposon of the disclosure. In some embodiments, the cell further comprises a transposase composition. In some embodiments, the transposase composition comprises a transposase or a sequence encoding the transposase that is capable of recognizing the first ITR or the second ITR of the nanotransposon. In some embodiments, the transposase composition comprises a nanotransposon comprising the sequence encoding the transposase. In some embodiments, the cell comprises a first nanotransposon comprising an exogenous sequence and a second nanotransposon comprising a sequence encoding a transposase. In some embodiments, the cell is an allogeneic cell.

[0482] The disclosure provides a composition comprising the nanotransposon of the disclosure.

[0483] The disclosure provides a composition comprising the cell of the disclosure. In some embodiments, the cell comprises a nanotransposon of the disclosure. In some embodiments, the cell is not further modified. In some embodiments, the cell is allogeneic.

[0484] The disclosure provides a composition comprising the cell of the disclosure. In some embodiments, the cell comprises a nanotransposon of the disclosure. In some embodiments, the cell is not further modified. In some embodiments, the cell is autologous.

[0485] The disclosure provides a composition comprising a plurality of cells of the disclosure. In some embodiments, at least one cell of the plurality of cells comprises a nanotransposon of the disclosure. In some embodiments, a portion of the plurality of cells comprises a nanotransposon of the disclosure. In some embodiments, the portion comprises at least 1%, 2%, 5%, 10%, 15%, 20%, 25%, 30%, 35%, 40%, 45%, 50%, 55%, 60%, 65%, 70%, 75%, 80%, 85%, 90%, 95%, 97%, 99% or any percentage in between of the plurality of cells. In some embodiments, each cell of the plurality of cells comprises a nanotransposon of the disclosure. In some embodiments, the plurality of cells does not comprise a modified cell of the disclosure. In some embodiments, at least one cell of the plurality of cells is not further modified. In some embodiments, none of the plurality of cells is not further modified. In some embodiments, plurality of cells is allogeneic. In some embodiments, an allogeneic plurality of cells are produced according to the methods of the disclosure. In some embodiments, plurality of cells is autologous. In some embodiments, an autologous plurality of cells are produced according to the methods of the disclosure.

[0486] The disclosure provides a modified cell comprising: (a) a nanotransposon of the disclosure; (b) a sequence encoding an inducible proapoptotic polypeptide; and wherein the cell is a T cell, (c) a modification of an endogenous sequence encoding a T cell Receptor (TCR), wherein the modification reduces or eliminates a level of expression or activity of the TCR. In some embodiments, the cell further comprises: (d) a non-naturally occurring sequence comprising an HLA class I histocompatibility antigen, alpha chain E (HLA-E), and (e) a modification of an endogenous sequence encoding Beta-2-Microglobulin (B2M), wherein the modification reduces or eliminates a level of expression or activity of a major histocompatibility complex (MHC) class I (MHC-I).

[0487] The disclosure provides a modified cell comprising: (a) a nanotransposon of the disclosure; (b) a sequence encoding an inducible proapoptotic polypeptide; (c) a non-naturally occurring sequence comprising an HLA class I histocompatibility antigen, alpha chain E (HLA-E), and (e) a modification of an endogenous sequence encoding Beta-2-Microglobulin (B2M), wherein the modification reduces or eliminates a level of expression or activity of a major histocompatibility complex (MHC) class I (MHC-I).

[0488] In some embodiments of the modified cells of the disclosure, the non-naturally occurring sequence comprising a HLA-E further comprises a sequence encoding a B2M signal peptide. In some embodiments, the non-naturally occurring sequence comprising an HLA-E further comprises a linker, wherein the linker is positioned between the sequence encoding the sequence encoding a B2M polypeptide and the sequence encoding the HLA-E. In some embodiments, the non-naturally occurring sequence comprising an HLA-E further comprises a sequence encoding a peptide and a sequence encoding a B2M polypeptide. In some embodiments, the non-naturally occurring sequence comprising an HLA-E further comprises a first linker positioned between the sequence encoding the B2M signal peptide and the sequence encoding the peptide, and a second linker positioned between the sequence encoding the B2M polypeptide and the sequence encoding the HLA-E.

[0489] In some embodiments of the cells, unmodified cells and modified cells of the disclosure, the cell is a mammalian cell.

[0490] In some embodiments of the cells, unmodified cells and modified cells of the disclosure, the cell is a human cell.

[0491] In some embodiments of the cells, unmodified cells and modified cells of the disclosure, the cell is a stem cell.

[0492] In some embodiments of the cells, unmodified cells and modified cells of the disclosure, the cell is a differentiated cell.

[0493] In some embodiments of the cells, unmodified cells and modified cells of the disclosure, the cell is a somatic cell.

[0494] In some embodiments of the cells, unmodified cells and modified cells of the disclosure, the cell is an immune cell or an immune cell precursor. In some embodiments, the immune cell is a lymphoid progenitor cell, a natural killer (NK) cell, a cytokine induced killer (CIK) cell, a T lymphocyte (T cell), a B lymphocyte (B-cell) or an antigen presenting cell (APC). In some embodiments, the immune cell is a T cell, an early memory T cell, a stem cell-like T cell, a stem memory T cell (Tscm), or a central memory T cell (Tcm). In some embodiments, the immune cell precursor is a hematopoietic stem cell (HSC). In some embodiments, the cell is an antigen presenting cell (APC).

[0495] In some embodiments of the cells, unmodified cells and modified cells of the disclosure, the cell further comprises a gene editing composition. In some embodiments, the gene editing composition comprises a sequence encoding a DNA binding domain and a sequence encoding a nuclease protein or a nuclease domain thereof. In some embodiments, the gene editing composition comprises a sequence encoding a nuclease protein or a sequence encoding a nuclease domain thereof. In some embodiments, the e sequence encoding a nuclease protein or the sequence encoding a nuclease domain thereof comprises a DNA sequence, an RNA sequence, or a combination thereof. In some embodiments, the nuclease or the nuclease domain thereof comprises one or more of a CRISPR/Cas protein, a Transcription Activator-Like Effector Nuclease (TALEN), a Zinc Finger Nuclease (ZFN), and an endonuclease. In some embodiments, the CRISPR/Cas protein comprises a nuclease-inactivated Cas (dCas) protein.

[0496] In some embodiments of the cells, unmodified cells and modified cells of the disclosure, the cell further comprises a gene editing composition. In some embodiments, the gene editing composition comprises a sequence encoding a DNA binding domain and a sequence encoding a nuclease protein or a nuclease domain thereof. In some embodiments, the nuclease or the nuclease domain thereof comprises a nuclease-inactivated Cas (dCas) protein and an endonuclease. In some embodiments, the endonuclease comprises a Clo051 nuclease or a nuclease domain thereof. In some embodiments, the gene editing composition comprises a fusion protein. In some embodiments, the fusion protein comprises a nuclease-inactivated Cas9 (dCas9) protein and a Clo051 nuclease or a Clo051 nuclease domain. In some embodiments, the gene editing composition further comprises a guide sequence. In some embodiments, the guide sequence comprises an RNA sequence. In some embodiments, the fusion protein comprises or consists of the amino acid sequence: MAPKKKRKVEGIKSNISLLKDELRGQISHISHEYLSLIDLAFDSKQNRLFEMKVLELLVNEYGFKGRHLGGSRKPDG IVYSTTLEDNFGIIVDTKAYSEGYSLPISQADEMERYVRENSNRDEEVNPNKWWENFSEEVKKYYFVFISGSFKGKF EEQLRRLSMTTGVNGSAVNVVNLLLGAEKIRSGEMTIEELERAMFNNSEFILKYGGGGSDKKYSIGLAIGTNSVGWA VITDEYKVPSKKFKVLGNTDRHSIKKNLIGALLFDSGETAEATRLKRTARRRYTRRKNRICYLQEIFSNEMAKVDDS FFHRLEESFLVEEDKKHERHPIFGNIVDEVAYHEKYPTIYHLRKKLVDSTDKADLRLIYLALAHMIKFRGHFLIEGD LNPDNSDVDKLFIQLVQTYNQLFEENPINASGVDAKAILSARLSKSRRLENLIAQLPGEKKNGLFGNLIALSLGLTP NFKSNFDLAEDAKLQLSKDTYDDDLDNLLAQIGDQYADLFLAAKNLSDAILLSDILRVNTEITKAPLSASMIKRYDE HHQDLTLLKALVRQQLPEKYKEIFFDQSKNGYAGYIDGGASQEEFYKFIKPILEKMDGTEELLVKLNREDLLRKQRT FDNGSIPHQIHLGELHAILRRQEDFYPFLKDNREKIEKILTFRIPYYVGPLARGNSRFAWMTRKSEETITPWNFEEV VDKGASAQSFIERMTNFDKNLPNEKVLPKHSLLYEYFTVYNELTKVKYVTEGMRKPAFLSGEQKKAIVDLLFKTNRK VTVKQLKEDYFKKIECFDSVEISGVEDRFNASLGTYHDLLKIIKDKDFLDNEENEDILEDIVLTLTLFEDREMIEER LKTYAHLFDDKVMKQLKRRRYTGWGRLSRKLINGIRDKQSGKTILDFLKSDGFANRNFMQLIHDDSLTFKEDIQKAQ VSGQGDSLHEHIANLAGSPAIKKGILQTVKVVDELVKVMGRHKPENIVIEMARENQTTQKGQKNSRERMKRIEEGIK ELGSQILKEHPVENTQLQNEKLYLYYLQNGRDMYVDQELDINRLSDYDVDAIVPQSFLKDDSIDNKVLTRSDKNRGK SDNVPSEEVVKKMKNYWRQLLNAKLITQRKFDNLTKAERGGLSELDKAGFIKRQLVETRQITKHVAQILDSRMNTKY DENDKLIREVKVITLKSKLVSDFRKDFQFYKVREINNYHHAHDAYLNAVVGTALIKKYPKLESEFVYGDYKVYDVRK MIAKSEQEIGKATAKYFFYSNIMNFFKTEITLANGEIRKRPLIETNGETGEIVWDKGRDFATVRKVLSMPQVNIVKK TEVQTGGFSKESILPKRNSDKLIARKKDWDPKKYGGFDSPTVAYSVLVVAKVEKGKSKKLKSVKELLGITIMERSSF EKNPIDFLEAKGYKEVKKDLIIKLPKYSLFELENGRKRMLASAGELQKGNELALPSKYVNFLYLASHYEKLKGSPED NEQKQLFVEQHKHYLDEIIEQISEFSKRVILADANLDKVLSAYNKHRDKPIREQAENIIHLFTLTNLGAPAAFKYFD TTIDRKRYTSTKEVLDATLIHQSITGLYETRIDLSQLGGDGSPKKKRKVSS (SEQ ID NO: 17013) or a nucleic acid comprising or consisting of the sequence:
[0497] 1 atggcaccaa agaagaaaag aaaagtggag ggcatcaagt caaacatcag cctgctgaaa
[0498] 61 gacgaactgc ggggacagat tagtcacatc agtcacgagt acctgtcact gattgatctg
[0499] 121 gccttcgaca gcaagcagaa tagactgttt gagatgaaag tgctggaact gctggtcaac
[0500] 181 gagtatggct tcaagggcag acatctgggc gggtctagga aacctgacgg catcgtgtac
[0501] 241 agtaccacac tggaagacaa cttcggaatc attgtcgata ccaaggctta ttccgagggc
[0502] 301 tactctctgc caattagtca ggcagatgag atggaaaggt acgtgcgcga aaactcaaat
[0503] 361 agggacgagg aagtcaaccc caataagtgg tgggagaatt tcagcgagga agtgaagaaa
[0504] 421 tactacttcg tctttatctc aggcagcttc aaagggaagt ttgaggaaca gctgcggaga
[0505] 481 ctgtccatga ctaccggggt gaacggatct gctgtcaacg tggtcaatct gctgctgggc
[0506] 541 gcagaaaaga tcaggtccgg ggagatgaca attgaggaac tggaacgcgc catgttcaac
[0507] 601 aattctgagt ttatcctgaa gtatggaggc gggggaagcg ataagaaata ctccatcgga
[0508] 661 ctggccattg gcaccaattc cgtgggctgg gctgtcatca cagacgagta caaggtgcca
[0509] 721 agcaagaagt tcaaggtcct ggggaacacc gatcgccaca gtatcaagaa aaatctgatt
[0510] 781 ggagccctgc tgttcgactc aggcgagact gctgaagcaa cccgactgaa gcggactgct
[0511] 841 aggcgccgat atacccggag aaaaaatcgg atctgctacc tgcaggaaat tttcagcaac
[0512] 901 gagatggcca aggtggacga tagtttcttt caccgcctgg aggaatcatt cctggtggag
[0513] 961 gaagataaga aacacgagcg gcatcccatc tttggcaaca ttgtggacga agtcgcttat
[0514] 1021 cacgagaagt accctactat ctatcatctg aggaagaaac tggtggactc caccgataag
[0515] 1081 gcagacctgc gcctgatcta tctggccctg gctcacatga tcaagttccg ggggcatttt
[0516] 1141 ctgatcgagg gagatctgaa ccctgacaat tctgatgtgg acaagctgtt catccagctg
[0517] 1201 gtccagacat acaatcagct gtttgaggaa aacccaatta atgcctcagg cgtggacgca
[0518] 1261 aaggccatcc tgagcgccag actgtccaaa tctaggcgcc tggaaaacct gatcgctcag
[0519] 1321 ctgccaggag agaagaaaaa cggcctgttt gggaatctga ttgcactgtc cctgggcctg
[0520] 1381 acacccaact tcaagtctaa ttttgatctg gccgaggacg ctaagctgca gctgtccaaa
[0521] 1441 gacacttatg acgatgacct ggataacctg ctggctcaga tcggcgatca gtacgcagac
[0522] 1501 ctgttcctgg ccgctaagaa tctgagtgac gccatcctgc tgtcagatat tctgcgcgtg
[0523] 1561 aacacagaga ttactaaggc cccactgagt gcttcaatga tcaaaagata tgacgagcac
[0524] 1621 catcaggatc tgaccctgct gaaggctctg gtgaggcagc agctgcccga gaaatacaag
[0525] 1681 gaaatcttct ttgatcagag caagaatgga tacgccggct atattgacgg cggggcttcc
[0526] 1741 caggaggagt tctacaagtt catcaagccc attctggaaa agatggacgg caccgaggaa
[0527] 1801 ctgctggtga agctgaatcg ggaggacctg ctgagaaaac agaggacatt tgataacgga
[0528] 1861 agcatccctc accagattca tctgggcgaa ctgcacgcca tcctgcgacg gcaggaggac
[0529] 1921 ttctacccat ttctgaagga taaccgcgag aaaatcgaaa agatcctgac cttcagaatc
[0530] 1981 ccctactatg tggggcctct ggcacgggga aatagtagat ttgcctggat gacaagaaag
[0531] 2041 tcagaggaaa ctatcacccc ctggaacttc gaggaagtgg tcgataaagg cgctagcgca
[0532] 2101 cagtccttca ttgaaaggat gacaaatttt gacaagaacc tgccaaatga gaaggtgctg
[0533] 2161 cccaaacaca gcctgctgta cgaatatttc acagtgtata acgagctgac taaagtgaag
[0534] 2221 tacgtcaccg aagggatgcg caagcccgca ttcctgtccg gagagcagaa gaaagccatc
[0535] 2281 gtggacctgc tgtttaagac aaatcggaaa gtgactgtca aacagctgaa ggaagactat
[0536] 2341 ttcaagaaaa ttgagtgttt cgattcagtg gaaatcagcg gcgtcgagga caggtttaac
[0537] 2401 gcctccctgg ggacctacca cgatctgctg aagatcatca aggataagga cttcctggac
[0538] 2461 aacgaggaaa atgaggacat cctggaggac attgtgctga cactgactct gtttgaggat
[0539] 2521 cgcgaaatga tcgaggaacg actgaagact tatgcccatc tgttcgatga caaagtgatg
[0540] 2581 aagcagctga aaagaaggcg ctacaccgga tggggacgcc tgagccgaaa actgatcaat
[0541] 2641 gggattagag acaagcagag cggaaaaact atcctggact ttctgaagtc cgatggcttc
[0542] 2701 gccaacagga acttcatgca gctgattcac gatgactctc tgaccttcaa ggaggacatc
[0543] 2761 cagaaagcac aggtgtctgg ccagggggac agtctgcacg agcatatcgc aaacctggcc
[0544] 2821 ggcagccccg ccatcaagaa agggattctg cagaccgtga aggtggtgga cgaactggtc
[0545] 2881 aaggtcatgg gacgacacaa acctgagaac atcgtgattg agatggcccg cgaaaatcag
[0546] 2941 acaactcaga agggccagaa aaacagtcga gaacggatga agagaatcga ggaaggcatc
[0547] 3001 aaggagctgg ggtcacagat cctgaaggag catcctgtgg aaaacactca gctgcagaat
[0548] 3061 gagaaactgt atctgtacta tctgcagaat ggacgggata tgtacgtgga ccaggagctg
[0549] 3121 gatattaaca gactgagtga ttatgacgtg gatgccatcg tccctcagag cttcctgaag
[0550] 3181 gatgactcca ttgacaacaa ggtgctgacc aggtccgaca agaaccgcgg caaatcagat
[0551] 3241 aatgtgccaa gcgaggaagt ggtcaagaaa atgaagaact actggaggca gctgctgaat
[0552] 3301 gccaagctga tcacacagcg gaaatttgat aacctgacta aggcagaaag aggaggcctg
[0553] 3361 tctgagctgg acaaggccgg cttcatcaag cggcagctgg tggagacaag acagatcact
[0554] 3421 aagcacgtcg ctcagattct ggatagcaga atgaacacaa agtacgatga aaacgacaag
[0555] 3481 ctgatcaggg aggtgaaagt cattactctg aaatccaagc tggtgtctga ctttagaaag
[0556] 3541 gatttccagt tttataaagt cagggagatc aacaactacc accatgctca tgacgcatac
[0557] 3601 ctgaacgcag tggtcgggac cgccctgatt aagaaatacc ccaagctgga gtccgagttc
[0558] 3661 gtgtacggag actataaagt gtacgatgtc cggaagatga tcgccaaatc tgagcaggaa
[0559] 3721 attggcaagg ccaccgctaa gtatttcttt tacagtaaca tcatgaattt ctttaagacc
[0560] 3781 gaaatcacac tggcaaatgg ggagatcaga aaaaggcctc tgattgagac caacggggag
[0561] 3841 acaggagaaa tcgtgtggga caagggaagg gattttgcta ccgtgcgcaa agtcctgtcc
[0562] 3901 atgccccaag tgaatattgt caagaaaact gaagtgcaga ccgggggatt ctctaaggag
[0563] 3961 agtattctgc ctaagcgaaa ctctgataaa ctgatcgccc ggaagaaaga ctgggacccc
[0564] 4021 aagaagtatg gcgggttcga ctctccaaca gtggcttaca gtgtcctggt ggtcgcaaag
[0565] 4081 gtggaaaagg ggaagtccaa gaaactgaag tctgtcaaag agctgctggg aatcactatt
[0566] 4141 atggaacgca gctccttcga gaagaatcct atcgattttc tggaagccaa gggctataaa
[0567] 4201 gaggtgaaga aagacctgat cattaagctg ccaaaatact cactgtttga gctggaaaac
[0568] 4261 ggacgaaagc gaatgctggc aagcgccgga gaactgcaga agggcaatga gctggccctg
[0569] 4321 ccctccaaat acgtgaactt cctgtatctg gctagccact acgagaaact gaaggggtcc
[0570] 4381 cctgaggata acgaacagaa gcagctgttt gtggagcagc acaaacatta tctggacgag
[0571] 4441 atcattgaac agatttcaga gttcagcaag agagtgatcc tggctgacgc aaatctggat
[0572] 4501 aaagtcctga gcgcatacaa caagcaccga gacaaaccaa tccgggagca ggccgaaaat
[0573] 4561 atcattcatc tgttcaccct gacaaacctg ggcgcccctg cagccttcaa gtattttgac
[0574] 4621 accacaatcg atcggaagag atacacttct accaaagagg tgctggatgc taccctgatc
[0575] 4681 caccagagta ttaccggcct gtatgagaca cgcatcgacc tgtcacagct gggaggcgat
[0576] 4741 gggagcccca agaaaaagcg gaaggtgtct agttaa (SEQ ID NO: 17014).n some embodiments, the fusion protein comprises or consists of the amino acid sequence:
[0577] 1 MPKKKRKVEG IKSNISLLKD ELRGQISHIS HEYLSLIDLA FDSKQNRLFE MKVLELLVNE
[0578] 61 YGFKGRHLGG SRKPDGIVYS TTLEDNFGII VDTKAYSEGY SLPISQADEM ERYVRENSNR
[0579] 121 DEEVNPNKWW ENFSEEVKKY YFVFISGSFK GKFEEQLRRL SMTTGVNGSA VNVVNLLLGA
[0580] 181 EKIRSGEMTI EELERAMFNN SEFILKYGGG GSDKKYSIGL AIGTNSVGWA VITDEYKVPS
[0581] 241 KKFKVLGNTD RHSIKKNLIG ALLFDSGETA EATRLKRTAR RRYTRRKNRI CYLQEIFSNE
[0582] 301 MAKVDDSFFH RLEESFLVEE DKKHERHPIF GNIVDEVAYH EKYPTIYHLR KKLVDSTDKA
[0583] 361 DLRLIYLALA HMIKFRGHFL IEGDLNPDNS DVDKLFIQLV QTYNQLFEEN PINASGVDAK
[0584] 421 AILSARLSKS RRLENLIAQL PGEKKNGLFG NLIALSLGLT PNFKSNFDLA EDAKLQLSKD
[0585] 481 TYDDDLDNLL AQIGDQYADL FLAAKNLSDA ILLSDILRVN TEITKAPLSA SMIKRYDEHH
[0586] 541 QDLTLLKALV RQQLPEKYKE IFFDQSKNGY AGYIDGGASQ EEFYKFIKPI LEKMDGTEEL
[0587] 601 LVKLNREDLL RKQRTFDNGS IPHQIHLGEL HAILRRQEDF YPFLKDNREK IEKILTFRIP
[0588] 661 YYVGPLARGN SRFAWMTRKS EETITPWNFE EVVDKGASAQ SFIERMTNFD KNLPNEKVLP
[0589] 721 KHSLLYEYFT VYNELTKVKY VTEGMRKPAF LSGEQKKAIV DLLFKTNRKV TVKQLKEDYF
[0590] 781 KKIECFDSVE ISGVEDRFNA SLGTYHDLLK IIKDKDFLDN EENEDILEDI VLTLTLFEDR
[0591] 841 EMIEERLKTY AHLFDDKVMK QLKRRRYTGW GRLSRKLING IRDKQSGKTI LDFLKSDGFA
[0592] 901 NRNFMQLIHD DSLTFKEDIQ KAQVSGQGDS LHEHIANLAG SPAIKKGILQ TVKVVDELVK
[0593] 961 VMGRHKPENI VIEMARENQT TQKGQKNSRE RMKRIEEGIK ELGSQILKEH PVENTQLQNE
[0594] 1021 KLYLYYLQNG RDMYVDQELD INRLSDYDVD AIVPQSFLKD DSIDNKVLTR SDKNRGKSDN
[0595] 1081 VPSEEVVKKM KNYWRQLLNA KLITQRKFDN LTKAERGGLS ELDKAGFIKR QLVETRQITK
[0596] 1141 HVAQILDSRM NTKYDENDKL IREVKVITLK SKLVSDFRKD FQFYKVREIN NYHHAHDAYL
[0597] 1201 NAVVGTALIK KYPKLESEFV YGDYKVYDVR KMIAKSEQEI GKATAKYFFY SNIMNFFKTE
[0598] 1261 ITLANGEIRK RPLIETNGET GEIVWDKGRD FATVRKVLSM PQVNIVKKTE VQTGGFSKES
[0599] 1321 ILPKRNSDKL IARKKDWDPK KYGGFDSPTV AYSVLVVAKV EKGKSKKLKS VKELLGITIM
[0600] 1381 ERSSFEKNPI DFLEAKGYKE VKKDLIIKLP KYSLFELENG RKRMLASAGE LQKGNELALP
[0601] 1441 SKYVNFLYLA SHYEKLKGSP EDNEQKQLFV EQHKHYLDEI IEQISEFSKR VILADANLDK
[0602] 1501 VLSAYNKHRD KPIREQAENI IHLFTLTNLG APAAFKYFDT TIDRKRYTST KEVLDATLIH
[0603] 1561 QSITGLYETR IDLSQLGGDG SPKKKRKV ((SEQ ID NO: 17058) or anucleic acid comprising or consisting of the sequence:

(SEQ ID NO: 17059)

| | |
|---|---|
| 1 | atgcctaaga agaagcggaa ggtggaaggc atcaaaagca |
| | acatctccct cctgaaagac |
| 61 | gaactccggg ggcagattag ccacattagt cacgaatacc |
| | tctccctcat cgacctggct |
| 121 | ttcgatagca agcagaacag gctctttgag atgaaagtgc |
| | tggaactgct cgtcaatgag |
| 181 | tacgggttca agggtcgaca cctcggcgga tctaggaaac |
| | cagacggcat cgtgtatagt |
| 241 | accacactgg aagacaactt tgggatcatt gtggatacca |
| | aggcatactc tgagggttat |
| 301 | agtctgccca tttcacaggc cgacgagatg gaacggtacg |
| | tgcgcgagaa ctcaaataga |
| 361 | gatgaggaag tcaaccctaa caagtggtgg gagaacttct |
| | ctgaggaagt gaagaaatac |
| 421 | tacttcgtct ttatcagcgg gtccttcaag ggtaaatttg |
| | aggaacagct caggagactg |
| 481 | agcatgacta ccggcgtgaa tggcagcgcc gtcaacgtgg |
| | tcaatctgct cctgggcgct |
| 541 | gaaaagattc ggagcggaga gatgaccatc gaagagctgg |
| | agagggcaat gtttaataat |
| 601 | agcgagttta tcctgaaata cggtggcggt ggatccgata |
| | aaaagtattc tattggttta |
| 661 | gccatcggca ctaattccgt tggatgggct gtcataaccg |
| | atgaatacaa agtaccttca |
| 721 | aagaaattta aggtgttggg gaacacagac cgtcattcga |
| | ttaaaaagaa tcttatcggt |
| 781 | gccctcctat tcgatagtgg cgaaacggca gaggcgactc |
| | gcctgaaacg aaccgctcgg |
| 841 | agaaggtata cacgtcgcaa gaaccgaata tgttacttac |
| | aagaaatttt tagcaatgag |
| 901 | atggccaaag ttgacgattc tttctttcac cgtttggaag |
| | agtccttcct tgtcgaagag |
| 961 | gacaagaaac atgaacggca ccccatcttt ggaaacatag |
| | tagatgaggt ggcatatcat |
| 1021 | gaaaagtacc caacgattta tcacctcaga aaaaagctag |
| | ttgactcaac tgataaagcg |
| 1081 | gacctgaggt taatctactt ggctcttgcc catatgataa |
| | agttccgtgg gcactttctc |
| 1141 | attgagggtg atctaaatcc ggacaactcg gatgtcgaca |
| | aactgttcat ccagttagta |
| 1201 | caaacctata atcagttgtt tgaagagaac cctataaatg |
| | caagtggcgt ggatgcgaag |
| 1261 | gctattctta gcgcccgcct ctctaaatcc cgacggctag |
| | aaaacctgat cgcacaatta |
| 1321 | cccggagaga agaaaaatgg gttgttcggt aaccttatag |
| | cgctctcact aggcctgaca |
| 1381 | ccaaatttta agtcgaactt cgacttagct gaagatgcca |
| | aattgcagct tagtaaggac |
| 1441 | acgtacgatg acgatctcga caatctactg gcacaaattg |
| | gagatcagta tgcggactta |
| 1501 | tttttggctg ccaaaaacct tagcgatgca atcctcctat |
| | ctgacatact gagagttaat |
| 1561 | actgagatta ccaaggcgcc gttatccgct tcaatgatca |
| | aaaggtacga tgaacatcac |
| 1621 | caagacttga cacttctcaa ggccctagtc cgtcagcaac |
| | tgcctgagaa atataaggaa |
| 1681 | atattctttg atcagtcgaa aaacgggtac gcaggttata |
| | ttgacggcgg agcgagtcaa |
| 1741 | gaggaattct acaagtttat caaacccata ttagagaaga |
| | tggatgggac ggaagagttg |
| 1801 | cttgtaaaac tcaatcgcga agatctactg cgaaagcagc |
| | ggactttcga caacggtagc |
| 1861 | attccacatc aaatccactt aggcgaattg catgctatac |
| | ttagaaggca ggaggatttt |
| 1921 | tatccgttcc tcaaagacaa tcgtgaaaag attgagaaaa |
| | tcctaacctt tcgcatacct |
| 1981 | tactatgtgg gacccctggc ccgagggaac tctcggttcg |
| | catggatgac aagaaagtcc |
| 2041 | gaagaaacga ttactccatg gaattttgag gaagttgtcg |
| | ataaaggtgc gtcagctcaa |
| 2101 | tcgttcatcg agaggatgac caactttgac aagaatttac |
| | cgaacgaaaa agtattgcct |
| 2161 | aagcacagtt tactttacga gtatttcaca gtgtacaatg |
| | aactcacgaa agttaagtat |
| 2221 | gtcactgagg gcatgcgtaa acccgccttt ctaagcggag |
| | aacagaagaa agcaatagta |
| 2281 | gatctgttat tcaagaccaa ccgcaaagtg acagttaagc |
| | aattgaaaga ggactacttt |
| 2341 | aagaaaattg aatgcttcga ttctgtcgag atctccgggg |
| | tagaagatcg atttaatgcg |
| 2401 | tcacttggta cgtatcatga cctcctaaag ataattaaag |
| | ataaggactt cctggataac |
| 2461 | gaagagaatg aagatatctt agaagatata gtgttgactc |
| | ttaccctctt tgaagatcgg |
| 2521 | gaaatgattg aggaaagact aaaaacatac gctcacctgt |
| | tcgacgataa ggttatgaaa |
| 2581 | cagttaaaga ggcgtcgcta tacgggctgg ggacgattgt |
| | cgcggaaact tatcaacggg |
| 2641 | ataagagaca agcaaagtgg taaaactatt ctcgattttc |
| | taaagagcga cggcttcgcc |
| 2701 | aataggaact ttatgcagct gatccatgat gactctttaa |
| | ccttcaaaga ggatatacaa |
| 2761 | aaggcacagg tttccggaca aggggactca ttgcacgaac |
| | atattgcgaa tcttgctggt |
| 2821 | tcgccagcca tcaaaaaggg catactccag acagtcaaag |
| | tagtggatga gctagttaag |
| 2881 | gtcatgggac gtcacaaacc ggaaaacatt gtaatcgaga |
| | tggcacgcga aaatcaaacg |
| 2941 | actcagaagg ggcaaaaaaa cagtcgagag cggatgaaga |
| | gaatagaaga gggtattaaa |
| 3001 | gaactgggca gccagatctt aaaggagcat cctgtggaaa |
| | atacccaatt gcagaacgag |
| 3061 | aaactttacc tctattacct acaaaatgga agggacatgt |
| | atgttgatca ggaactggac |
| 3121 | ataaaccgtt tatctgatta cgacgtcgat gccattgtac |
| | cccaatcctt tttgaaggac |
| 3181 | gattcaatcg acaataaagt gcttacacgc tcggataaga |
| | accgagggaa aagtgacaat |
| 3241 | gttccaagcg aggaagtcgt aaagaaaatg aagaactatt |
| | ggcggcagct cctaaatgcg |
| 3301 | aaactgataa cgcaaagaaa gttcgataac ttaactaaag |
| | ctgagagggg tggcttgtct |
| 3361 | gaacttgaca aggccggatt tattaaacgt cagctcgtgg |
| | aaacccgcca aatcacaaag |
| 3421 | catgttgcac agatactaga ttcccgaatg aatacgaaat |
| | acgacgagaa cgataagctg |
| 3481 | attcgggaag tcaaagtaat cactttaaag tcaaaattgg |
| | tgtcggactt cagaaaggat |
| 3541 | tttcaattct ataaagttag ggagataaat aactaccacc |
| | atgcgcacga cgcttatctt |
| 3601 | aatgccgtcg tagggaccgc actcattaag aaatacccga |
| | agctagaaag tgagtttgtg |
| 3661 | tatggtgatt acaaagttta tgacgtccgt aagatgatcg |
| | cgaaaagcga acaggagata |
| 3721 | ggcaaggcta cagccaaata cttcttttat tctaacatta |
| | tgaatttctt taagacggaa |
| 3781 | atcactctgg caaacggaga gatacgcaaa cgacctttaa |
| | ttgaaaccaa tggggagaca |
| 3841 | ggtgaaatcg tatgggataa gggccgggac ttcgcgacgg |
| | tgagaaaagt tttgtccatg |
| 3901 | ccccaagtca acatagtaaa gaaaactgag gtgcagaccg |
| | gagggttttc aaaggaatcg |
| 3961 | attcttccaa aaaggaatag tgataagctc atcgctcgta |
| | aaaaggactg ggacccgaaa |
| 4021 | aagtacggtg gcttcgatag ccctacagtt gcctattctg |
| | tcctagtagt ggcaaaagtt |
| 4081 | gagaagggaa aatccaagaa actgaagtca gtcaaagaat |
| | tattggggat aacgattatg |
| 4141 | gagcgctcgt cttttgaaaa gaaccccatc gacttccttg |
| | aggcgaaagg ttacaaggaa |
| 4201 | gtaaaaaagg atctcataat taaactacca aagtatagtc |
| | tgtttgagtt agaaaatggc |
| 4261 | cgaaaacgga tgttggctag cgccggagag cttcaaaagg |
| | ggaacgaact cgcactaccg |
| 4321 | tctaaatacg tgaatttcct gtatttagcg tcccattacg |
| | agaagttgaa aggttcacct |
| 4381 | gaagataacg aacagaagca actttttgtt gagcagcaca |
| | aacattatct cgacgaaatc |
| 4441 | atagagcaaa tttcggaatt cagtaagaga gtcatcctag |
| | ctgatgccaa tctggacaaa |
| 4501 | gtattaagcg catacaacaa gcacagggat aaacccatac |
| | gtgagcaggc ggaaaatatt |
| 4561 | atccatttgt ttactcttac caacctcggc gctccagccg |
| | cattcaagta ttttgacaca |
| 4621 | acgatagatc gcaaacgata cacttctacc aaggaggtgc |
| | tagacgcgac actgattcac |
| 4681 | caatccatca cgggattata tgaaactcgg atagatttgt |
| | cacagcttgg gggtgacgga |
| 4741 | tcccccaaga agaagaggaa agtctga. |

[0604] In some embodiments of the cells, unmodified cells and modified cells of the disclosure, a nanotransposon comprises the gene editing composition comprising a guide sequence and a sequence encoding a fusion protein comprising a sequence encoding an inactivated Cas9 (dCas9) and a sequence encoding a Clo051 nuclease or a nuclease domain thereof.

[0605] In some embodiments of the cells, unmodified cells and modified cells of the disclosure, the cell expresses the gene editing composition transiently.

[0606] In some embodiments of the cells, unmodified cells and modified cells of the disclosure, the cell is a T cell and the guide RNA comprises a sequence complementary to a target sequence encoding an endogenous TCR. In some embodiments, the guide RNA comprises a sequence complementary to a target sequence encoding a B2M polypeptide.

[0607] In some embodiments of the cells, unmodified cells and modified cells of the disclosure, the guide RNA comprises a sequence complementary to a target sequence within a safe harbor site of a genomic DNA sequence.

[0608] In some embodiments of the cells, unmodified cells and modified cells of the disclosure, the Clo051 nuclease or a nuclease domain thereof induces a single or double strand break in a target sequence. In some embodiments, a donor sequence, a donor plasmid, or a donor nanotransposon intra-ITR sequence integrated at a position of single or double strand break and/or at a position of cellular repair within a target sequence.

[0609] The disclosure provides a composition comprising a modified cell according to the disclosure. In some embodiments, the composition further comprises a pharmaceutically-acceptable carrier.

[0610] The disclosure provides a composition comprising a plurality of modified cells according to the disclosure. In some embodiments, the composition further comprises a pharmaceutically-acceptable carrier.

[0611] The disclosure provides a composition of the disclosure for use in the treatment of a disease or disorder.

[0612] The disclosure provides the use of a composition of the disclosure for the treatment of a disease or disorder.

[0613] The disclosure provides a method of treating a disease or disorder comprising administering to a subject in need thereof a therapeutically-effective amount of a composition of the disclosure. In some embodiments, the subject does not develop graft vs. host (GvH) and/or host vs. graft (HvG) following administration of the composition. In some embodiments, the administration is systemic. In some embodiments, the composition is administered by an intravenous route. In some embodiments, the composition is administered by an intravenous injection or an intravenous infusion.

[0614] The disclosure provides a method of treating a disease or disorder comprising administering to a subject in need thereof a therapeutically-effective amount of a composition of the disclosure. In some embodiments, the subject does not develop graft vs. host (GvH) and/or host vs. graft (HvG) following administration of the composition. In some embodiments, the administration is local. In some embodiments, the composition is administered by an intra-tumoral route, an intraspinal route, an intracerebroventricular route, an intraocular route or an intraosseous route. In some embodiments, the composition is administered by an intra-tumoral injection or infusion, an intraspinal injection or infusion, an intracerebroventricular injection or infusion, an intraocular injection or infusion or an intraosseous injection or infusion.

[0615] In some embodiments of the methods of treating a disease or disorder of the disclosure, the therapeutically effective dose is a single dose and wherein the allogeneic cells of the composition engraft and/or persist for a sufficient time to treat the disease or disorder. In some embodiments, the single dose is one of at least 2, 5, 10, 15, 20, 25, 30, 35, 40, 45, 50, 55, 60, 65, 70, 75, 80, 85, 90, 95, 100 or any number of doses in between that are manufactured simultaneously.

[0616] In some embodiments of the methods of treating a disease or disorder of the disclosure, the therapeutically effective dose is a single dose and wherein the autologous cells of the composition engraft and/or persist for a sufficient time to treat the disease or disorder. In some embodiments, the single dose is one of at least 2, 5, 10, 15, 20, 25, 30, 35, 40, 45, 50, 55, 60, 65, 70, 75, 80, 85, 90, 95, 100 or any number of doses in between that are manufactured simultaneously.

[0617] In some embodiments of the composition and methods of the disclosure, allogeneic cells are stem cells. In some embodiments, allogeneic cells are derived from stem cells. Exemplary stem cells include, but are not limited to, embryonic stem cells, adult stem cells, induced pluripotent stem cells (iPSCs), multipotent stem cells, pluripotent stem cells, and hematopoetic stem cells (HSCs).

[0618] In some embodiments of the composition and methods of the disclosure, allogeneic cells are differentiated somatic cells.

[0619] In some embodiments of the composition and methods of the disclosure, allogeneic cells are immune cells. In some embodiments, allogeneic cells are T lymphocytes (T cells). In some embodiments, allogeneic cells are T cells that do not express one or more components of a naturally-occurring T-cell Receptor (TCR). In some embodiments, allogeneic cells are T cells that express a non-naturally occurring antigen receptor. Alternatively, or in addition, in some embodiments, allogeneic cells are T cells that express a non-naturally occurring Chimeric Stimulatory Receptor (CSR). In some embodiments, the non-naturally occurring CSR comprises or consists of a switch receptor. In some embodiments, the switch receptor comprises an extracellular domain, a transmembrane domain, and an intracellular domain. In some embodiments, the extracellular domain of the switch receptor binds to a TCR co-stimulatory molecule and transduces a signal to the intracellular space of the allogeneic cell that recapitulates TCR signaling or TCR co-stimulatory signaling.

### Chimeric Stimulatory Receptors (CSRs)

[0620] Adoptive cell compositions that are “universally” safe for administration to any patient requires a significant reduction or elimination of alloreactivity.

[0621] Towards this end, allogeneic cells of the disclosure are modified to interrupt expression or function of a T-cell Receptor (TCR) and/or a class of Major Histocompatibility Complex (MHC). The TCR mediates graft vs host (GvH) reactions whereas the MHC mediates host vs graft (HvG) reactions. In preferred embodiments, any expression and/or function of the TCR is eliminated in allogeneic cells of the disclosure to prevent T-cell mediated GvH that could cause death to the subject. Thus, in particularly preferred embodiments, the disclosure provides a pure TCR-negative allogeneic T-cell composition (e.g. each cell of the composition expresses at a level so low as to either be undetectable or non-existent).

[0622] In preferred embodiments, expression and/or function of MHC class I (MHC-I, specifically, HLA-A, HLA-B, and HLA-C) is reduced or eliminated in allogeneic cells of the disclosure to prevent HvG and, consequently, to improve engraftment of allogeneic cells of the disclosure in a subject. Improved engraftment of the allogeneic cells of the disclosure results in longer persistence of the cells, and, therefore, a larger therapeutic window for the subject. Specifically, in the allogeneic cells of the disclosure, expression and/or function of a structural element of MHC-I, Beta-2-Microglobulin (B2M), is reduced or eliminated in allogeneic cells of the disclosure.

[0623] The above strategies for generating an allogeneic cell of the disclosure induce further challenges. T Cell Receptor (TCR) knockout (KO) in T cells results in loss of expression of CD3-zeta (CD3z or CD3ξ), which is part of the TCR complex. The loss of CD3ξ in TCR-KO T-cells dramatically reduces the ability of optimally activating and expanding these cells using standard stimulation/activation reagents, including, but not limited to, agonist anti-CD3 mAb. When the expression or function of any one component of the TCR complex is interrupted, all components of the complex are lost, including TCR-alpha (TCRa), TCR-beta (TCRO), CD3-gamma (CD3γ), CD3-epsilon (CD3F), CD3-delta (CD3δ), and CD3-zeta (CD3ξ). Both CD3F and CD3ξ are required for T cell activation and expansion. Agonist anti-CD3 mAbs typically recognize CD3F and possibly another protein within the complex which, in turn, signals to CD3ξ. CD3ξ provides the primary stimulus for T cell activation (along with a secondary co-stimulatory signal) for optimal activation and expansion. Under normal conditions, full T-cell activation depends on the engagement of the TCR in conjunction with a second signal mediated by one or more co-stimulatory receptors (e.g. CD28, CD2, 4-1BBL, etc.,) that boost the immune response. However, when the TCR is not present, T cell expansion is severely reduced when stimulated using standard activation/stimulation reagents, including agonist anti-CD3 mAb. In fact, T cell expansion is reduced to only 20-40% of the normal level of expansion when stimulated using standard activation/stimulation reagents, including agonist anti-CD3 mAb.

[0624] The disclosure provides a Chimeric Stimulatory Receptor (CSR) to deliver CD3z primary stimulation to allogeneic T cells in the absence of an endogenous TCR (and, consequently, an endogenous CD3ξ) when stimulated using standard activation/stimulation reagents, including agonist anti-CD3 mAb.

[0625] In the absence of an endogenous TCR, Chimeric Stimulatory Receptors (CSRs) of the disclosure provide a CD3ξ stimulus to enhance activation and expansion of allogeneic T cells. In other words, in the absence of an endogenous TCR, Chimeric Stimulatory Receptors (CSRs) of the disclosure rescue the allogeneic cell from an activation-based disadvantage when compared to non-allogeneic T-cells that express an endogenous TCR. In some embodiments, CSRs of the disclosure comprise an agonist mAb epitope extracellularly and a CD3ξ stimulatory domain intracellularly and, functionally, convert an anti-CD28 or anti-CD2 binding event on the surface into a CD3z signaling event in an allogeneic T cell modified to express the CSR. In some embodiments, a CSR comprises a wild type CD28 or CD2 protein and a CD3z intracellular stimulation domain, to produce CD28z CSR and CD2z CSR, respectively. In preferred embodiments, CD28z CSR and/or CD2z CSR further express a non-naturally occurring antigen receptor and/or a therapeutic protein. In preferred embodiments, the non-naturally occurring antigen receptor comprises a Chimeric Antigen Receptor.

[0626] The data provided herein demonstrate that modified allogeneic T cells of the disclosure comprising/expressing a CSR of the disclosure improve or rescue, the expansion of allogeneic T cells that no longer express endogenous TCR when compared to those cells that do not comprise/express a CSR of the disclosure.

### Endogenous TCR Knock-Out

[0627] Gene editing compositions of the disclosure, including but not limited to, RNA-guided fusion proteins comprising dCas9-Clo051, may be used to target and decrease or eliminate expression of an endogenous T-cell receptor of an allogeneic cell of the disclosure. In preferred embodiments, the gene editing compositions of the disclosure target and delete a gene, a portion of a gene, or a regulatory element of a gene (such as a promoter) encoding an endogenous T-cell receptor of an allogeneic cell of the disclosure.

[0628] Nonlimiting examples of primers (including a T7 promoter, genome target sequence, and gRNA scaffold) for the generation of guide RNA (gRNA) templates for targeting and deleting TCR-alpha (TCR-α) are provided in Table 10.

TABLE 10
Target sequences underlined

| | | SEQ ID |
|---|---|---|
| Name | Sequence | NO: |
| TCRa- | TAATACGACTCACTATA | 16821 |
| gRNA- | GCTGGTACACGGCAGGG | |
| WT1 | TCAGTTTTAGAGCTAGA | |
| | AATAG | |
| TCRa- | TAATACGACTCACTATA | 16822 |
| gRNA- | GAGAATCAAAATCGGTG | |
| WT2 | AAT | |
| TCRa- | | 16823 |
| gRNA-- | TAATACGACTCACTATA | |
| WT4 | GTGCTAGACATGAGGTC | |
| | TA | |
| TCRa- | TAATACGACTCACTATA | 16824 |
| gRNA- | GGCTGGTACACGGCAGG | |
| WT1-2G | GTCA | |
| TCRa- | TAATACGACTCACTATA | 16825 |
| gRNA- | GAGAATCAAAATCGGTG | |
| WT2 | AATGTTTTAGAGCTAGA | |
| | AATAG | |
| TCRa- | | |
| gRNA- | TAATACGACTCACTATA | |
| WT3 | GGATTTAGAGTCTCTCA | 16826 |
| | GCGTTTTAGAGCTAGAA | |
| | ATAG | |
| TCRa- | TAATACGACTCACTATA | 16827 |
| gRNA- | GTGCTAGACATGAGGTC | |
| WT4 | TAGTTTTAGAGCTAGAA | |
| | ATAG | |
| TCRa- | TAATACGACTCACTATA | 16828 |
| gRNA- | GACACCTTCTTCCCCAG | |
| WT5 | CCCGTTTTAGAGCTAGA | |
| | AATAG | |
| TCRa- | TAATACGACTCACTATA | 16829 |
| gRNA- | gtggaataatgctgttg | |
| NG1- | ttgaGTTTTAGAGCTAG | |
| L | AAATAG | |
| TCRa- | TAATACGACTCACTATA | 16830 |
| gRNA- | gcatcacaggaactttc | |
| NG2- | taaaGTTTTAGAGCTAG | |
| L | AAATAG | |
| TCRa- | TAATACGACTCACTATA | 16831 |
| gRNA- | gtaaaaccaagaggcca | |
| NG3- | cagGTTTTAGAGCTAGA | |
| L | AATAG | |
| TCRa- | TAATACGACTCACTATA | 16832 |
| gRNA- | gacccggccactttcag | |
| NG4- | gaggGTTTTAGAGCTAG | |
| L | AAATAG | |
| TCRa- | TAATACGACTCACTATA | 16833 |
| gRNA- | gattaaacccggccact | |
| NGS- | ttcGTTTTAGAGCTAGA | |
| L | AATAG | |
| TCRa- | TAATACGACTCACTATA | 16834 |
| gRNA- | gagcccaggtaagggca | |
| NG1- | gcttGTTTTAGAGCTAG | |
| R | AAATAG | |
| TCRa- | TAATACGACTCACTATA | 16835 |
| gRNA- | gagctttgaaacaggta | |
| NG2- | agacGTTTTAGAGCTAG | |
| 1-R | AAATAG | |
| TCRa- | TAATACGACTCACTATA | 16836 |
| gRNA- | gctttgaaacaggtaag | |
| NG2- | acaGTTTTAGAGCTAGA | |
| 2-R | AATAG | |
| TCRa- | TAATACGACTCACTATA | 16837 |
| gRNA- | gtttcaaaacctgtcag | |
| NG3-R | tgatGTTTTAGAGCTAG | |
| | AAATAG | |
| TCRa- | TAATACGACTCACTATA | 16838 |
| gRNA- | gctgcggctgtggtcca | |
| NG4-R | gctgGTTTTAGAGCTAG | |
| | AAATAG | |
| TCRa- | TAATACGACTCACTATA | 16839 |
| gRNA- | gctgtggtccagctgag | |
| NG5- | gtgGTTTTAGAGCTAGA | |
| 1-R | AATAG | |
| TCRa- | TAATACGACTCACTATA | 16840 |
| gRNA- | gctgtggtccagctgag | |
| NG5- | gtgaGTTTTAGAGCTAG | |
| 2-R | AAATAG | |
| TCRa- | TAATACGACTCACTATA | 16841 |
| gRNA- | gtgtggtccagctgagg | |
| NG5- | tgagGTTTTAGAGCTAG | |
| 3-R | AAATAG | |
| TCRa- | TAATACGACTCACTATA | 16842 |
| gRNA- | gtgtggtccagctgagg | |
| NG5- | tgagGTTTTAGAGCTAG | |
| 3-Rb | AAATAG | |

[0629] Nonlimiting examples of primers for the generation of guide RNA (gRNA) templates for targeting and deleting TCR-beta (TCR-β) are provided in Table 11.

TABLE 11
Target sequences underlined

| | | SEQ ID |
|---|---|---|
| Name | Sequence | NO: |
| TCRb- | TAATACGACTCACTATAG | 16843 |
| gRNA- | GCTGCTCCTTGAGGGGCT | |
| WT1 | GGTTTTAGAGCTAGAAAT | |
| | AG | |
| TCRb- | TAATACGACTCACTATAG | 16844 |
| gRNA- | GCAGTATCTGGAGTCATT | |
| WT2 | GGTTTTAGAGCTAGAAAT | |
| | AG | |
| TCRb- | TAATACGACTCACTATAG | 16845 |
| gRNA- | GCCTCGGCGCTGACGATC | |
| WT3 | T | |
| TCRb- | TAATACGACTCACTATAG | 16846 |
| gRNA- | GCTCTCGGAGAATGACGA | |
| WT5 | G | |
| TCRb- | TAATACGACTCACTATAG | 16847 |
| gRNA- | GCCTCGGCGCTGACGATC | |
| WT3 | TGTTTTAGAGCTAGAAAT | |
| | AG | |
| TCRb- | TAATACGACTCACTATAG | 16848 |
| gRNA- | GAGAATGACGAGTGGACC | |
| WT4 | CGTTTTAGAGCTAGAAAT | |
| | AG | |
| TCRb- | TAATACGACTCACTATAG | 16849 |
| gRNA- | GCTCTCGGAGAATGACGA | |
| WT5 | GGTTTTAGAGCTAGAAAT | |
| | AG | |
| TCRb- | TAATACGACTCACTATAG | 16850 |
| gRNA- | CAAACACAGCGACCTCGG | |
| NG1-L | GTGTTTTAGAGCTAGAAA | |
| | TAG | |
| TCRb- | TAATACGACTCACTATAG | 16851 |
| gRNA- | TGGCTCAAACACAGCGAC | |
| NG2-L | CTGTTTTAGAGCTAGAAA | |
| | TAG | |
| TCRb- | TAATACGACTCACTATAG | 16852 |
| gRNA- | AGGGCGGGCTGCTCCTTG | |
| NG3-L | AGGTTTTAGAGCTAGAAA | |
| | TAG | |
| TCRb- | TAATACGACTCACTATAG | 16853 |
| gRNA- | TATCTGGAGTCATTGAGG | |
| NG4-L | GGTTTTAGAGCTAGAAAT | |
| | AG | |
| TCRb- | TAATACGACTCACTATAG | 16854 |
| gRNA- | ACTGGACTTGACAGCGGA | |
| NGS-L | AGGTTTTAGAGCTAGAAA | |
| | TAG | |
| TCRb- | TAATACGACTCACTATAG | 16855 |
| gRNA- | AGAGATCTCCCACACCCA | |
| NG1-R | AAGTTTTAGAGCTAGAAA | |
| | TAG | |
| TCRb- | TAATACGACTCACTATAG | 16856 |
| gRNA- | CCACACCCAAAAGGCCAC | |
| NG2-R | ACGTTTTAGAGCTAGAAA | |
| | TAG | |
| TCRb- | TAATACGACTCACTATAG | 16857 |
| gRNA- | ACTGCCTGAGCAGCCGCC | |
| NG3-R | TGGTTTTAGAGCTAGAAA | |
| | TAG | |
| TCRb- | TAATACGACTCACTATAG | 16858 |
| gRNA- | TGAGGGTCTCGGCCACCT | |
| NG4-R | TCGTTTTAGAGCTAGAAA | |
| | TAG | |
| TCRb- | TAATACGACTCACTATAG | 16859 |
| gRNA- | ATGACGAGTGGACCCAGG | |
| NGS-R | ATGTTTTAGAGCTAGAAA | |
| | TAG | |
| TCRb- | TAATACGACTCACTATAG | 16860 |
| gRNA- | TGGCTCAAACACAGCGAC | |
| NG6-L | CTGTTTTAGAGCTAGAAA | |
| | TAG | |
| TCRb- | TAATACGACTCACTATAG | 16861 |
| gRNA- | CCACACCCAAAAGGCCAC | |
| NG6-R | ACGTTTTAGAGCTAGAAA | |
| | TAG | |

[0630] Nonlimiting examples of primers for the generation of guide RNA (gRNA) templates for targeting and deleting beta-2-microglobulin (β2M) are provided in Table 12.

TABLE 12
Target sequences underlined

| Primer | | | |
|---|---|---|---|
| No. | Name | Sequence | SEQ ID NO: |
| 1 | B2- | TAATACGACTCACTATAG | 16862 |
| | Prom- | AGACAGGTGACGGTCCCTGC | |
| | NG1-R | GTTTTAGAGCTAGAAATAG | |
| 2 | B2- | TAATACGACTCACTATA | 16863 |
| | Prom- | GCAGTGCCAGGTTAGAGAGA | |
| | NG1-L | GTTTTAGAGCTAGAAATAG | |
| 3 | B2-Ex2- | TAATACGACTCACTATA | 16864 |
| | NG-R | GAAGTTGACTTACTGAAGAA | |
| | | GTTTTAGAGCTAGAAATAG | |
| 4 | B2-Ex2- | TAATACGACTCACTATA G | 16865 |
| | NG-L | ACCCAGACACATAGCAATTC | |
| | | GTTTTAGAGCTAGAAATAG | |
| 5 | Ex2-B2- | TAATACGACTCACTATA G | 16866 |
| | NG2-R | TCACGTCATCCAGCAGAGAA | |
| | | GTTTTAGAGCTAGAAATAG | |
| 6 | B2- | TAATACGACTCACTATA | 16867 |
| | Ex2- | gatattcctcagGTACTCCA | |
| | NG2-L | GTTTTAGAGCTAGAAATAG | |
| 7 | b2MEx1 | TAATACGACTCACTATA | 16868 |
| | NG- | GGCCACGGAGCGAGACATCT | |
| | left | GTTTTAGAGCTAGAAATAG | |
| 8 | b2MEx1 | TAATACGACTCACTATAG | 16869 |
| | NG- | ACTCTCTCTTTCTGGCCTGG | |
| | right | GTTTTAGAGCTAGAAATAG | |
| 9 | b2M- | TAATACGACTCACTATAG | 16870 |
| | gRNA | GAGAGAGAATTGAAAAAG | |
| | WT Ex2 | GTTTTAGAGCTAGAAATAG | |

### Endogenous MHC Knock-Out

[0631] Gene editing compositions of the disclosure, including but not limited to, RNA-guided fusion proteins comprising dCas9-CloO51, may be used to target and decrease or eliminate expression of an endogenous MHCI, MHCII, or MHC activator of an allogeneic cell of the disclosure. In preferred embodiments, the gene editing compositions of the disclosure target and delete a gene, a portion of a gene, or a regulatory element of a gene (such as a promoter) encoding one or more components of an endogenous MHCI, MHCII, or MHC activator of an allogeneic cell of the disclosure.

[0632] Nonlimiting examples of guide RNAs (gRNAs) for targeting and deleting MHC activators are provided in Tables 13 and 14.

TABLE 13

| | | | SEQ | | SEQ |
|---|---|---|---|---|---|
| | Reagent/ | Left Target | ID | Right Target | ID |
| Gene | Type | Sequence | NO: | Sequence | NO |
| C2TA | C2TA | CATCGCTGTTA | 16871 | CTACCACTTCTA | 16880 |
| | exon 4 | AGAAGCTCC | | TGACCAGA | |
| | NG | | | | |
| | C2TA | GGCCCTCCAGC | 16872 | CAGTAAGTTTGT | 16881 |
| | exon6 | TGGGAGTCC | | GGTGGGTG | |
| | NG | | | | |
| RFXANK | RFXANK | GGGTCTGCTGG | 16873 | GGACCCTGAAGA | 16882 |
| | exon1 | GTCTGGATG | | CCCCGGAG | |
| | NG1 | | | | |
| | RFXANK | GTTCTGAGGCA | 16874 | CCCGGAGAGGAG | 16883 |
| | exon1 | GGGGTCTGC | | GCTGCAGA | |
| | NG2 | | | | |
| RFXAP | RFXAP | CCCGCCCCAAC | 16875 | CTGTGCGAAGGG | 16884 |
| | Exon 1 | GCTGCCCCC | | GCCGGGGA | |
| | NG1 | | | | |
| | RFXAP | CCTTCGCACAG | 16876 | AGAGGAGGCTGG | 16885 |
| | Exon 1 | GTACCTAAC | | GGAGGACG | |
| | NG2 | | | | |
| RFX5 | RFX5 | GTCTTGGGGCT | 16877 | CCCAGGTGGTGC | 16886 |
| | exon 1 | CTTAGCATC | | TGAGGCTG | |
| | NG1 | | | | |
| | RFX5 | ACGGCCTTGCT | 16878 | GGGATCCTGGTA | 16887 |
| | exon 2 | GTGGGGAAG | | AGTGTGTT | |
| | NG2 | | | | |
| | RFX5 | TCTGATGATCT | 16879 | ATCAAAGCTCGA | 16888 |
| | exon5 | TGCCAAAGT | | AGGCTTGG | |
| | NG3 | | | | |

TABLE 14

| | | | | | | | Target | |
|---|---|---|---|---|---|---|---|---|
| | | | NG-Left | SEQ | NG-Right | SEQ | sequence | SEQ |
| | | Exon or | Target | ID | Target | ID | (if WT | ID |
| Gene | Reagent/Type | region | Sequence | NO: | Sequence | NO: | crispr) | NO |
| Beta2- | B2-Promoter- | promoter | GCAGTGCCAGGTTAG | 16889 | AGACAGGTGACGGTC | 16913 | | |
| MG | NG1 | | AGAGA | | CCTGC | | | |
| | B2-Promoter- | promoter | CAAGCCAGCGACGCA | 16890 | CCTGCGGGCCTTGTC | 16914 | | |
| | NG2 | | GTGCC | | CTGAT | | | |
| | B2-Promoter- | promoter | CCAATCAGGACAAGG | 16891 | TATAAGTGGAGGCGT | 16915 | | |
| | NG3 | | CCCGC | | CGCGC | | | |
| | B2-Ex2-NG | exon 2 | ACCCAGACACATAGC | 16892 | GAAGTTGACTTACTG | 16916 | | |
| | | | AATTC | | AAGAA | | | |
| | B2-Ex2-NG2 | exon 2 | gatattcctcagGTA | 16893 | TCACGTCATCCAGCA | 16917 | | |
| | | | CTCCA | | GAGAA | | | |
| | B2-Ex1-NG | exon 1 | GGCCACGGAGCGAGA | 16894 | ACTCTCTCTTTCTGG | 16918 | | |
| | | | CATCT | | CCTGG | | | |
| | WT-B2MG-exon2 | | | | | | GGAGAGAGAA | 16937 |
| | WT-B2MG- | cuts in | | | | | TTGAAAAAG | |
| | promoter-4 | promoter | | | | | GGGCCTTGTC | 16938 |
| | | region Y | | | | | CTGATTGGC | |
| | WT-B2MG- | cuts in | | | | | | |
| | promoter-5 | promoter | | | | | GGCACTGCGT | 16939 |
| | | region | | | | | CGCTGGCT | |
| C2TA | C2TA exon 4 | exon 4 | CATCGCTGTTAAGAA | 16895 | CTACCACTTCTATGA | 16919 | | |
| | NG | | GCTCC | | CCAGA | | | |
| | C2TA exon4 | exon 4 | GGTCCATCTGGTCAT | 16896 | AGATTGAGCTCTACT | 16920 | | |
| | NG2 | | AGAAG | | CAGGT | | | |
| | C2TA exon6 | exon6 | GGCCCTCCAGCTGGG | 16897 | CAGTAAGTTTGTGGT | 16921 | | |
| | NG | | AGTCC | | GGGTG | | | |
| | C2TA exon4- | exon 4 | | | | | GGTCCATCTG | 16940 |
| | WT | | | | | | GTCATAGAAG | |
| | C2TA exon6- | exon6 | | | | | GGAGTCCTGG | 16941 |
| | WT | | | | | | AAGACATAC | |
| | C2TA exon6 | exon6 | CCTTGCTCAGGCCCT | 16898 | TGTGGTGGGTGGGGA | 16922 | | |
| | NG2 | | CCAGC | | GGTCT | | | |
| RFXANK | RFXANK exon1 | exon 1 | GGGTCTGCTGGGTCT | 16899 | GGACCCTGAAGACCC | 16923 | | |
| | NG1 | | GGATG | | CGGAG | | | |
| | RFXANK exon1 | exon 1 | GTTCTGAGGCAGGGG | 16900 | CCCGGAGAGGAGGCT | 16924 | | |
| | NG2 | | TCTGC | | GCAGA | | | |
| | RFXANK exon2 | exon 2 | TGAGAGTGGTGGAGT | 16901 | GAACGAGGTGTCAGC | 16925 | | |
| | NG1 | | GCTTC | | TCTGC | | | |
| | RFXANK Exon2 | exon 2 | CTCGTTCCCTCGCTG | 16902 | GGCCACCCTAGACTG | 16926 | | |
| | NG2 | | CCGGT | | TGAGT | | | |
| | RFXANK-WT- | exon 1 | | | | | GGTCCCCAAG | 16942 |
| | exon1-3 | | | | | | TTCTGAGGC | |
| | RFXANK-WT- | exon1 | | | | | GGCAGGGGTC | 16943 |
| | exon1-4 | | | | | | TGCTGGGTC | |
| RFXAP | RFXAP Exon 1 | exon 1 | CCCGCCCCAACGCTG | 16903 | CTGTGCGAAGGGGCC | 16927 | | |
| | NG1 | | CCCCC | | GGGGA | | | |
| | RFXAP Exon 1 | exon 1 | CCTTCGCACAGGTAC | 16904 | AGAGGAGGCTGGGGA | 16928 | | |
| | NG2 | | CTAAC | | GGACG | | | |
| | RFXAP Exon1 | exon 1 | CAGCCGGGGCTAGGG | 16905 | CTTGGCGCCAGCCTC | 16929 | | |
| | NG3 | | CCGCG | | GGTGG | | | |
| | RFXAP Exon1 | exon 1 | GCCGCGGCCGCCACC | 16906 | CTAGTGATGCAACCC | 16930 | | |
| | NG4 | | GAGGC | | TGTGC | | | |
| | RFXAP Exon1 | exon 1 | GCCGCGCTCTCGCCT | 16907 | GAGGACGAGGAGACT | 16931 | | |
| | NG5 | | CCCCC | | CACTC | | | |
| | WT- RFXAP- | exon 1 | | | | | GGCCCCCGGG | 16944 |
| | ex1-3 | | | | | | GGCAGCGTT | |
| | WT- RFXAP- | exon 1 | | | | | GGTACCTGTG | 16945 |
| | ex1-4 | | | | | | CGAAGGGGC | |
| RFX5 | RFX5 exon1 | exon 1 | GTCTTGGGGCTCTTA | 16908 | CCCAGGTGGTGCTGA | 16932 | | |
| | NG1 | | GCATC | | GGCTG | | | |
| | RFX5 exon2 | exon 2 | ACGGCCTTGCTGTGG | 16909 | GGGATCCTGGTAAGT | 16933 | | |
| | NG2 | | GGAAG | | GTGTT | | | |
| | RFX5 exon5 | exon5 | TCTGATGATCTTGCC | 16910 | ATCAAAGCTCGAAGG | 16934 | | |
| | NG3 | | AAAGT | | CTTGG | | | |
| | RFX5 exon1 | | GTCTTGGGGCTCTTA | 16911 | CCCCAGGTGGTGCTG | 16935 | | |
| | NG2 | | GCATC | | AGGCT | | | |
| | RFX5 exon1 | | AGGCTCATCTTCTGC | 16912 | ACTGGGGGAAGGGCC | 16936 | | |
| | NG3 | | CATCC | | CCCCC | | | |
| | WT-RFX5- | | | | | | GGGAAGGGCCC | 16946 |
| | ex1-4 | Exon1 | | | | | CCCCAGG | |
| | WT-RFX5- | | | | | | GCCTTCGAGCT | 16947 |
| | ex5-5 | Exon 5 | | | | | TTGATGTC | |

### Engineered HLA-E Compositions

[0633] MHCI knockout (KO) renders cells resistant to killing by T cells, but also makes them susceptible to natural killer (NK) cell-mediated cytotoxicity (“Missing-self hypothesis”) (see FIG. 23). It is hypothesized that NK rejection would reduce the in vivo efficacy and/or persistence of these KO cells in a therapeutic setting, such as allogeneic (allo) CAR-T therapy. Retention of MHCI on the surface of allo CAR-T cells would render them susceptible to killing by host T cells, as observed in the classic mixed lymphocyte reaction (MLR) experiment. It is estimated that up to 10% of a person's T cells are specific to foreign MHC, which would mediate the rejection of foreign cells and tissues. A targeted KO of MHCI, specifically HLA-A, B and C, which can be achieved by targeted KO of B2M, results in a loss of additional HLA molecules including HLA-E. Loss of HLA-E, for example, renders the KO cells more susceptible to NK cell-mediated cytotoxicity due to the “Missing-self Hypothesis”. NK-mediated cytotoxicity against missing-self cells is a defense mechanism against pathogens that downregulate MHC on the surface of infected cells to evade detection and killing by cells of the adaptive immune system.

[0634] Two strategies are contemplated by the disclosure for engineering allo (MHCI-neg) T cells (including CAR-T cells) more resistant to NK cell-mediated cytotoxicity. In some embodiments, a sequence encoding a molecule (such as single-chain HLA-E) that reduces or prevents NK killing is introduced or delivered to an allogeneic cell. Alternatively, or in addition, gene editing methods of the disclosure retain certain endogenous HLA molecules (such as endogenous HLA-E). For example, the first approach involves piggyBac (PB) delivery of a single-chain (sc)HLA-E molecule to B2M KO T cells.

[0635] The second approach uses a gene editing composition with guide RNAs selective for HLA-A, HLA-B and HLA-C, but not, for example, HLA-E or other molecules that are protective against natural-killer cell mediated cytotoxicity for MHCI KO cells.

[0636] Alternative or additional molecules to HLA-E that are protective against NK cell-mediated cytotoxicity include, but are not limited to, interferon alpha/beta receptor 1 (IFNART), human IFNART, interferon alpha/beta receptor 2 (IFNAR2), human IFNAR2, HLA-G1, HLA-G2, HLA-G3, HLA-G4, HLA-G5, HLA-G6, HLA-G7, human carcino embryonic antigen-related cell adhesion molecule 1 (CEACAM1), viral hemoagglutinins, CD48, LLT1 (also referred to as C-type lectin domain family 2 member (CLC2D)), ULBP2, ULBP3, and sMICA or a variant thereof.

[0637] An exemplary INFAR1 protein of the disclosure comprises or consists of the amino acid sequence of (Signal peptide, Extracellular, TM, Cytoplasmic):

(SEQ ID NO: 17017)
MMVVLLGATTLVLVAVAPWVLSAAAGGKNLKSPQKVEVDIIDDNF
ILRWNRSDESVGNVTFSFDYQKTGMDNWIKLSGCQNITSTKCNFS
SLKLNVYEEIKLRIRAEKENTSSWYEVDSFTPFRKAQIGPPEVHL
EAEDKAIVIHISPGTKDSVMWALDGLSFTYSLVIWKNSSGVEERI
ENIYSRHKIYKLSPETTYCLKVKAALLTSWKIGVYSPVHCIKTTV
ENELPPPENIEVSVQNQNYVLKWDYTYANMTFQVQWLHAFLKRNP
GNHLYKWKQIPDCENVKTTQCVFPQNVFQKGIYLLRVQASDGNNT
SFWSEEIKFDTEIQAFLLPPVFNIRSLSDSFHIYIGAPKQSGNTP
VIQDYPLIYEIIFWENTSNAERKIIEKKTDVTVPNLKPLTVYCVK
ARAHTMDEKLNKSSVFSDAVCEKTKPGNTSKIWLIVGICIALFAL
PFVIYAAKVFLRCINYVFFPSLKPSSSIDEYFSEQPLKNLLLSTS
EEQIEKCFIIENISTIATVEETNQTDEDHKKYSSQTSQDSGNYSN
EDESESKTSEELQQDFV.

[0638] An exemplary INFAR2 protein of the disclosure comprises or consists of the amino acid sequence of (Signal peptide, Extracellular, TM, Cytoplasmic):

(SEQ ID NO: 17018)
MLLSQNAFIFRSLNLVLMVYISLVFGISYDSPDYTDESCTFKISL
RNFRSILSWELKNHSIVPTHYTLLYTIMSKPEDLKVVKNCANTIR
SFCDLTDEWRSTHEAYVTVLEGFSGNITLFSCSHNFWLAIDMSFE
PPEFEIVGFTNHINVMVKFPSIVEEELQFDLSLVIEEQSEGIVKK
HKPEIKGNMSGNFTYIIDKLIPNTNYCVSVYLEHSDEQAVIKSPL
KCTLLPPGQESESAESAKIGGIITVFLIALVLTSTIVTLKWIGYI
CLRNSLPKVLNFHNFLAWPFPNLPPLEAMDMVEVIYINRKKKVWD
YNYDDESDSDTEAAPRTSGGGYTMHGLTVRPLGQASATSTESQLI
DPESEEEPDLPEVDVELPTMPKDSPQQLELLSGPCERRKSPLQDP
FPEEDYSSTEGSGGRITFNVDLNSVFLRVLDDEDSDDLEAPLMLS
SHLEEMVDPEDPDNVQSNHLLASGEGTQPTFPSPSSEGLWSEDAP
SDQSDISESDVDLGDGYIMR.

[0639] An exemplary HLA-G1 protein of the disclosure comprises or consists of the amino acid sequence of (Alpha chain 1, Alpha chain 2, Alpha chain 3):

(SEQ ID NO: 17019)
MVVMAPRTLFLLLSGALTLTETWAGSHSMRYFSAAVSRPGRGEPR
FIAMGYVDDTQFVRFDSDSACPRMEPRAPWVEQEGPEYWEEETRN
TKAHAQTDRMNLQTLRGYYNQSEASSHTLQWMIGCDLGSDGRLLR
GYEQYAYDGKDYLALNEDLRSWTAADTAAQISKRKCEAANVAEQR
RAYLEGTCVEWLHRYLENGKEMLQRADPPKTHVTHHPVFDYEATL
RCWALGFYPAEIILTWQRDGEDQTQDVELVETRPAGDGTFQKWAA
VVVPSGEEQRYTCHVQHEGLPEPLMLRWKQSSLPTIPIMGIVAGL
VVLAAVVTGAAVAAVLWRKKSSD.

[0640] An exemplary HLA-G2 protein of the disclosure comprises or consists of the amino acid sequence of (Alpha chain 1, Alpha chain 2, Alpha chain 3):

(SEQ ID NO: 17020)
MVVMAPRTLFLLLSGALTLTETWAGSHSMRYFSAAVSRPGRGEPR
FIAMGYVDDTQFVRFDSDSACPRMEPRAPWVEQEGPEYWEEETRN
TKAHAQTDRMNLQTLRGYYNQSEADPPKTHVTHHPVFDYEATLRC
WALGFYPAEIILTWQRDGEDQTQDVELVETRPAGDGTFQKWAAVV
VPSGEEQRYTCHVQHEGLPEPLMLRWKQSSLPTIPIMGIVAGLVV
LAAVVTGAAVAAVLWRKKSSD.

[0641] An exemplary HLA-G3 protein of the disclosure comprises or consists of the amino acid sequence of (Alpha chain 1 Alpha chain 2 Alpha chain 3):

(SEQ ID NO: 17021)
MVVMAPRILFLLLSGALTLTETWAGSHSMRYFSAAVSRPGRGEPR
FIAMGYVDDTQFVREDSDSACPRMEPRAPWVEQEGPEYWEEETRN
TKAHAQTDRMNLQTLRGYYNQSEAKQSSLPTIPIMGIVAGLVVLA
AVVTGAAVAAVLWRKKSSD.

[0642] An exemplary HLA-G5 protein of the disclosure comprises or consists of the amino acid sequence of (Alpha chain 1 Alpha chain 2 Alpha chain 3 intron 4):

(SEQ ID NO: 17022)
MVVMAPRTLFLLLSGALTLTETWAGSHSMRYFSAAVSRPGRGEPR
FIAMGYVDDTQFVRFDSDSACPRMEPRAPWVEQEGPEYWEEETRN
TKAHAQTDRMNLQTLRGYYNQSEASSHTLQWMIGCDLGSDGRLLR
GYEQYAYDGKDKLALNEDLRSWTAADTAAQISKRKCEAANVAEQR
RAYLEGTCVEWLHRYLENGKEMLQRAKQSSLPTIPIMGIVAGLVV
LAAVVTGAAVAAVLWRKKSSD.

[0643] An exemplary HLA-G5 protein of the disclosure comprises or consists of the amino acid sequence of (Alpha chain 1, Alpha chain 2, Alpha chain 3, intron 4):

(SEQ ID NO: 17023)
MVVMAPRTLFLLLSGALTLIETWAGSHSMRYFSAAVSRPGRGEPR
EIAMGYVDDTQFVREDSDSACPRMEPRAPWVEQEGPEYWEEETRN
TKAHAQTDRMNLQTLRGYYNQSEASSHTLQWMIGCDLGSDGRLLR
GYEQYAYDGKDKLALNEDLRSWTAADTAAQISKRKCEAANVAEQR
RAYLEGTCVEWLHRYLENGKEMLQRADPPKTHVTHHPVFDYEATL
RCWALGFYPAEIILTWQRDGEDQTQDVELVETRPAGDGTFQKWAA
VVVPSGEEQRYTCHVQHEGLPEPLMLRWSKEGDGGIMSVRESRSL
SEDL.

[0644] An exemplary HLA-G5 protein of the disclosure comprises or consists of the amino acid sequence of (Alpha chain 1, Alpha chain 2, Alpha chain 3, intron 2):

(SEQ ID NO: 17024)
MVVMAPRTLFLLLSGALTLIETWAGSHSMRYFSAAVSRPGRGEPR
FIAMGYVDDTQFVRFDSDSACPRMEPRAPWVEQEGPEYWEEETRN
TKAHAQTDRMNLQTLRGYYNQSEADPPKTHVTHHPVFDYEATLRC
WALGFYPAEIILTWQRDGEDQTQDVELVETRPAGDGTFQKWAAVV
VPSGEEQRYTCHVQHEGLPEPLMLRWSKEGDGGIMSVRESRSLSE
DL.

[0645] An exemplary CEACAM1 protein of the disclosure comprises or consists of the

(SEQ ID NO: 17025)
MVVMAPGALTLTETWAGSHSMRYFSAAVSRPGRGEPRFIAMGYVDDTQFV
RFDSDSACPRMEPRAPWVEQEGPEYWEEETRNTKAHAQTDRMNLQTLRGY
YNQSEASE.

amino acid sequence of (Extracellular, TM, Cytoplasmic):

(SEQ ID NO: 17026)
MGHLSAPLHRVRVPWQGLLLTASLLTFWNPPTTAQLTTESMPFNVAEGKE
VLLLVHNLPQQLFGYSWYKGERVDGNRQIVGYAIGTQQATPGPANSGRET
IYPNASLLIQNVTQNDTGFYTLQVIKSDLVNEEATGQFHVYPELPKPSIS
SNNSNPVEDKDAVAFTCEPETQDTTYLWWINNQSLPVSPRLQLSNGNRTL
TLLSVTRNDTGPYECEIQNPVSANRSDPVTLNVTYGPDTPTISPSDTYYR
PGANLSLSCYAASNPPAQYSWLINGTFQQSTQELFIPNITVNNSGSYTCH
ANNSVTGCNRTTVKTIIVTELSPVVAKPQIKASKTTVTGDKDSVNLTCST
NDTGISIRWFFKNQSLPSSERMKLSQGNTTLSINPVKREDAGTYWCEVFN
PISKNQSDPIMLNVNYNALPQENGLSPGAIAGIVIGVVALVALIAVALAC
FLHFGKTGRASDQRDLTEHKPSVSNHTQDHSNDPPNKMNEVTYSTLNFEA
QQPTQPTSASPSLTATEIIYSEVKKQ.

[0646] An exemplary viral hemagglutinin protein of the disclosure comprises or consists of the amino acid sequence of (HAforInfluenzaAvirus(A/NewCaledonia/20/1999(H1N1); TM):

(SEQ ID NO: 17027)
MKAKLLVLLCTFTATYADTICIGYHANNSTDTVDTVLEKNVTVTHSVNLL
EDSHNGKLCLLKGIAPLQLGNCSVAGWILGNPECELLISKESWSYIVETP
NPENGTCYPGYFADYEELREQLSSVSSFERFEIFPKESSWPNHTVTGVSA
SCSHNGKSSFYRNLLWLTGKNGLYPNLSKSYVNNKEKEVLVLWGVHHPPN
IGNQRALYHTENAYVSVVSSHYSRRFTPEIAKRPKVRDQEGRINYYWILL
EPGDTIIFEANGNLIAPWYAFALSRGFGSGIITSNAPMDECDAKCQTPQG
AINSSLPFQNVHPVTIGECPKYVRSAKLRMVTGLRNIPSIQSRGLFGAIA
GFIEGGWTGMVDGWYGYHHQNEQGSGYAADQKSTQNAINGITNKVNSVIE
KMNTQFTAVGKEFNKLERRMENLNKKVDDGFLDIWTYNAELLVLLENERT
LDFHDSNVKNLYEKVKSQLKNNAKEIGNGCFEFYHKCNNECMESVKNGTY
DYPKYSEESKLNREKIDGVKLESMGVYQILAIYSTVASSLVLLVSLGAIS
FWMCSNGSLQCRICI.

[0647] An exemplary CD48 protein of the disclosure comprises or consists of the amino acid sequence of (Signal peptide, Chain, Pro peptide removed in mature form):

(SEQ ID NO: 17028)
MCSRGWDSCLALELLLLPLSLLVTSIQGHLVHMTVVSGSNVTLNISESLP
ENYKQLTWFYTEDQKIVEWDSRKSKYFESKFKGRVRLDPQSGALYISKVQ
KEDNSTYIMRVLKKTGNEQEWKIKLQVLDPVPKPVIKIEKIEDMDDNCYL
KLSCVIPGESVNYTWYGDKRPFPKELQNSVLETTLMPHNYSRCYTCQVSN
SVSSKNGTVCLSPPCTLARSFGVEWIASWLVVTVPTILGLLLT.

[0648] An exemplary LLT1 protein of the disclosure comprises or consists of the amino acid sequence of (Cytoplasmic, TM, Extracellular):

(SEQ ID NO: 17029)
MHDSNNVEKDITPSELPANPGCLHSKEHSIKATLIWRLFFLIMFLTIIVC
GMVAALSAIRANCHQEPSVCLQAACPESWIGFQRKCFYFSDDTKNWTSSQ
RFCDSQDADLAQVESFQELNFLLRYKGPSDHWIGLSREQGQPWKWINGTE
WTRQFPILGAGECAYLNDKGASSARHYTERKWICSKSDIHV.

[0649] An exemplary ULBP2 protein of the disclosure comprises or consists of the amino acid sequence of (also known as NKG2D ligand; Genbank ACCESSION No. AAQ89028):

(SEQ ID NO: 17030)

| | |
|---|---|
| 1 | maaaaatkil lclpllllls gwsragradp hslcyditvi |
| | pkfrpgprwc avqgqvdekt |
| 61 | flhydcgnkt vtpvsplgkk lnvttawkaq npvlrevvdi |
| | lteqlrdiql enytpkeplt |
| 121 | lqarmsceqk aeghssgswq fsfdgqifll fdsekrmwtt |
| | vhpgarkmke kwendkvvam |
| 181 | sfhyfsmgdc igwledflmg mdstlepsag aplamssgtt |
| | qlratattli lcclliilpc |
| 241 | filpgi. |

[0650] An exemplary ULBP3 protein of the disclosure comprises or consists of the amino acid sequence of (also known as NKG2D ligand; Genbank ACCESSION No. NP_078794):

(SEQ ID NO: 17031)

| | |
|---|---|
| 1 | maaaaspail prlailpyll fdwsgtgrad ahslwynfti |
| | ihlprhgqqw cevqsqvdqk |
| 61 | nflsydcgsd kvlsmghlee qlyatdawgk qlemlrevgq |
| | rlrleladte ledftpsgpl |
| 121 | tlqvrmscec eadgyirgsw qfsfdgrkfl lfdsnnrkwt |
| | vvhagarrmk ekwekdsglt |
| 181 | tffkmvsmrd ckswirdflm hrkkrlepta pptmapglaq |
| | pkaiattlsp wsfliilcfi |
| 241 | lpgi. |

[0651] An exemplary sMICA protein of the disclosure comprises or consists of the amino acid sequence of (Signal Peptide, Portion of Extracellular domain, TM and cytoplasmic domain) (Genbank Accession No. Q29983):

(SEQ ID NO: 17032)

| | |
|---|---|
| 1 | mglgpvflll agifpfappg aaaephslry nltvlswdgs |
| | vqsgfltevh ldgqpflrcd |
| 61 | rqkcrakpqg qwaedvlgnk twdretrdlt gngkdlrmtl |
| | ahikdqkegl hslqeirvce |
| 121 | ihednstrss qhfyydgelf lsqnletkew tmpqssraqt |
| | lamnvrnflk edamktkthy |
| 181 | hamhadclqe lrrylksgvv lrrtvppmvn vtrseasegn |
| | itvtcrasgf ypwnitlswr |
| 241 | qdgvslshdt qqwgdvlpdg ngtyqtwvat ricqgeeqrf |
| | tcymehsgnh sthpvpsgkv |
| 301 | lvlqshwqtf hvsavaaaai fviiifyvrc ckkktsaaeg |
| | pelvslqvld qhpvgtsdhr |
| 361 | datqlgfqpl msdlgstgst ega. |

[0652] An exemplary sMICA protein of the disclosure comprises or consists of the amino acid sequence of (Alpha-1, Alpha-2, Alpha-3):

(SEQ ID NO: 17033)

| | |
|---|---|
| 1 | mglgpvflll agifpfappg aaaephslry nlvlswdgs |
| | vqsgfltevh ldgqpflrcd |
| 61 | rqkcrakpqg qwaedvlgnk twdretrdlt gngkdlrmtl |
| | ahikdqkegl hslqeirvce |
| 121 | ihednstrss qhfyydgelf lsqnletkew tmpassraqt |
| | lamnvrnflk edamktkthy |
| 181 | hamhadclqe lrrylksgvv lrrtvppmvn vtrseasegn |
| | itvtcrasgf ypwnitlswr |
| 241 | qdgvslshdt qqwgdvlpdg ngtyqtwvat ricqgeeqrf |
| | tcymehsgnh sthpvpsgkv |
| 301 | lvlqshwqtf hvsavaaaai fviiifyvrc ckkktsaaeg |
| | pelvslqvld qhpvgtsdhr |
| 361 | datqlgfqpl msdlgstgst ega. |

[0653] An exemplary sMICA protein of the disclosure comprises or consists of the amino acid sequence of (Signalpeptide; Alpha-1, Alpha-2, Alpha-3):

(SEQ ID NO: 17034)

| | MGGVLLTQRTLLSLVLALLFPSMASM ephslry nltvlswdgs |
|---|---|
| | vqsgfltevh ldgqpflrcd |
| 61 | rqkcrakpqg qwaedvlgnk twdretrdlt gngkdlrmtl |
| | ahikdqkegl hslgeirvce |
| 121 | ihednstrss qhfyydgelf lsqnletkew tmpassraqt |
| | l thy |
| 181 | hamhadclqe lrrylksgwv lrrtvppmvn vtrseasegn |
| | itvtcrasgf ypwnitlswr |
| 241 | qdgvslshdt qqwgdvlpdg ngtyqtwvat ricqgeeqrf |
| | tcymehsgnh sthpvpsgkv |
| 301 | lvlqshw. |

[0654] An exemplary sMICA protein of the disclosure comprises or consists of the amino acid sequence of (Signal peptide):

(SEQ ID NO: 17035)
MGGVLLTQRTLLSLVLALLFPSMASMEPHSLRYNLTVLSWDGSVQSGFLT
EVHLDGQPFLRCDRQKCRAKPQGQWAEDVLGNKTWDRETRDLTGNGKLDL
RMTLAHIKLDQKEGLHSLQEIRVCEIHEDNSTRSSQHFYYNGELFLSQNL
ETKEWTMPQSSRAQTLTHYHAMHADCLQELRRYLKSGVVLRRTVPPMVDV
TRSEASEGNITVTCRASGFYPWNITLSWRQDGVSLSHDTQQWGDVLPDGN
GTYQTWVATRICQGEEQRFTCYMEHSGNHSTHPVPSGKVLVLQSHW.

[0655] An exemplary bGBE Trimer (20G and 4845) protein of the disclosure comprises or consists of the amino acid sequence of:

(SEQ ID NO: 16972)
MSRSVALAVLALLSLSGLEAVMAPRILILGGGGSGGGGSGGGGSIQRTP
KIQVYSRHPAENGKSNFLNCYVSGFHPSDIEVDLLKNGERIEKVEHSDL
SFSKDWSFYLLYYTEFTPTEKDEYACRVNHVILSQPKIVKWDRDMGGGG
SGGGGSGGGGSGGGGSGSHSLKYFHTSVSRPGRGEPRFISVGYVDDTQF
VRFDNDAASPRMVPRAPWMEQEGSEYWDRETRSARDTAQIFRVNLRTLR
GYYNQSEAGSHTLQWMHGCELGPDGRFLRGYEQFAYDGKDYLTLNEDLR
SWTAVDTAAQISEQKSNDASEAEHQRAYLEDTCVEWLHKYLEKGKETLL
HLEPPKTHVTHHPISDHEATLRCWALGFYPAEITLTWQQDGEGHTQDTE
LVETRPAGDGTFQKWAAVVVPSGEEQRYTCHVQHEGLPEPVTLRWKPAS
QPTIPIVGIIAGLVLLGSVVSGAVVAAVIWRKKSSGGKGGSYSKAEWSD
SAQGSESHSL*.

[0656] An exemplary bGBE Trimer (20G and 484S) protein of the disclosure comprises or consists of the nucleic acid sequence of:

(SEQ ID NO: 16973)
atgtctcgcagcgtggccctggccgtgctggccctgctgtccctgtctgg
cctggaggccgtgatggccccccggaccctgatcctgggaggaggaggca
gcggcggaggaggctccggaggcggcggctctatccagcgcacacctaag
atccaggtgtattctcggcacccagccgagaacggcaagagcaacttcct
gaattgctacgtgagcggctttcacccttccgacatcgaggtggatctgc
tgaagaatggcgagagaatcgagaaggtggagcactccgacctgagcttc
tccaaggattggtctttttatctgctgtactataccgagtttacccctac
agagaaggacgagtacgcctgtcgcgtgaaccacgtgacactgtcccagc
caaagatcgtgaagtgggaccgggatatgggcggcggcggctctggcggc
ggcggcagcggcggcggcggctccggaggaggcggctctggcagccactc
cctgaagtatttccacacctctgtgagccggccaggcagaggagagccac
ggttcatctctgtgggctacgtggacgatacacagttcgtgaggtttgac
aatgatgccgccagcccaagaatggtgcctagggccccatggatggagca
ggagggcagcgagtattgggacagggagacccggagcgccagagacacag
cacagattttccgggtgaacctgagaaccctgaggggctactataatcag
tccgaggccggctctcacacactccagtggatgcacggatgcgagctggg
accagatggccgcttcctgcggggctacgagcagtttgcctatgacggca
aggattacctgaccctgaacgaggacctgagatcctggaccgccgtggat
acagccgcccagatcagcgagcagaagtccaatgacgcatctgaggcaga
gcaccagagggcatatctggaggatacctgcgtggagtggctgcacaagt
acctggagaagggcaaggagacactgctgcacctggagccccctaagacc
cacgtgacacaccacccaatcagcgaccacgaggccaccctgaggtgttg
ggcactgggcttctatcccgccgagatcaccctgacatggcagcaggacg
gagagggacacacccaggatacagagctggtggagaccaggcccgccggc
gatggcacatttcagaagtgggccgccgtggtggtgccttccggagagga
gcagagatacacctgtcacgtgcagcacgagggactgccagagccagtga
ccctgaggtggaagcctgccagccagcccacaatccctatcgtgggaatc
atcgcaggcctggtgctgctgggctctgtggtgagcggagcagtggtggc
cgccgtgatctggcggaagaagagcagcggaggcaagggaggctcctact
ccaaggcagagtggagcgactccgcccagggctctgagagccactccctg
tga.

[0657] An exemplary bGBE Trimer (270R and 484S) protein of the disclosure comprises or consists of the amino acid sequence of:

(SEQ ID NO: 16974)
MSRSVALAVLALLSLSGLEAVMAPRTLILGGGGSGGGGSGGGGSIQRTP
KIQVYSRHPAENGKSNFLNCYVSGFHPSDIEVDLLKNGERIEKVEHSDL
SFSKDWSFYLLYYTEFTPTEKDEYACRVNHVILSQPKIVKWDRDMGGGG
SGGGGSGGGGSGGGGSGSHSLKYFHTSVSRPGRGEPRFISVGYVDDTQF
VRFDNDAASPRMVPRAPWMEQEGSEYWDRETRSARDTAQIFRVNLRTLR
GYYNQSEAGSHTLQWMHGCELGPDRRFLRGYEQFAYDGKDYLTLNEDLR
SWTAVDTAAQISEQKSNDASEAEHQRAYLEDTCVEWLHKYLEKGKETLL
HLEPPKTHVTHHPISDHEATLRCWALGFYPAEITLTWQQDGEGHTQDTE
LVETRPAGDGTFQKWAAVVVPSGEEQRYTCHVQHEGLPEPVTLRWKPAS
QPTIPIVGIIAGLVLLGSVVSGAVVAAVIWRKKSSGGKGGSYSKAEWSD
SAQGSESHSL*.

[0658] An exemplary bGBE Trimer (270R and 484S) protein of the disclosure comprises or consists of the nucleic acid sequence of:

(SEQ ID NO: 16975)
atgtctcgcagcgtggccctggccgtgctggccctgctgtccctgtctgg
cctggaggccgtgatggccccccggaccctgatcctgggaggaggaggca
gcggcggaggaggctccggaggcggcggctctatccagcgcacacctaag
atccaggtgtattctcggcacccagccgagaacggcaagagcaacttcct
gaattgctacgtgagcggctttcacccttccgacatcgaggtggatctgc
tgaagaatggcgagagaatcgagaaggtggagcactccgacctgagcttc
tccaaggattggtctttttatctgctgtactataccgagtttacccctac
agagaaggacgagtacgcctgtcgcgtgaaccacgtgacactgtcccagc
caaagatcgtgaagtgggaccgggatatgggcggcggcggctctggcggc
ggcggcagcggcggcggcggctccggaggaggcggctctggcagccactc
cctgaagtatttccacacctctgtgagccggccaggcagaggagagccac
ggttcatctctgtgggctacgtggacgatacacagttcgtgaggtttgac
aatgatgccgccagcccaagaatggtgcctagggccccatggatggagca
ggagggcagcgagtattgggacagggagacccggagcgccagagacacag
cacagattttccgggtgaacctgagaaccctgaggggctactataatcag
tccgaggccggctctcacacactccagtggatgcacggatgcgagctggg
accagatcgccgcttcctgcggggctacgagcagtttgcctatgacggca
aggattacctgaccctgaacgaggacctgagatcctggaccgccgtggat
acagccgcccagatcagcgagcagaagtccaatgacgcatctgaggcaga
gcaccagagggcatatctggaggatacctgcgtggagtggctgcacaagt
acctggagaagggcaaggagacactgctgcacctggagccccctaagacc
cacgtgacacaccacccaatcagcgaccacgaggccaccctgaggtgttg
ggcactgggcttctatcccgccgagatcaccctgacatggcagcaggacg
gagagggacacacccaggatacagagctggtggagaccaggcccgccggc
gatggcacatttcagaagtgggccgccgtggtggtgccttccggagagga
gcagagatacacctgtcacgtgcagcacgagggactgccagagccagtga
ccctgaggtggaagcctgccagccagcccacaatccctatcgtgggaatc
atcgcaggcctggtgctgctgggctctgtggtgagcggagcagtggtggc
cgccgtgatctggcggaagaagagcagcggaggcaagggaggctcctact
ccaaggcagagtggagcgactccgcccagggctctgagagccactccctg
tga.

[0659] An exemplary gBE Dimer (R and S) protein of the disclosure comprises or consists of the amino acid sequence of:

(SEQ ID NO: 16976)
MSRSVALAVLALLSLSGLEAIQRTPKIQVYSRHPAENGKSNFLNCYVSGF
HPSDIEVDLLKNGERIEKVEHSDLSFSKDWSFYLLYYTEFTPTEKDEYAC
RVNHVTLSQPKIVKWDRDMGGGGSGGGGSGGGGSGGGGSGSHSLKYFHTS
VSRPGRGEPRFISVGYVDDTQFVRFDNDAASPRMVPRAPWMEQEGSEYWD
RETRSARDTAQIFRVNLRTLRGYYNQSEAGSHTLQWMHGCELGPDRRFLR
GYEQFAYDGKDYLTLNEDLRSWTAVDTAAQISEQKSNDASEAEHQRAYLE
DTCVEWLHKYLEKGKETLLHLEPPKTHVTHHPISDHEATLRCWALGFYPA
EITLTWQQDGEGHTQDTELVETRPAGDGTFQKWAAVVVPSGEEQRYTCHV
QHEGLPEPVTLRWKPASQPTIPIVGIIAGLVLLGSVVSGAVVAAVIWRKK
SSGGKGGSYSKAEWSDSAQGSESHSL.

[0660] An exemplary gBE Dimer (R and S) protein of the disclosure comprises or consists of the nucleic acid sequence of:

(SEQ ID NO: 16977)
ATGAGCAGATCTGTGGCCCTGGCTGTTCTGGCTCTGCTGTCTCTGTCTGG
CCTGGAAGCCATCCAGCGGACCCCTAAGATCCAGGTGTACAGCAGACACC
CCGCCGAGAACGGCAAGAGCAACTTCCTGAACTGCTACGTGTCCGGCTTT
CACCCCAGCGACATTGAGGTGGACCTGCTGAAGAACGGCGAGCGGATCGA
GAAGGTGGAACACAGCGATCTGAGCTTCAGCAAGGACTGGTCCTTCTACC
TGCTGTACTACACCGAGTTCACCCCTACCGAGAAGGACGAGTACGCCTGC
AGAGTGAACCACGTGACACTGAGCCAGCCTAAGATCGTGAAGTGGGACAG
AGATATGGGCGGAGGCGGATCTGGTGGCGGAGGAAGTGGCGGCGGAGGAT
CTGGCGGTGGTGGTTCTGGATCTCACAGCCTGAAGTACTTTCACACCTCC
GTGTCCAGACCTGGCAGAGGCGAGCCTAGATTCATCAGCGTGGGCTACGT
GGACGACACCCAGTTCGTCAGATTCGACAACGACGCCGCCTCTCCTCGGA
TGGTTCCTAGAGCACCCTGGATGGAACAAGAGGGCAGCGAGTACTGGGAT
CGCGAGACAAGAAGCGCCAGAGACACAGCCCAGATCTTCCGCGTGAACCT
GAGAACCCTGCGGGGCTACTACAATCAGTCTGAGGCCGGCTCTCACACCC
TGCAGTGGATGCATGGATGTGAACTGGGCCCCGACAGACGGTTCCTGAGA
GGCTATGAGCAGTTCGCCTACGACGGCAAGGACTACCTGACACTGAACGA
GGACCTGAGAAGCTGGACCGCCGTGGATACAGCCGCTCAGATCAGCGAGC
AGAAGTCTAACGACGCCAGCGAGGCCGAACACCAGAGAGCCTATCTGGAA
GATACCTGCGTGGAATGGCTGCACAAGTACCTGGAAAAGGGCAAAGAGAC
ACTGCTGCACCTGGAACCTCCAAAGACACATGTGACCCACCATCCTATCA
GCGACCACGAGGCCACACTGAGATGTTGGGCCCTGGGCTTTTACCCTGCC
GAGATCACACTGACATGGCAGCAGGATGGCGAGGGCCACACACAGGATAC
AGAGCTGGTGGAAACAAGACCTGCCGGCGACGGCACCTTCCAGAAATGGG
CTGCTGTGGTTGTGCCCAGCGGCGAGGAACAGAGATACACCTGTCACGTG
CAGCACGAGGGACTGCCTGAACCTGTGACTCTGAGATGGAAGCCTGCCAG
CCAGCCAACAATCCCCATCGTGGGAATCATTGCCGGCCTGGTGCTGCTGG
GATCTGTGGTTTCTGGTGCTGTGGTGGCCGCCGTGATTTGGAGAAAGAAG
TCCTCTGGCGGCAAAGGCGGCTCCTACTCCAAGGCCGAGTGGAGCGATTC
TGCCCAGGGCTCTGAAAGCCACAGCCTGTAGATAA.

[0661] An exemplary gBE Dimer (G and S) protein of the disclosure comprises or consists of the amino acid sequence of:

(SEQ ID NO: 16978)
DLLKNGERIEKVEHSDLSFSKDWSFYLLYYTEFTPTEKDEYACRVNHVTL
SQPKIVKWDRDMGGGGSGGGGSGGGGSGGGGSGSHSLKYFHTSVSRPGRG
EPRFISVGYVDDTQFVRFDNDAASPRMVPRAPWMEQEGSEYWDRETRSAR
DTAQIFRVNLRTLRGYYNQSEAGSHTLQWMHGCELGPDGRFLRGYEQFAY
DGKDYLTLNEDLRSWTAVDTAAQISEQKSNDASEAEHQRAYLEDTCVEWL
HKYLEKGKETLLHLEPPKTHVTHHPISDHEATLRCWALGFYPAEITLTWQ
QDGEGHTQDTELVETRPAGDGTFQKWAAVVVPSGEEQRYTCHVQHEGLPE
PVTLRWKPASQPTIPIVGIIAGLVLLGSVVSGAVVAAVIWRKKSSGGKGG
SYSKAEWSDSAQGSESHSL

[0662] An exemplary gBE Dimer (G and S) protein of the disclosure comprises or consists of the amino acid sequence of:

(SEQ ID NO: 16979)
ATGAGCAGATCTGTGGCCCTGGCTGTTCTGGCTCTGCTGTCTCTGTCTGG
CCTGGAAGCCATCCAGCGGACCCCTAAGATCCAGGTGTACAGCAGACACC
CCGCCGAGAACGGCAAGAGCAACTTCCTGAACTGCTACGTGTCCGGCTTT
CACCCCAGCGACATTGAGGTGGACCTGCTGAAGAACGGCGAGCGGATCGA
GAAGGTGGAACACAGCGATCTGAGCTTCAGCAAGGACTGGTCCTTCTACC
TGCTGTACTACACCGAGTTCACCCCTACCGAGAAGGACGAGTACGCCTGC
AGAGTGAACCACGTGACACTGAGCCAGCCTAAGATCGTGAAGTGGGACAG
AGATATGGGCGGAGGCGGATCTGGTGGCGGAGGAAGTGGCGGCGGAGGAT
CTGGCGGTGGTGGTTCTGGATCTCACAGCCTGAAGTACTTTCACACCTCC
GTGTCCAGACCTGGCAGAGGCGAGCCTAGATTCATCAGCGTGGGCTACGT
GGACGACACCCAGTTCGTCAGATTCGACAACGACGCCGCCTCTCCTCGGA
TGGTTCCTAGAGCACCCTGGATGGAACAAGAGGGCAGCGAGTACTGGGAT
CGCGAGACAAGAAGCGCCAGAGACACAGCCCAGATCTTCCGCGTGAACCT
GAGAACCCTGCGGGGCTACTACAATCAGTCTGAGGCCGGCTCTCACACCC
TGCAGTGGATGCATGGATGTGAACTGGGCCCCGACAGACAGTTCCTGAGA
GGCTATGAGCAGTTCGCCTACGACGGCAAGGACTACCTGACACTGAACGA
GGACCTGAGAAGCTGGACCGCCGTGGATACAGCCGCTCAGATCAGCGAGC
AGAAGTCTAACGACGCCAGCGAGGCCGAACACCAGAGAGCCTATCTGGAA
GATACCTGCGTGGAATGGCTGCACAAGTACCTGGAAAAGGGCAAAGAGAC
ACTGCTGCACCTGGAACCTCCAAAGACACATGTGACCCACCATCCTATCA
GCGACCACGAGGCCACACTGAGATGTTGGGCCCTGGGCTTTTACCCTGCC
GAGATCACACTGACATGGCAGCAGGATGGCGAGGGCCACACACAGGATAC
AGAGCTGGTGGAAACAAGACCTGCCGGCGACGGCACCTTCCAGAAATGGG
CTGCTGTGGTTGTGCCCAGCGGCGAGGAACAGAGATACACCTGTCACGTG
CAGCACGAGGGACTGCCTGAACCTGTGACTCTGAGATGGAAGCCTGCCAG
CCAGCCAACAATCCCCATCGTGGGAATCATTGCCGGCCTGGTGCTGCTGG
GATCTGTGGTTTCTGGTGCTGTGGTGGCCGCCGTGATTTGGAGAAAGAAG
TCCTCTGGCGGCAAAGGCGGCTCCTACTCCAGGCCGAGTGGAGCGATTC
TGCCCAGGGCTCTGAAAGCCACAGCCTGTAGATAA

[0663] An exemplary WT HLA-E Monomer (R and S) protein of the disclosure comprises or consists of the nucleic acid sequence of:

(SEQ ID NO: 16980)
MSRSVALAVLALLSLSGLEAGSHSLKYFHTSVSRPGRGEPRFISVGYVDD
TQFVRFDNDAASPRMVPRAPWMEQEGSEYWDRETRSARDTAQIFRVNLRT
LRGYYNQSEAGSHTLQWMHGCELGPDRRFLRGYEQFAYDGKDYLTLNEDL
RSWTAVDTAAQISEQKSNDASEAEHQRAYLEDTCVEWLHKYLEKGKETLL
HLEPPKTHVTHHPISDHEATLRCWALGFYPAEITLTWQQDGEGHTQDTEL
VETRPAGDGTFQKWAAVVVPSGEEQRYTCHVQHEGLPEPVTLRWKPASQP
TIPIVGIIAGLVLLGSVVSGAVVAAVIWRKKSSGGKGGSYSKAEWSDSAQ
GSESHSL

[0664] An exemplary WT HLA-E Monomer (R and S) protein of the disclosure comprises or consists of the nucleic acid sequence of:

(SEQ ID NO: 16981)
ATGAGCAGATCTGTGGCCCTGGCTGTTCTGGCTCTGCTGTCTCTGTCTGG
ACTGGAAGCCGGCAGCCACAGCCTGAAGTACTTTCACACCAGCGTGTCCA
GACCTGGCAGAGGCGAGCCTAGATTCATCAGCGTGGGCTACGTGGACGAC
ACCCAGTTCGTCAGATTCGACAACGACGCCGCCTCTCCTCGGATGGTTCC
TAGAGCACCCTGGATGGAACAAGAGGGCAGCGAGTACTGGGACAGAGAGA
CAAGAAGCGCCAGAGACACAGCCCAGATCTTCAGAGTGAACCTGCGGACC
CTGCGGGGCTACTACAATCAGTCTGAAGCCGGCTCTCACACCCTGCAGTG
GATGCACGGATGTGAACTGGGCCCCGACAGAAGATTCCTGAGAGGCTACG
AGCAGTTCGCCTACGACGGCAAGGACTACCTGACACTGAACGAGGACCTG
AGAAGCTGGACCGCCGTGGATACAGCCGCTCAGATCAGCGAGCAGAAGTC
TAACGACGCCTCTGAGGCCGAACACCAGAGAGCCTACCTGGAAGATACCT
GCGTGGAATGGCTGCACAAGTACCTGGAAAAGGGCAAAGAGACACTGCTG
CACCTGGAACCTCCAAAGACACACGTGACCCACCATCCTATCAGCGACCA
CGAGGCCACACTGAGATGTTGGGCCCTGGGCTTTTACCCCGCCGAGATCA
CACTGACATGGCAGCAGGATGGCGAGGGCCACACACAGGATACAGAGCTG
GTGGAAACAAGACCTGCCGGCGACGGCACCTTCCAGAAATGGGCTGCTGT
GGTGGTTCCCAGCGGCGAGGAACAGAGATACACCTGTCACGTGCAGCACG
AGGGACTGCCTGAACCTGTGACACTGAGGTGGAAGCCTGCCAGCCAGCCT
ACAATCCCCATCGTGGGAATCATTGCCGGCCTGGTGCTGCTGGGATCTGT
GGTTTCTGGTGCAGTGGTGGCCGCCGTGATCTGGCGGAAAAAAAGCTCAG
GCGGCAAAGGCGGCTCCTACTCCAAAGCCGAGTGGAGCGATTCTGCCCAG
GGCTCTGAAAGCCACTCTCTGTAGATAA.

[0665] An exemplary WT HLA-E Monomer (G and S) protein of the disclosure comprises or consists of the nucleic acid sequence of:

(SEQ ID NO: 16982)
MSRSVALAVLALLSLSGLEAGSHSLKYFHTSVSRPGRGEPRFISVGYVDD
TQFVRFDNDAASPRMVPRAPWMEQEGSEYWDRETRSARDTAQIFRVNLRT
LRGYYNQSEAGSHTLQWMHGCELGPDGRFLRGYEQFAYDGKDYLTLNEDL
RSWTAVDTAAQISEQKSNDASEAEHQRAYLEDTCVEWLHKYLEKGKETLL
HLEPPKTHVTHHPISDHEATLRCWALGFYPAEITLTWQQDGEGHTQDTEL
VETRPAGDGTFQKWAAVVVPSGEEQRYTCHVQHEGLPEPVTLRWKPASQP
TIPIVGIIAGLVLLGSVVSGAVVAAVIWRKKSSGGKGGSYSKAEWSDSAQ
GSESHSL.

[0666] An exemplary WT HLA-E Monomer (Q and S) protein of the disclosure comprises or consists of the nucleic acid sequence of:

(SEQ ID NO: 16983)
ATGAGCAGATCTGTGGCCCTGGCTGTTCTGGCTCTGCTGTCTCTGTCTGG
ACTGGAAGCCGGCAGCCACAGCCTGAAGTACTTTCACACCAGCGTGTCCA
GACCTGGCAGAGGCGAGCCTAGATTCATCAGCGTGGGCTACGTGGACGAC
ACCCAGTTCGTCAGATTCGACAACGACGCCGCCTCTCCTCGGATGGTTCC
TAGAGCACCCTGGATGGAACAAGAGGGCAGCGAGTACTGGGACAGAGAGA
CAAGAAGCGCCAGAGACACAGCCCAGATCTTCAGAGTGAACCTGCGGACC
CTGCGGGGCTACTACAATCAGTCTGAAGCCGGCTCTCACACCCTGCAGTG
GATGCACGGATGTGAACTGGGCCCCGACGGAAGATTCCTGAGAGGCTACG
AGCAGTTCGCCTACGACGGCAAGGACTACCTGACACTGAACGAGGACCTG
AGAAGCTGGACCGCCGTGGATACAGCCGCTCAGATCAGCGAGCAGAAGTC
TAACGACGCCTCTGAGGCCGAACACCAGAGAGCCTACCTGGAAGATACCT
GCGTGGAATGGCTGCACAAGTACCTGGAAAAGGGCAAAGAGACACTGCTG
CACCTGGAACCTCCAAAGACACACGTGACCCACCATCCTATCAGCGACCA
CGAGGCCACACTGAGATGTTGGGCCCTGGGCTTTTACCCCGCCGAGATCA
CACTGACATGGCAGCAGGATGGCGAGGGCCACACACAGGATACAGAGCTG
GTGGAAACAAGACCTGCCGGCGACGGCACCTTCCAGAAATGGGCTGCTGT
GGTGGTTCCCAGCGGCGAGGAACAGAGATACACCTGTCACGTGCAGCACG
AGGGACTGCCTGAACCTGTGACACTGAGGTGGAAGCCTGCCAGCCAGCCT
ACAATCCCCATCGTGGGAATCATTGCCGGCCTGGTGCTGCTGGGATCTGT
GGTTTCTGGTGCAGTGGTGGCCGCCGTGATCTGGCGGAAAAAAAGCTCAG
GCGGCAAAGGCGGCTCCTACTCCAAAGCCGAGTGGAGCGATTCTGCCCAG
GGCTCTGAAAGCCACTCTCTGTAGATAA.

### Vectors and Host Cells

[0667] The disclosure also relates to vectors that include isolated nucleic acid molecules of the disclosure, host cells that are genetically engineered with the recombinant vectors, and the production of at least one VHH or VCAR by recombinant techniques, as is well known in the art. See, e.g., Sambrook, et al., supra; Ausubel, et al., supra, each entirely incorporated herein by reference.

[0668] For example, the PB-EF1a vector may be used. The vector comprises the following nucleotide sequence:

(SEQ ID NO: 17502)
tgtacatagattaaccctagaaagataatcatattgtgacgtacgttaaa
gataatcatgcgtaaaattgacgcatgtgttttatcggtctgtatatcga
ggtttatttattaatttgaatagatattaagttttattatatttacactt
acatactaataataaattcaacaaacaatttatttatgtttatttattta
ttaaaaaaaaacaaaaactcaaaatttcttctataaagtaacaaaacttt
tatcgaatacctgcagcccgggggatgcagagggacagcccccccccaaa
gcccccagggatgtaattacgtccctcccccgctagggggcagcagcgag
ccgcccggggctccgctccggtccggcgctccccccgcatccccgagccg
gcagcgtgcggggacagcccgggcacggggaaggtggcacgggatcgctt
tcctctgaacgcttctcgctgctctttgagcctgcagacacctgggggga
tacggggaaaagttgactgtgcctttcgatcgaaccatggacagttagct
ttgcaaagatggataaagttttaaacagagaggaatctttgcagctaatg
gaccttctaggtcttgaaaggagtgggaattggctccggtgcccgtcagt
gggcagagcgcacatcgcccacagtccccgagaagttggggggaggggtc
ggcaattgaaccggtgcctagagaaggtggcgcggggtaaactgggaaag
tgatgtcgtgtactggctccgcctttttcccgagggtgggggagaaccgt
atataagtgcagtagtcgccgtgaacgttctttttcgcaacgggtttgcc
gccagaacacaggtaagtgccgtgtgtggttcccgcgggcctggcctctt
tacgggttatggcccttgcgtgccttgaattacttccacctggctgcagt
acgtgattcttgatcccgagcttcgggttggaagtgggtgggagagttcg
aggccttgcgcttaaggagccccttcgcctcgtgcttgagttgaggcctg
gcctgggcgctggggccgccgcgtgcgaatctggtggcaccttcgcgcct
gtctcgctgctttcgataagtctctagccatttaaaatttttgatgacct
gctgcgacgctttttttctggcaagatagtcttgtaaatgcgggccaaga
tctgcacactggtatttcggtttttggggccgcgggcggcgacggggccc
gtgcgtcccagcgcacatgttcggcgaggcggggcctgcgagcgcggcca
ccgagaatcggacgggggtagtctcaagctggccggcctgctctggtgcc
tggcctcgcgccgccgtgtatcgccccgccctgggcggcaaggctggccc
ggtcggcaccagttgcgtgagcggaaagatggccgcttcccggccctgct
gcagggagctcaaaatggaggacgcggcgctcgggagagcgggcgggtga
gtcacccacacaaaggaaaagggcctttccgtcctcagccgtcgcttcat
gtgactccacggagtaccgggcgccgtccaggcacctcgattagttctcg
agcttttggagtacgtcgtctttaggttggggggaggggttttatgcgat
ggagtttccccacactgagtgggtggagactgaagttaggccagcttggc
acttgatgtaattctccttggaatttgccctttttgagtttggatcttgg
ttcattctcaagcctcagacagtggttcaaagtttttttcttccatttca
ggtgtcgtgagaattctaatacgactcactatagggtgtgctgtctcatc
attttggcaaagattggccaccaagcttgtcctgcaggagggtcgacgcc
tctagacgggcggccgctccggatccacgggtaccgatcacatatgcctt
taattaaacactagttctatagtgtcacctaaattccctttagtgagggt
taatggccgtaggccgccagaattgggtccagacatgataagatacattg
atgagtttggacaaaccacaactagaatgcagtgaaaaaaatgctttatt
tgtgaaatttgtgatgctattgctttatttgtaaccattataagctgcaa
taaacaagttaacaacaacaattgcattcattttatgtttcaggttcagg
gggaggtgtgggaggttttttcggactctaggacctgcgcatgcgcttgg
cgtaatcatggtcatagctgtttcctgttttccccgtatccccccaggtg
tctgcaggctcaaagagcagcgagaagcgttcagaggaaagcgatcccgt
gccaccttccccgtgcccgggctgtccccgcacgctgccggctcggggat
gcggggggagcgccggaccggagcggagccccgggcggctcgctgctgcc
ccctagcgggggagggacgtaattacatccctgggggctttggggggggg
ctgtccctctcaccgcggtggagctccagcttttgttcgaattggggccc
cccctcgagggtatcgatgatatctataacaagaaaatatatatataata
agttatcacgtaagtagaacatgaaataacaatataattatcgtatgagt
taaatcttaaaagtcacgtaaaagataatcatgcgtcattttgactcacg
cggtcgttatagttcaaaatcagtgacacttaccgcattgacaagcacgc
ctcacgggagctccaagcggcgactgagatgtcctaaatgcacagcgacg
gattcgcgctatttagaaagagagagcaatatttcaagaatgcatgcgtc
aattttacgcagactatctttctagggttaatctagctagccttaagggc
gcctattgcgttgcgctcactgcccgctttccagtcgggaaacctgtcgt
gccagctgcattaatgaatcggccaacgcgcggggagaggcggtttgcgt
attgggcgctcttccgcttcctcgctcactgactcgctgcgctcggtcgt
tcggctgcggcgagcggtatcagctcactcaaaggcggtaatacggttat
ccacagaatcaggggataacgcaggaaagaacatgaccaaaatcccttaa
cgtgagttttcgttccactgagcgtcagaccccgtagaaaagatcaaagg
atcttcttgagatcctttttttctgcgcgtaatctgctgcttgcaaacaa
aaaaaccaccgctaccagcggtggtttgtttgccggatcaagagctacca
actctttttccgaaggtaactggcttcagcagagcgcagataccaaatac
tgttcttctagtgtagccgtagttaggccaccacttcaagaactctgtag
caccgcctacatacctcgctctgctaatcctgttaccagtggctgctgcc
agtggcgataagtcgtgtcttaccgggttggactcaagacgatagttacc
ggataaggcgcagcggtcgggctgaacggggggttcgtgcacacagccca
gcttggagcgaacgacctacaccgaactgagatacctacagcgtgagcta
tgagaaagcgccacgcttcccgaagggagaaaggcggacaggtatccggt
aagcggcagggtcggaacaggagagcgcacgagggagcttccagggggaa
acgcctggtatctttatagtcctgtcgggtttcgccacctctgacttgag
cgtcgatttttgtgatgctcgtcaggggggcggagcctatggaaaaacgc
cagcaacgcggcctttttacggttcctggccttttgctggccttttgctc
acatgagattatcaaaaaggatcttcacctagatccttttaaattaaaaa
tgaagttttaaatcaatctaaagtatatatgagtaaacttggtctgacag
tcagaagaactcgtcaagaaggcgatagaaggcgatgcgctgcgaatcgg
gagcggcgataccgtaaagcacgaggaagcggtcagcccattcgccgcca
agctcttcagcaatatcacgggtagccaacgctatgtcctgatagcggtc
cgccacacccagccggccacagtcgatgaatccagaaaagcggccatttt
ccaccatgatattcggcaagcaggcatcgccatgggtcacgacgagatcc
tcgccgtcgggcatgctcgccttgagcctggcgaacagttcggctggcgc
gagcccctgatgctcttcgtccagatcatcctgatcgacaagaccggctt
ccatccgagtacgtgctcgctcgatgcgatgtttcgcttggtggtcgaat
gggcaggtagccggatcaagcgtatgcagccgccgcattgcatcagccat
gatggatactttctcggcaggagcaaggtgagatgacaggagatcctgcc
ccggcacttcgcccaatagcagccagtcccttcccgcttcagtgacaacg
tcgagcacagctgcgcaaggaacgcccgtcgtggccagccacgatagccg
cgctgcctcgtcttgcagttcattcagggcaccggacaggtcggtcttga
caaaaagaaccgggcgcccctgcgctgacagccggaacacggcggcatca
gagcagccgattgtctgttgtgcccagtcatagccgaatagcctctccac
ccaagcggccggagaacctgcgtgcaatccatcttgttcaatcataatat
tattgaagcatttatcagggttcgtctcgtcccggtctcctcccaatgca
tgtcaatattggccattagccatattattcattggttatatagcataaat
caatattggctattggccattgcatacgttgtatctatatcataata

[0669] The polynucleotides can optionally be joined to a vector containing a selectable marker for propagation in a host. Generally, a plasmid vector is introduced in a precipitate, such as a calcium phosphate precipitate, or in a complex with a charged lipid. If the vector is a virus, it can be packaged in vitro using an appropriate packaging cell line and then transduced into host cells.

[0670] The DNA insert should be operatively linked to an appropriate promoter. The expression constructs will further contain sites for transcription initiation, termination and, in the transcribed region, a ribosome binding site for translation. The coding portion of the mature transcripts expressed by the constructs will preferably include a translation initiating at the beginning and a termination codon (e.g., UAA, UGA or UAG) appropriately positioned at the end of the mRNA to be translated, with UAA and UAG preferred for mammalian or eukaryotic cell expression.

[0671] Expression vectors will preferably but optionally include at least one selectable marker. Such markers include, e.g., but are not limited to, ampicillin, zeocin (Sh bla gene), puromycin (pac gene), hygromycin B (hygB gene), G418/Geneticin (neo gene), mycophenolic acid, or glutamine synthetase (GS, U.S. Pat. Nos. 5,122,464; 5,770,359; 5,827,739), blasticidin (bsd gene), resistance genes for eukaryotic cell culture as well as ampicillin, zeocin (Sh bla gene), puromycin (pac gene), hygromycin B (hygB gene), G418/Geneticin (neo gene), kanamycin, spectinomycin, streptomycin, carbenicillin, bleomycin, erythromycin, polymyxin B, or tetracycline resistance genes for culturing in E. coli and other bacteria or prokaryotics (the above patents are entirely incorporated hereby by reference). Appropriate culture mediums and conditions for the above-described host cells are known in the art. Suitable vectors will be readily apparent to the skilled artisan. Introduction of a vector construct into a host cell can be effected by calcium phosphate transfection, DEAE-dextran mediated transfection, cationic lipid-mediated transfection, electroporation, transduction, infection or other known methods. Such methods are described in the art, such as Sambrook, supra, Chapters 1-4 and 16-18; Ausubel, supra, Chapters 1, 9, 13, 15, 16.

[0672] Expression vectors will preferably but optionally include at least one selectable cell surface marker for isolation of cells modified by the compositions and methods of the disclosure. Selectable cell surface markers of the disclosure comprise surface proteins, glycoproteins, or group of proteins that distinguish a cell or subset of cells from another defined subset of cells. Preferably the selectable cell surface marker distinguishes those cells modified by a composition or method of the disclosure from those cells that are not modified by a composition or method of the disclosure. Such cell surface markers include, e.g., but are not limited to, “cluster of designation” or “classification determinant” proteins (often abbreviated as “CD”) such as a truncated or full length form of CD19, CD271, CD34, CD22, CD20, CD33, CD52, or any combination thereof. Cell surface markers further include the suicide gene marker RQR8 (Philip B et al. Blood. 2014 Aug. 21; 124(8):1277-87).

[0673] Expression vectors will preferably but optionally include at least one selectable drug resistance marker for isolation of cells modified by the compositions and methods of the disclosure. Selectable drug resistance markers of the disclosure may comprise wild-type or mutant Neo, DHFR, TYMS, FRANCF, RAD51C, GCS, MDR1, ALDH1, NKX2.2, or any combination thereof.

[0674] At least one VHH or VCAR of the disclosure can be expressed in a modified form, such as a fusion protein, and can include not only secretion signals, but also additional heterologous functional regions. For instance, a region of additional amino acids, particularly charged amino acids, can be added to the N-terminus of a VHH or VCAR to improve stability and persistence in the host cell, during purification, or during subsequent handling and storage. Also, peptide moieties can be added to a VHH or VCAR of the disclosure to facilitate purification. Such regions can be removed prior to final preparation of a VHH or VCAR or at least one fragment thereof. Such methods are described in many standard laboratory manuals, such as Sambrook, supra, Chapters 17.29-17.42 and 18.1-18.74; Ausubel, supra, Chapters 16, 17 and 18.

[0675] Those of ordinary skill in the art are knowledgeable in the numerous expression systems available for expression of a nucleic acid encoding a protein of the disclosure. Alternatively, nucleic acids of the disclosure can be expressed in a host cell by turning on (by manipulation) in a host cell that contains endogenous DNA encoding a VHH or VCAR of the disclosure. Such methods are well known in the art, e.g., as described in U.S. Pat. Nos. 5,580,734, 5,641,670, 5,733,746, and 5,733,761, entirely incorporated herein by reference.

[0676] Illustrative of cell cultures useful for the production of the VHH or VCARs, specified portions or variants thereof, are bacterial, yeast, and mammalian cells as known in the art. Mammalian cell systems often will be in the form of monolayers of cells although mammalian cell suspensions or bioreactors can also be used. A number of suitable host cell lines capable of expressing intact glycosylated proteins have been developed in the art, and include the COS-1 (e.g., ATCC CRL 1650), COS-7 (e.g., ATCC CRL-1651), HEK293, BHK21 (e.g., ATCC CRL-10), CHO (e.g., ATCC CRL 1610) and BSC-1 (e.g., ATCC CRL-26) cell lines, Cos-7 cells, CHO cells, hep G2 cells, P3×63Ag8.653, SP2/0-Ag14, 293 cells, HeLa cells and the like, which are readily available from, for example, American Type Culture Collection, Manassas, Va. (www.atcc.org). Preferred host cells include cells of lymphoid origin, such as myeloma and lymphoma cells. Particularly preferred host cells are P3×63Ag8.653 cells (ATCC Accession Number CRL-1580) and SP2/0-Ag14 cells (ATCC Accession Number CRL-1851). In a particularly preferred embodiment, the recombinant cell is a P3×63Ab8.653 or an SP2/0-Ag14 cell.

[0677] Expression vectors for these cells can include one or more of the following expression control sequences, such as, but not limited to, an origin of replication; a promoter (e.g., late or early SV40 promoters, the CMV promoter (U.S. Pat. Nos. 5,168,062; 5,385,839), an HSV tk promoter, a pgk (phosphoglycerate kinase) promoter, an EF-1 alpha promoter (U.S. Pat. No. 5,266,491), at least one human promoter; an enhancer, and/or processing information sites, such as ribosome binding sites, RNA splice sites, polyadenylation sites (e.g., an SV40 large T Ag poly A addition site), and transcriptional terminator sequences. See, e.g., Ausubel et al., supra; Sambrook, et al., supra. Other cells useful for production of nucleic acids or proteins of the present invention are known and/or available, for instance, from the American Type Culture Collection Catalogue of Cell Lines and Hybridomas (www.atcc.org) or other known or commercial sources.

[0678] When eukaryotic host cells are employed, polyadenlyation or transcription terminator sequences are typically incorporated into the vector. An example of a terminator sequence is the polyadenlyation sequence from the bovine growth hormone gene. Sequences for accurate splicing of the transcript can also be included. An example of a splicing sequence is the VP1 intron from SV40 (Sprague, et al., J. Virol. 45:773-781 (1983)). Additionally, gene sequences to control replication in the host cell can be incorporated into the vector, as known in the art.

### Purification of a VH, VHH or VCAR

[0679] A VHH protein or VCAR can be recovered and purified from recombinant cell cultures by well-known methods including, but not limited to, protein A purification, ammonium sulfate or ethanol precipitation, acid extraction, anion or cation exchange chromatography, phosphocellulose chromatography, hydrophobic interaction chromatography, affinity chromatography, hydroxylapatite chromatography and lectin chromatography. High performance liquid chromatography (“HPLC”) can also be employed for purification. See, e.g., Colligan, Current Protocols in Immunology, or Current Protocols in Protein Science, John Wiley & Sons, NY, N.Y., (1997-2001), e.g., Chapters 1, 4, 6, 8, 9, 10, each entirely incorporated herein by reference.

[0680] VHs, VHHs and/or VCARs of the disclosure include purified products, products of chemical synthetic procedures, and products produced by recombinant techniques from a prokaryotic or eukaryotic host, including, for example, E. coli, yeast, higher plant, insect and mammalian cells. Depending upon the host employed in a recombinant production procedure, the VCAR of the disclosure can be glycosylated or can be non-glycosylated. Such methods are described in many standard laboratory manuals, such as Sambrook, supra, Sections 17.37-17.42; Ausubel, supra, Chapters 10, 12, 13, 16, 18 and 20, Colligan, Protein Science, supra, Chapters 12-14, all entirely incorporated herein by reference. Amino Acid Codes

[0681] The amino acids that make up VCARs of the disclosure are often abbreviated. The amino acid designations can be indicated by designating the amino acid by its single letter code, its three letter code, name, or three nucleotide codon(s) as is well understood in the art (see Alberts, B., et al., Molecular Biology of The Cell, Third Ed., Garland Publishing, Inc., New York, 1994). A VCAR of the disclosure can include one or more amino acid substitutions, deletions or additions, from spontaneous or mutations and/or human manipulation, as specified herein. Amino acids in a VCAR of the disclosure that are essential for function can be identified by methods known in the art, such as site-directed mutagenesis or alanine-scanning mutagenesis (e.g., Ausubel, supra, Chapters 8, 15; Cunningham and Wells, Science 244:1081-1085 (1989)). The latter procedure introduces single alanine mutations at every residue in the molecule. The resulting mutant molecules are then tested for biological activity, such as, but not limited to, at least one neutralizing activity. Sites that are critical for VCAR binding can also be identified by structural analysis, such as crystallization, nuclear magnetic resonance or photoaffinity labeling (Smith, et al., J. Mol. Biol. 224:899-904 (1992) and de Vos, et al., Science 255:306-312 (1992)).

[0682] As those of skill will appreciate, the invention includes at least one biologically active VCAR of the disclosure. Biologically active VCARs have a specific activity at least 20%, 30%, or 40%, and, preferably, at least 50%, 60%, or 70%, and, most preferably, at least 80%, 90%, or 95%-99% or more of the specific activity of the native (non-synthetic), endogenous or related and known VCAR. Methods of assaying and quantifying measures of enzymatic activity and substrate specificity are well known to those of skill in the art.

[0683] In another aspect, the disclosure relates to VHH proteins and fragments, as described herein, which are modified by the covalent attachment of an organic moiety. Such modification can produce a VCAR fragment with improved pharmacokinetic properties (e.g., increased in vivo serum half-life). The organic moiety can be a linear or branched hydrophilic polymeric group, fatty acid group, or fatty acid ester group. In particular embodiments, the hydrophilic polymeric group can have a molecular weight of about 800 to about 120,000 Daltons and can be a polyalkane glycol (e.g., polyethylene glycol (PEG), polypropylene glycol (PPG)), carbohydrate polymer, amino acid polymer or polyvinyl pyrolidone, and the fatty acid or fatty acid ester group can comprise from about eight to about forty carbon atoms.

[0684] The modified VHH proteins and fragments of the disclosure can comprise one or more organic moieties that are covalently bonded, directly or indirectly, to the antibody. Each organic moiety that is bonded to a VHH protein or fragment of the disclosure can independently be a hydrophilic polymeric group, a fatty acid group or a fatty acid ester group. As used herein, the term “fatty acid” encompasses mono-carboxylic acids and di-carboxylic acids. A “hydrophilic polymeric group,” as the term is used herein, refers to an organic polymer that is more soluble in water than in octane. For example, polylysine is more soluble in water than in octane. Thus, a VHH protein modified by the covalent attachment of polylysine is encompassed by the disclosure. Hydrophilic polymers suitable for modifying VCARs of the disclosure can be linear or branched and include, for example, polyalkane glycols (e.g., PEG, monomethoxy-polyethylene glycol (mPEG), PPG and the like), carbohydrates (e.g., dextran, cellulose, oligosaccharides, polysaccharides and the like), polymers of hydrophilic amino acids (e.g., polylysine, polyarginine, polyaspartate and the like), polyalkane oxides (e.g., polyethylene oxide, polypropylene oxide and the like) and polyvinyl pyrolidone. Preferably, the hydrophilic polymer that modifies the VCAR of the disclosure has a molecular weight of about 800 to about 150,000 Daltons as a separate molecular entity. For example, PEG5000 and PEG 20,000, wherein the subscript is the average molecular weight of the polymer in Daltons, can be used. The hydrophilic polymeric group can be substituted with one to about six alkyl, fatty acid or fatty acid ester groups. Hydrophilic polymers that are substituted with a fatty acid or fatty acid ester group can be prepared by employing suitable methods. For example, a polymer comprising an amine group can be coupled to a carboxylate of the fatty acid or fatty acid ester, and an activated carboxylate (e.g., activated with N,N-carbonyl diimidazole) on a fatty acid or fatty acid ester can be coupled to a hydroxyl group on a polymer.

[0685] Fatty acids and fatty acid esters suitable for modifying VHH proteins of the disclosure can be saturated or can contain one or more units of unsaturation. Fatty acids that are suitable for modifying VCARs of the disclosure include, for example, n-dodecanoate (C12, laurate), n-tetradecanoate (C14, myristate), n-octadecanoate (C18, stearate), n-eicosanoate (C20, arachidate), n-docosanoate (C22, behenate), n-triacontanoate (C30), n-tetracontanoate (C40), cis-A9-octadecanoate (C18, oleate), all cis-A5,8,11,14-eicosatetraenoate (C20, arachidonate), octanedioic acid, tetradecanedioic acid, octadecanedioic acid, docosanedioic acid, and the like. Suitable fatty acid esters include mono-esters of dicarboxylic acids that comprise a linear or branched lower alkyl group. The lower alkyl group can comprise from one to about twelve, preferably, one to about six, carbon atoms.

[0686] The modified VHH proteins and fragments can be prepared using suitable methods, such as by reaction with one or more modifying agents. A “modifying agent” as the term is used herein, refers to a suitable organic group (e.g., hydrophilic polymer, a fatty acid, a fatty acid ester) that comprises an activating group. An “activating group” is a chemical moiety or functional group that can, under appropriate conditions, react with a second chemical group thereby forming a covalent bond between the modifying agent and the second chemical group. For example, amine-reactive activating groups include electrophilic groups, such as tosylate, mesylate, halo (chloro, bromo, fluoro, iodo), N-hydroxysuccinimidyl esters (NHS), and the like. Activating groups that can react with thiols include, for example, maleimide, iodoacetyl, acrylolyl, pyridyl disulfides, 5-thiol-2-nitrobenzoic acid thiol (TNB-thiol), and the like. An aldehyde functional group can be coupled to amine- or hydrazide-containing molecules, and an azide group can react with a trivalent phosphorous group to form phosphoramidate or phosphorimide linkages. Suitable methods to introduce activating groups into molecules are known in the art (see for example, Hermanson, G. T., Bioconjugate Techniques, Academic Press: San Diego, Calif. (1996)). An activating group can be bonded directly to the organic group (e.g., hydrophilic polymer, fatty acid, fatty acid ester), or through a linker moiety, for example, a divalent C1-C12 group wherein one or more carbon atoms can be replaced by a heteroatom, such as oxygen, nitrogen or sulfur. Suitable linker moieties include, for example, tetraethylene glycol, —(CH2)3-, —NH—(CH2)6-NH—, —(CH2)2-NH— and —CH2-O—CH2-CH2-O—CH2-CH2O—CH—NH—. Modifying agents that comprise a linker moiety can be produced, for example, by reacting a mono-Boc-alkyldiamine (e.g., mono-Boc-ethylenediamine, mono-Boc-diaminohexane) with a fatty acid in the presence of 1-ethyl-3-(3-dimethylaminopropyl) carbodiimide (EDC) to form an amide bond between the free amine and the fatty acid carboxylate. The Boc protecting group can be removed from the product by treatment with trifluoroacetic acid (TFA) to expose a primary amine that can be coupled to another carboxylate, as described, or can be reacted with maleic anhydride and the resulting product cyclized to produce an activated maleimido derivative of the fatty acid. (See, for example, Thompson, et al., WO 92/16221, the entire teachings of which are incorporated herein by reference.)

[0687] The modified VHH proteins and fragments of the disclosure can be produced by reacting VHH protein or fragment with a modifying agent. For example, the organic moieties can be bonded to the VHH protein in a non-site specific manner by employing an amine-reactive modifying agent, for example, an NHS ester of PEG. Modified VHH proteins and fragments comprising an organic moiety that is bonded to specific sites of a VHH protein of the disclosure can be prepared using suitable methods, such as reverse proteolysis (Fisch et al., Bioconjugate Chem., 3:147-153 (1992); Werlen et al., Bioconjugate Chem., 5:411-417 (1994); Kumaran et al., Protein Sci. 6(10):2233-2241 (1997); Itoh et al., Bioorg. Chem., 24(1): 59-68 (1996); Capellas et al., Biotechnol. Bioeng., 56(4):456-463 (1997)), and the methods described in Hermanson, G. T., Bioconjugate Techniques, Academic Press: San Diego, Calif. (1996).

### VII or VHH Protein Compositions Comprising Further Therapeutically Active Ingredients

[0688] VHH protein or VCAR compounds, compositions or combinations of the present disclosure can further comprise at least one of any suitable auxiliary, such as, but not limited to, diluent, binder, stabilizer, buffers, salts, lipophilic solvents, preservative, adjuvant or the like. Pharmaceutically acceptable auxiliaries are preferred. Non-limiting examples of, and methods of preparing such sterile solutions are well known in the art, such as, but limited to, Gennaro, Ed., Remington's Pharmaceutical Sciences, 18th Edition, Mack Publishing Co. (Easton, Pa.) 1990. Pharmaceutically acceptable carriers can be routinely selected that are suitable for the mode of administration, solubility and/or stability of the VHH protein or VCAR, fragment or variant composition as well known in the art or as described herein.

[0689] Pharmaceutical excipients and additives useful in the present composition include, but are not limited to, proteins, peptides, amino acids, lipids, and carbohydrates (e.g., sugars, including monosaccharides, di-, tri-, tetra-, and oligosaccharides; derivatized sugars, such as alditols, aldonic acids, esterified sugars and the like; and polysaccharides or sugar polymers), which can be present singly or in combination, comprising alone or in combination 1-99.99% by weight or volume. Exemplary protein excipients include serum albumin, such as human serum albumin (HSA), recombinant human albumin (rHA), gelatin, casein, and the like. Representative amino acid/protein components, which can also function in a buffering capacity, include alanine, glycine, arginine, betaine, histidine, glutamic acid, aspartic acid, cysteine, lysine, leucine, isoleucine, valine, methionine, phenylalanine, aspartame, and the like. One preferred amino acid is glycine.

[0690] Carbohydrate excipients suitable for use in the invention include, for example, monosaccharides, such as fructose, maltose, galactose, glucose, D-mannose, sorbose, and the like; disaccharides, such as lactose, sucrose, trehalose, cellobiose, and the like; polysaccharides, such as raffinose, melezitose, maltodextrins, dextrans, starches, and the like; and alditols, such as mannitol, xylitol, maltitol, lactitol, xylitol sorbitol (glucitol), myoinositol and the like. Preferred carbohydrate excipients for use in the present invention are mannitol, trehalose, and raffinose.

[0691] VH protein, VHH protein or VCAR compositions can also include a buffer or a pH-adjusting agent; typically, the buffer is a salt prepared from an organic acid or base. Representative buffers include organic acid salts, such as salts of citric acid, ascorbic acid, gluconic acid, carbonic acid, tartaric acid, succinic acid, acetic acid, or phthalic acid; Tris, tromethamine hydrochloride, or phosphate buffers. Preferred buffers for use in the present compositions are organic acid salts, such as citrate.

[0692] Additionally, VH protein, VHH protein or VCAR compositions of the disclosure can include polymeric excipients/additives, such as polyvinylpyrrolidones, ficolls (a polymeric sugar), dextrates (e.g., cyclodextrins, such as 2-hydroxypropyl-β-cyclodextrin), polyethylene glycols, flavoring agents, antimicrobial agents, sweeteners, antioxidants, antistatic agents, surfactants (e.g., polysorbates, such as “TWEEN 20” and “TWEEN 80”), lipids (e.g., phospholipids, fatty acids), steroids (e.g., cholesterol), and chelating agents (e.g., EDTA).

[0693] These and additional known pharmaceutical excipients and/or additives suitable for use in the VH protein, VHH protein, VCAR, portion or variant compositions according to the invention are known in the art, e.g., as listed in “Remington: The Science & Practice of Pharmacy”, 19th ed., Williams & Williams, (1995), and in the “Physician's Desk Reference”, 52nd ed., Medical Economics, Montvale, N.J. (1998), the disclosures of which are entirely incorporated herein by reference. Preferred carrier or excipient materials are carbohydrates (e.g., saccharides and alditols) and buffers (e.g., citrate) or polymeric agents. An exemplary carrier molecule is the mucopolysaccharide, hyaluronic acid, which may be useful for intraarticular delivery.

T Cell Isolation from a Leukapheresis Product

[0694] A leukapheresis product or blood may be collected from a subject at clinical site using a closed system and standard methods (e.g., a COBE Spectra Apheresis System). Preferably, the product is collected according to standard hospital or institutional Leukapheresis procedures in standard Leukapheresis collection bags. For example, in preferred embodiments of the methods of the disclosure, no additional anticoagulants or blood additives (heparin, etc.) are included beyond those normally used during leukapheresis.

[0695] Alternatively, white blood cells (WBC)/Peripheral Blood Mononuclear Cells (PBMC) (using Biosafe Sepax 2 (Closed/Automated)) or T cells (using CliniMACS® Prodigy (Closed/Automated)) may be isolated directly from whole blood. However, in certain subjects (e.g. those diagnosed and/or treated for cancer), the WBC/PBMC yield may be significantly lower when isolated from whole blood than when isolated by leukapheresis.

[0696] Either the leukapheresis procedure and/or the direct cell isolation procedure may be used for any subject of the disclosure.

[0697] The leukapheresis product, blood, WBC/PBMC composition and/or T-cell composition should be packed in insulated containers and should be kept at controlled room temperature (+19° C. to +25° C.) according to standard hospital of institutional blood collection procedures approved for use with the clinical protocol. The leukapheresis product, blood, WBC/PBMC composition and/or T-cell composition should not be refrigerated.

[0698] The cell concentration leukapheresis product, blood, WBC/PBMC composition and/or T-cell composition should not exceed 0.2×10⁹ cells per mL during transportation. Intense mixing of the leukapheresis product, blood, WBC/PBMC composition and/or T-cell composition should be avoided.

[0699] If the leukapheresis product, blood, WBC/PBMC composition and/or T-cell composition has to be stored, e.g., overnight, it should be kept at controlled room temperature (same as above). During storage, the concentration of the leukapheresis product, blood, WBC/PBMC composition and/or T-cell composition should never exceed 0.2×10⁹ cell per mL.

[0700] Preferably, cells of the leukapheresis product, blood, WBC/PBMC composition and/or T-cell composition should be stored in autologous plasma. In certain embodiments, if the cell concentration of the leukapheresis product, blood, WBC/PBMC composition and/or T-cell composition is higher than 0.2×10⁹ cell per mL, the product should be diluted with autologous plasma.

[0701] Preferably, the leukapheresis product, blood, WBC/PBMC composition and/or T-cell composition should not be older than 24 hours when starting the labeling and separation procedure. The leukapheresis product, blood, WBC/PBMC composition and/or T-cell composition may be processed and/or prepared for cell labeling using a closed and/or automated system (e.g., CliniMACS Prodigy).

[0702] An automated system may perform additional buffy coat isolation, possibly by ficolation, and/or washing of the cellular product (e.g., the leukapheresis product, blood, WBC/PBMC composition and/or T cell composition).

[0703] A closed and/or automated system may be used to prepare and label cells for T-Cell isolation (from, for example, the leukapheresis product, blood, WBC/PBMC composition and/or T cell composition).

[0704] Although WBC/PBMCs may be nucleofected directly (which is easier and saves additional steps), the methods of the disclosure may include first isolating T cells prior to nucleofection. The easier strategy of directly nucleofecting PBMC requires selective expansion of VCAR+ cells that is mediated via VCAR signaling, which by itself is proving to be an inferior expansion method that directly reduces the in vivo efficiency of the product by rendering T cells functionally exhausted. The product may be a heterogeneous composition of VCAR+ cells including T cells, NK cells, NKT cells, monocytes, or any combination thereof, which increases the variability in product from patient to patient and makes dosing and CRS management more difficult. Since T cells are thought to be the primary effectors in tumor suppression and killing, T cell isolation for the manufacture of an autologous product may result in significant benefits over the other more heterogeneous composition.

[0705] T cells may be isolated directly, by enrichment of labeled cells or depletion of labeled cells in a one-way labeling procedure or, indirectly, in a two-step labeling procedure. According to certain enrichment strategies of the disclosure, T cells may be collected in a Cell Collection Bag and the non-labeled cells (non-target cells) in a Negative Fraction Bag. In contrast to an enrichment strategy of the disclosure, the non-labeled cells (target cells) are collected in a Cell Collection Bag and the labeled cells (non-target cells) are collected in a Negative Fraction Bag or in the Non-Target Cell Bag, respectively. Selection reagents may include, but are not limited to, antibody-coated beads. Antibody-coated beads may either be removed prior to a modification and/or an expansion step, or, retained on the cells prior to a modification and/or an expansion step. One or more of the following non-limiting examples of cellular markers may be used to isolate T-cells: CD3, CD4, CD8, CD25, anti-biotin, CD1c, CD3/CD19, CD3/CD56, CD14, CD19, CD34, CD45RA, CD56, CD62L, CD133, CD137, CD271, CD304, IFN-gamma, TCR alpha/beta, and/or any combination thereof. Methods for the isolation of T-cells may include one or more reagents that specifically bind and/or detectably-label one or more of the following non-limiting examples of cellular markers may be used to isolate T-cells: CD3, CD4, CD8, CD25, anti-biotin, CD1c, CD3/CD19, CD3/CD56, CD14, CD19, CD34, CD45RA, CD56, CD62L, CD133, CD137, CD271, CD304, IFN-gamma, TCR alpha/beta, and/or any combination thereof. These reagents may or may not be “Good Manufacturing Practices” (“GMP”) grade. Reagents may include, but are not limited to, Thermo DynaBeads and Miltenyi CliniMACS products. Methods of isolating T-cells of the disclosure may include multiple iterations of labeling and/or isolation steps. At any point in the methods of isolating T-cells of the disclosure, unwanted cells and/or unwanted cell types may be depleted from a T cell product composition of the disclosure by positively or negatively selecting for the unwanted cells and/or unwanted cell types. A T cell product composition of the disclosure may contain additional cell types that may express CD4, CD8, and/or another T cell marker(s).

[0706] Methods of the disclosure for nucleofection of T cells may eliminate the step of T cell isolation by, for example, a process for nucleofection of T cells in a population or composition of WBC/PBMCs that, following nucleofection, includes an isolation step or a selective expansion step via TCR signaling.

[0707] Certain cell populations may be depleted by positive or negative selection before or after T cell enrichment and/or sorting. Examples of cell compositions that may be depleted from a cell product composition may include myeloid cells, CD25+ regulatory T cells (T Regs), dendritic cells, macrophages, red blood cells, mast cells, gamma-delta T cells, natural killer (NK) cells, a Natural Killer (NK)-like cell (e.g., a Cytokine Induced Killer (CIK) cell), induced natural killer (iNK) T cells, NK T cells, B cells, or any combination thereof.

[0708] T cell product compositions of the disclosure may include CD4+ and CD8+ T-Cells. CD4+ and CD8+ T-Cells may be isolated into separate collection bags during an isolation or selection procedure. CD4+ T cells and CD8+ T cells may be further treated separately, or treated after reconstitution (combination into the same composition) at a particular ratio.

[0709] The particular ratio at which CD4+ T cells and CD8+ T cells may be reconstituted may depend upon the type and efficacy of expansion technology used, cell medium, and/or growth conditions utilized for expansion of T-cell product compositions. Examples of possible CD4+: CD8+ ratios include, but are not limited to, 50%:50%, 60%:40%, 40%:60% 75%:25% and 25%:75%.

[0710] CD8+ T cells exhibit a potent capacity for tumor cell killing, while CD4+ T cells provide many of the cytokines required to support CD8+ T cell proliferative capacity and function. Because T cells isolated from normal donors are predominantly CD4+, the T-cell product compositions are artificially adjusted in vitro with respect to the CD4+:CD8+ ratio to improve upon the ratio of CD4+ T cells to CD8+ T cells that would otherwise be present in vivo. An optimized ratio may also be used for the ex vivo expansion of the autologous T-cell product composition. In view of the artificially adjusted CD4+:CD8+ ratio of the T-cell product composition, it is important to note that the product compositions of the disclosure may be significantly different and provide significantly greater advantage than any endogenous-occurring population of T-cells.

[0711] Preferred methods for T cell isolation may include a negative selection strategy for yielding untouched pan T cell, meaning that the resultant T-cell composition includes T-cells that have not been manipulated and that contain an endogenously-occurring variety/ratio of T-cells.

[0712] Reagents that may be used for positive or negative selection include, but are not limited to, magnetic cell separation beads. Magnetic cell separation beads may or may not be removed or depleted from selected populations of CD4+ T cells, CD8+ T cells, or a mixed population of both CD4+ and CD8+ T cells before performing the next step in a T-cell isolation method of the disclosure.

[0713] T cell compositions and T cell product compositions may be prepared for cryopreservation, storage in standard T Cell Culture Medium, and/or genetic modification.

[0714] T cell compositions, T cell product compositions, unstimulated T cell compositions, resting T cell compositions or any portion thereof may be cryopreserved using a standard cryopreservation method optimized for storing and recovering human cells with high recovery, viability, phenotype, and/or functional capacity. Commercially-available cryopreservation media and/or protocols may be used. Cryopreservation methods of the disclosure may include a DMSO free cryopreservant (e.g., CryoSOfree™ DMSO-free Cryopreservation Medium) reduce freezing-related toxicity.

[0715] T cell compositions, T cell product compositions, unstimulated T cell compositions, resting T cell compositions or any portion thereof may be stored in a culture medium. T cell culture media of the disclosure may be optimized for cell storage, cell genetic modification, cell phenotype and/or cell expansion. T cell culture media of the disclosure may include one or more antibiotics. Because the inclusion of an antibiotic within a cell culture media may decrease transfection efficiency and/or cell yield following genetic modification via nucleofection, the specific antibiotics (or combinations thereof) and their respective concentration(s) may be altered for optimal transfection efficiency and/or cell yield following genetic modification via nucleofection.

[0716] T cell culture media of the disclosure may include serum, and, moreover, the serum composition and concentration may be altered for optimal cell outcomes. Human AB serum is preferred over FBS/FCS for culture of T cells because, although contemplated for use in T cell culture media of the disclosure, FBS/FCS may introduce xeno-proteins. Serum may be isolated form the blood of the subject for whom the T-cell composition in culture is intended for administration, thus, a T cell culture medium of the disclosure may comprise autologous serum. Serum-free media or serum-substitute may also be used in T-cell culture media of the disclosure. In certain embodiments of the T-cell culture media and methods of the disclosure, serum-free media or serum-substitute may provide advantages over supplementing the medium with xeno-serum, including, but not limited to, healthier cells that have greater viability, nucleofect with higher efficiency, exhibit greater viability post-nucleofection, display a more desirable cell phenotype, and/or greater/faster expansion upon addition of expansion technologies.

[0717] T cell culture media may include a commercially-available cell growth media. Exemplary commercially-available cell growth media include, but are not limited to, PBS, HBSS, OptiMEM, DMEM, RPMI 1640, AIM-V, X-VIVO 15, CellGro DC Medium, CTS OpTimizer T Cell Expansion SFM, TexMACS Medium, PRIME-XV T Cell Expansion Medium, ImmunoCult-XF T Cell Expansion Medium, or any combination thereof.

[0718] T cell compositions, T cell product compositions, unstimulated T cell compositions, resting T cell compositions or any portion thereof may be prepared for genetic modification. Preparation of T cell compositions, T cell product compositions, unstimulated T cell compositions, resting T cell compositions or any portion thereof for genetic modification may include cell washing and/or resuspension in a desired nucleofection buffer. Cryopreserved T-cell compositions may be thawed and prepared for genetic modification by nucleofection. Cryopreserved cells may be thawed according to standard or known protocols. Thawing and preparation of cryopreserved cells may be optimized to yield cells that have greater viability, nucleofect with higher efficiency, exhibit greater viability post-nucleofection, display a more desirable cell phenotype, and/or greater/faster expansion upon addition of expansion technologies. For example, Grifols Albutein (25% human albumin) may be used in the thawing and/or preparation process.

### Genetic Modification of an Autologous T Cell Product Composition

[0719] T cell compositions, T cell product compositions, unstimulated T cell compositions, resting T cell compositions or any portion thereof may be genetically modified using, for example, a nucleofection strategy such as electroporation. The total number of cells to be nucleofected, the total volume of the nucleofection reaction, and the precise timing of the preparation of the sample may be optimized to yield cells that have greater viability, nucleofect with higher efficiency, exhibit greater viability post-nucleofection, display a more desirable cell phenotype, and/or greater/faster expansion upon addition of expansion technologies.

[0720] Nucleofection and/or electroporation may be accomplished using, for example, Lonza Amaxa, MaxCyte PulseAgile, Harvard Apparatus BTX, and/or Invitrogen Neon. Non-metal electrode systems, including, but not limited to, plastic polymer electrodes, may be preferred for nucleofection.

[0721] Prior to genetic modification by nucleofection, T cell compositions, T cell product compositions, unstimulated T cell compositions, resting T cell compositions or any portion thereof may be resuspended in a nucleofection buffer. Nucleofection buffers of the disclosure include commercially available nucleofection buffers. Nucleofection buffers of the disclosure may be optimized to yield cells that have greater viability, nucleofect with higher efficiency, exhibit greater viability post-nucleofection, display a more desirable cell phenotype, and/or greater/faster expansion upon addition of expansion technologies. Nucleofection buffers of the disclosure may include, but are not limited to, PBS, HBSS, OptiMEM, BTXpress, Amaxa Nucleofector, Human T cell nucleofection buffer and any combination thereof. Nucleofection buffers of the disclosure may comprise one or more supplemental factors to yield cells that have greater viability, nucleofect with higher efficiency, exhibit greater viability post-nucleofection, display a more desirable cell phenotype, and/or greater/faster expansion upon addition of expansion technologies. Exemplary supplemental factors include, but are not limited to, recombinant human cytokines, chemokines, interleukins and any combination thereof. Exemplary cytokines, chemokines, and interleukins include, but are not limited to, IL2, IL7, IL12, IL15, IL21, IL1, IL3, IL4, IL5, IL6, IL8, CXCL8, IL9, IL10, ILI1, IL13, IL14, IL16, IL17, IL18, IL19, IL20, IL22, IL23, IL25, IL26, IL27, IL28, IL29, IL30, IL31, IL32, IL33, IL35, IL36, GM-CSF, IFN-gamma, IL-1 alpha/IL-1F1, IL-1 beta/IL-1F2, IL-12 p70, IL-12/IL-35 p35, IL-13, IL-17/IL-17A, IL-17A/F Heterodimer, IL-17F, IL-18/IL-1F4, IL-23, IL-24, IL-32, IL-32 beta, IL-32 gamma, IL-33, LAP (TGF-beta 1), Lymphotoxin-alpha/TNF-beta, TGF-beta, TNF-alpha, TRANCE/TNFSF11/RANK L and any combination thereof. Exemplary supplemental factors include, but are not limited to, salts, minerals, metabolites or any combination thereof. Exemplary salts, minerals, and metabolites include, but are not limited to, HEPES, Nicotinamide, Heparin, Sodium Pyruvate, L-Glutamine, MEM Non-Essential Amino Acid Solution, Ascorbic Acid, Nucleosides, FBS/FCS, Human serum, serum-substitute, anti-biotics, pH adjusters, Earle's Salts, 2-Mercaptoethanol, Human transferrin, Recombinant human insulin, Human serum albumin, Nucleofector PLUS Supplement, KCL, MgCl2, Na2HPO4, NAH2PO4, Sodium lactobionate, Manitol, Sodium succinate, Sodium Chloride, CINa, Glucose, Ca(NO₃)2, Tris/HCl, K2HPO4, KH2PO4, Polyethylenimine, Poly-ethylene-glycol, Poloxamer 188, Poloxamer 181, Poloxamer 407, Poly-vinylpyrrolidone, Pop313, Crown-5, and any combination thereof. Exemplary supplemental factors include, but are not limited to, media such as PBS, HBSS, OptiMEM, DMEM, RPMI 1640, AIM-V, X-VIVO 15, CellGro DC Medium, CTS OpTimizer T Cell Expansion SFM, TexMACS Medium, PRIME-XV T Cell Expansion Medium, ImmunoCult-XF T Cell Expansion Medium and any combination thereof. Exemplary supplemental factors include, but are not limited to, inhibitors of cellular DNA sensing, metabolism, differentiation, signal transduction, the apoptotic pathway and combinations thereof. Exemplary inhibitors include, but are not limited to, inhibitors of TLR9, MyD88, IRAK, TRAF6, TRAF3, IRF-7, NF-KB, Type 1 Interferons, pro-inflammatory cytokines, cGAS, STING, Sec5, TBK1, IRF-3, RNA pol 111, RIG-1, IPS-1, FADD, RIP1, TRAF3, AIM2, ASC, Caspasel, Pro-IL1B, P13K, Akt, Wnt3A, inhibitors of glycogen synthase kinase-3B (GSK-3 P) (e.g., TWS119), Bafilomycin, Chloroquine, Quinacrine, AC-YVAD-CMK, Z-VAD-FMK, Z-IETD-FMK and any combination thereof. Exemplary supplemental factors include, but are not limited to, reagents that modify or stabilize one or more nucleic acids in a way to enhance cellular delivery, enhance nuclear delivery or transport, enhance the facilitated transport of nucleic acid into the nucleus, enhance degradation of epi-chromosomal nucleic acid, and/or decrease DNA-mediated toxicity. Exemplary reagents that modify or stabilize one or more nucleic acids include, but are not limited to, pH modifiers, DNA-binding proteins, lipids, phospholipids, CaPO4, net neutral charge DNA binding peptides with or without NLS sequences, TREX1 enzyme, and any combination thereof.

[0722] Transposition reagents, including a transposon and a transposase, may be added to a nucleofection reaction of the disclosure prior to, simultaneously with, or after an addition of cells to a nucleofection buffer (optionally, contained within a nucleofection reaction vial or cuvette). Transposons of the disclosure may comprise plasmid DNA, linearized plasmid DNA, a PCR product, DOGGYBONE™ DNA, an mRNA template, a single or double-stranded DNA, a protein-nucleic acid combination or any combination thereof. Transposons of the disclosure may comprised one or more sequences that encode one or more TTAA site(s), one or more inverted terminal repeat(s) (ITRs), one or more long terminal repeat(s) (LTRs), one or more insulator(s), one or more promotor(s), one or more full-length or truncated gene(s), one or more polyA signal(s), one or more self-cleaving 2A peptide cleavage site(s), one or more internal ribosome entry site(s) (IRES), one or more enhancer(s), one or more regulator(s), one or more replication origin(s), and any combination thereof.

[0723] Transposons of the disclosure may comprise one or more sequences that encode one or more full-length or truncated gene(s). Full-length and/or truncated gene(s) introduced by transposons of the disclosure may encode one or more of a signal peptide, a VCAR, a single chain variable fragment (scFv), a hinge, a transmembrane domain, a costimulatory domain, a chimeric antigen receptor (CAR), a VCAR, a chimeric T-cell receptor (CAR-T or VCAR-T), a receptor, a ligand, a cytokine, a drug resistance gene, a tumor antigen, an allo or auto antigen, an enzyme, a protein, a peptide, a poly-peptide, a fluorescent protein, a mutein or any combination thereof.

[0724] Transposons of the disclosure may be prepared in water, TAE, TBE, PBS, HBSS, media, a supplemental factor of the disclosure or any combination thereof.

[0725] Transposons of the disclosure may be designed to optimize clinical safety and/or improve manufacturability. As a non-limiting example, transposons of the disclosure may be designed to optimize clinical safety and/or improve manufacturability by eliminating unnecessary sequences or regions and/or including a non-antibiotic selection marker. Transposons of the disclosure may or may not be GMP grade.

[0726] Transposase enzymes of the disclosure may be encoded by one or more sequences of plasmid DNA, mRNA, protein, protein-nucleic acid combination or any combination thereof.

[0727] Transposase enzymes of the disclosure may be prepared in water, TAE, TBE, PBS, HBSS, media, a supplemental factor of the disclosure or any combination thereof. Transposase enzymes of the disclosure or the sequences/constructs encoding or delivering them may or may not be GMP grade.

[0728] Transposons and transposase enzymes of the disclosure may be delivered to a cell by any means.

[0729] Although compositions and methods of the disclosure include delivery of a transposon and/or transposase of the disclosure to a cell by plasmid DNA (pDNA), the use of a plasmid for delivery may allow the transposon and/or transposase to be integrated into the chromosomal DNA of the cell, which may lead to continued transposase expression. Accordingly, transposon and/or transposase enzymes of the disclosure may be delivered to a cell as either mRNA or protein to remove any possibility for chromosomal integration.

[0730] Transposons and transposases of the disclosure may be pre-incubated alone or in combination with one another prior to the introduction of the transposon and/or transposase into a nucleofection reaction. The absolute amounts of each of the transposon and the transposase, as well as the relative amounts, e.g., a ratio of transposon to transposase may be optimized.

[0731] Following preparation of nucleofection reaction, optionally, in a vial or cuvette, the reaction may be loaded into a nucleofector apparatus and activated for delivery of an electric pulse according to the manufacturer's protocol. Electric pulse conditions used for delivery of a transposon and/or a transposase of the disclosure (or a sequence encoding a transposon and/or a transposase of the disclosure) to a cell may be optimized for yielding cells with enhanced viability, higher nucleofection efficiency, greater viability post-nucleofection, desirable cell phenotype, and/or greater/faster expansion upon addition of expansion technologies. When using Amaxa nucleofector technology, each of the various nucleofection programs for the Amaxa 2B or 4D nucleofector are contemplated.

[0732] Following a nucleofection reaction of the disclosure, cells may be gently added to a cell medium. For example, when T cells undergo the nucleofection reaction, the T cells may be added to a T cell medium. Post-nucleofection cell media of the disclosure may comprise any one or more commercially-available media. Post-nucleofection cell media of the disclosure (including post-nucleofection T cell media of the disclosure) may be optimized to yield cells with greater viability, higher nucleofection efficiency, exhibit greater viability post-nucleofection, display a more desirable cell phenotype, and/or greater/faster expansion upon addition of expansion technologies. Post-nucleofection cell media of the disclosure (including post-nucleofection T cell media of the disclosure) may comprise PBS, HBSS, OptiMEM, DMEM, RPMI 1640, AIM-V, X-VIVO 15, CellGro DC Medium, CTS OpTimizer T Cell Expansion SFM, TexMACS Medium, PRIME-XV T Cell Expansion Medium, ImmunoCult-XF T Cell Expansion Medium and any combination thereof. Post-nucleofection cell media of the disclosure (including post-nucleofection T cell media of the disclosure) may comprise one or more supplemental factors of the disclosure to enhance viability, nucleofection efficiency, viability post-nucleofection, cell phenotype, and/or greater/faster expansion upon addition of expansion technologies. Exemplary supplemental factors include, but are not limited to, recombinant human cytokines, chemokines, interleukins and any combination thereof. Exemplary cytokines, chemokines, and interleukins include, but are not limited to, IL2, IL7, IL12, IL15, IL21, IL1, IL3, IL4, IL5, IL6, IL8, CXCL8, IL9, IL10, ILI1, IL13, IL14, IL16, IL17, IL18, IL19, IL20, IL22, IL23, IL25, IL26, IL27, IL28, IL29, IL30, IL31, IL32, IL33, IL35, IL36, GM-CSF, IFN-gamma, IL-1 alpha/IL-1F1, IL-I beta/IL-1F2, IL-12 p70, IL-12/IL-35 p35, IL-13, IL-17/IL-17A, IL-17A/F Heterodimer, IL-17F, IL-18/IL-1F4, IL-23, IL-24, IL-32, IL-32 beta, IL-32 gamma, IL-33, LAP (TGF-beta 1), Lymphotoxin-alpha/TNF-beta, TGF-beta, TNF-alpha, TRANCE/TNFSF11/RANK L and any combination thereof. Exemplary supplemental factors include, but are not limited to, salts, minerals, metabolites or any combination thereof. Exemplary salts, minerals, and metabolites include, but are not limited to, HEPES, Nicotinamide, Heparin, Sodium Pyruvate, L-Glutamine, MEM Non-Essential Amino Acid Solution, Ascorbic Acid, Nucleosides, FBS/FCS, Human serum, serum-substitute, anti-biotics, pH adjusters, Earle's Salts, 2-Mercaptoethanol, Human transferrin, Recombinant human insulin, Human serum albumin, Nucleofector PLUS Supplement, KCL, MgCl₂, Na2HPO4, NAH2PO4, Sodium lactobionate, Manitol, Sodium succinate, Sodium Chloride, CINa, Glucose, Ca(NO₃)2, Tris/HCl, K2HPO4, KH2PO4, Polyethylenimine, Poly-ethylene-glycol, Poloxamer 188, Poloxamer 181, Poloxamer 407, Poly-vinylpyrrolidone, Pop313, Crown-5, and any combination thereof. Exemplary supplemental factors include, but are not limited to, media such as PBS, HBSS, OptiMEM, DMEM, RPMI 1640, AIM-V, X-VIVO 15, CellGro DC Medium, CTS OpTimizer T Cell Expansion SFM, TexMACS Medium, PRIME-XV T Cell Expansion Medium, ImmunoCult-XF T Cell Expansion Medium and any combination thereof. Exemplary supplemental factors include, but are not limited to, inhibitors of cellular DNA sensing, metabolism, differentiation, signal transduction, the apoptotic pathway and combinations thereof. Exemplary inhibitors include, but are not limited to, inhibitors of TLR9, MyD88, IRAK, TRAF6, TRAF3, IRF-7, NF-KB, Type 1 Interferons, pro-inflammatory cytokines, cGAS, STING, Sec5, TBK1, IRF-3, RNA pol III, RIG-1, IPS-1, FADD, RIP1, TRAF3, AIM2, ASC, Caspasel, Pro-IL1B, PI3K, Akt, Wnt3A, inhibitors of glycogen synthase kinase-3B (GSK-3 P) (e.g., TWS119), Bafilomycin, Chloroquine, Quinacrine, AC-YVAD-CMK, Z-VAD-FMK, Z-IETD-FMK and any combination thereof. Exemplary supplemental factors include, but are not limited to, reagents that modify or stabilize one or more nucleic acids in a way to enhance cellular delivery, enhance nuclear delivery or transport, enhance the facilitated transport of nucleic acid into the nucleus, enhance degradation of epi-chromosomal nucleic acid, and/or decrease DNA-mediated toxicity. Exemplary reagents that modify or stabilize one or more nucleic acids include, but are not limited to, pH modifiers, DNA-binding proteins, lipids, phospholipids, CaPO4, net neutral charge DNA binding peptides with or without NLS sequences, TREX1 enzyme, and any combination thereof.

[0733] Post-nucleofection cell media of the disclosure (including post-nucleofection T cell media of the disclosure) may be used at room temperature or pre-warmed to, for example to between 32° C. to 37° C., inclusive of the endpoints. Post-nucleofection cell media of the disclosure (including post-nucleofection T cell media of the disclosure) may be pre-warmed to any temperature that maintains or enhances cell viability and/or expression of a transposon or portion thereof of the disclosure.

[0734] Post-nucleofection cell media of the disclosure (including post-nucleofection T cell media of the disclosure) may be contained in tissue culture flasks or dishes, G-Rex flasks, Bioreactor or cell culture bags, or any other standard receptacle. Post-nucleofection cell cultures of the disclosure (including post-nucleofection T cell cultures of the disclosure) may be may be kept still, or, alternatively, they may be perturbed (e.g., rocked, swirled, or shaken).

[0735] Post-nucleofection cell cultures may comprise genetically-modified cells. Post-nucleofection T cell cultures may comprise genetically-modified T cells. Genetically modified cells of the disclosure may be either rested for a defined period of time or stimulated for expansion by, for example, the addition of a T Cell Expander technology. In certain embodiments, genetically modified cells of the disclosure may be either rested for a defined period of time or immediately stimulated for expansion by, for example, the addition of a T Cell Expander technology. Genetically modified cells of the disclosure may be rested to allow them sufficient time to acclimate, time for transposition to occur, and/or time for positive or negative selection, resulting in cells with enhanced viability, higher nucleofection efficiency, greater viability post-nucleofection, desirable cell phenotype, and/or greater/faster expansion upon addition of expansion technologies. Genetically modified cells of the disclosure may be rested, for example, for 1, 2, 3, 4, 5, 6, 7, 8, 9, 10, 11, 12, 13, 14, 15, 16, 17, 18, 19, 20, 21, 22, 23, 24, or more hours. In certain embodiments, genetically modified cells of the disclosure may be rested, for example, for an overnight. In certain aspects, an overnight is about 12 hours. Genetically modified cells of the disclosure may be rested, for example, for 1, 2, 3, 4, 5, 6, 7, 8, 9, 10, 11, 12, 13, 14 or more days.

[0736] Genetically modified cells of the disclosure may be selected following a nucleofection reaction and prior to addition of an expander technology. For optimal selection of genetically-modified cells, the cells may be allowed to rest in a post-nucleofection cell medium for at least 2-14 days to facilitate identification of modified cells (e.g., differentiation of modified from non-modified cells).

[0737] As early as 24-hours post-nucleofection, expression of a CAR/VCAR and selection marker of the disclosure may be detectable in modified T cells upon successful nucleofection of a transposon of the disclosure. Due to epi-chromosomal expression of the transposon, expression of a selection marker alone may not differentiate modified T cells (those cells in which the transposon has been successfully integrated) from unmodified T cells (those cells in which the transposon was not successfully integrated). When epi-chromosomal expression of the transposon obscures the detection of modified cells by the selection marker, the nucleofected cells (both modified and unmodified cells) may be rested for a period of time (e.g., 2-14 days) to allow the cells to cease expression or lose all epi-chromosomal transposon expression. Following this extended resting period, only modified T cells should remain positive for expression of selection marker. The length of this extended resting period may be optimized for each nucleofection reaction and selection process. When epi-chromosomal expression of the transposon obscures the detection of modified cells by the selection marker, selection may be performed without this extended resting period, however, an additional selection step may be included at a later time point (e.g., either during or after the expansion stage).

[0738] Selection of genetically modified cells of the disclosure may be performed by any means. In certain embodiments of the methods of the disclosure, selection of genetically modified cells of the disclosure may be performed by isolating cells expressing a specific selection marker. Selection markers of the disclosure may be encoded by one or more sequences in the transposon. Selection markers of the disclosure may be expressed by the modified cell as a result of successful transposition (i.e., not encoded by one or more sequences in the transposon). In certain embodiments, genetically modified cells of the disclosure contain a selection marker that confers resistance to a deleterious compound of the post-nucleofection cell medium. The deleterious compound may comprise, for example, an antibiotic or a drug that, absent the resistance conferred by the selection marker to the modified cells, would result in cell death. Exemplary selection markers include, but are not limited to, wild type (WT) or mutant forms of one or more of the following genes: neo, DHFR, TYMS, ALDH, MDR1, MGMT, FANCF, RAD51C, GCS, and NKX2.2. Exemplary selection markers include, but are not limited to, a surface-expressed selection marker or surface-expressed tag may be targeted by Ab-coated magnetic bead technology or column selection, respectively. A cleavable tag such as those used in protein purification may be added to a selection marker of the disclosure for efficient column selection, washing, and elution. In certain embodiments, selection markers of the disclosure are not expressed by the modified cells (including modified T cells) endogenously and, therefore, may be useful in the physical isolation of modified cells (by, for example, cell sorting techniques). Exemplary selection markers of the disclosure are not expressed by the modified cells (including modified T cells) endogenously include, but are not limited to, full-length, mutated, or truncated forms of CD271, CD19 CD52, CD34, RQR8, CD22, CD20, CD33 and any combination thereof.

[0739] Genetically modified cells of the disclosure may be selective expanded following a nucleofection reaction. In certain embodiments, modified T cells comprising a VCAR may be selectively expanded by VCAR stimulation. Modified T cells comprising a VCAR may be stimulated by contact with a target-covered reagent (e.g., a tumor line or a normal cell line expressing a target or expander beads covered in a target). Alternatively, modified T cells comprising a VCAR may be stimulated by contact with an irradiated tumor cell, an irradiated allogeneic normal cell, an irradiated autologous PBMC. To minimize contamination of cell product compositions of the disclosure with a target-expressing cell used for stimulation, for example, when the cell product composition may be administered directly to a subject, the stimulation may be performed using expander beads coated with VCAR target protein. Selective expansion of modified T cells comprising a VCAR by VCAR stimulation may be optimized to avoid functionally-exhausting the modified T-cells.

[0740] Selected genetically-modified cells of the disclosure may be cryopreserved, rested for a defined period of time, or stimulated for expansion by the addition of a Cell Expander technology. Selected genetically-modified cells of the disclosure may be cryopreserved, rested for a defined period of time, or immediately stimulated for expansion by the addition of a Cell Expander technology. When the selected genetically-modified cells are T cells, the T cells may be stimulated for expansion by the addition of a T-Cell Expander technology. Selected genetically modified cells of the disclosure may be rested, for example, for 1, 2, 3, 4, 5, 6, 7, 8, 9, 10, 11, 12, 13, 14, 15, 16, 17, 18, 19, 20, 21, 22, 23, 24, or more hours. In certain embodiments, selected genetically modified cells of the disclosure may be rested, for example, for an overnight. In certain aspects, an overnight is about 12 hours. Selected genetically modified cells of the disclosure may be rested, for example, for 1, 2, 3, 4, 5, 6, 7, 8, 9, 10, 11, 12, 13, 14 or more days. Selected genetically modified cells of the disclosure may be rested for any period of time resulting in cells with enhanced viability, higher nucleofection efficiency, greater viability post-nucleofection, desirable cell phenotype, and/or greater/faster expansion upon addition of expansion technologies.

[0741] Selected genetically-modified cells (including selected genetically-modified T cells of the disclosure) may be cryopreserved using any standard cryopreservation method, which may be optimized for storing and/or recovering human cells with high recovery, viability, phenotype, and/or functional capacity. Cryopreservation methods of the disclosure may include commercially-available cryopreservation media and/or protocols.

[0742] A transposition efficiency of selected genetically-modified cells (including selected genetically-modified T cells of the disclosure) may be assessed by any means. For example, prior to the application of an expander technology, expression of the transposon by selected genetically-modified cells (including selected genetically-modified T cells of the disclosure) may be measured by fluorescence-activated cell sorting (FACS). Determination of a transposition efficiency of selected genetically-modified cells (including selected genetically-modified T cells of the disclosure) may include determining a percentage of selected cells expressing the transposon (e.g., a VCAR). Alternatively, or in addition, a purity of T cells, a Mean Fluorescence Intensity (MFI) of the transposon expression (e.g., CAR expression), an ability of a VCAR (delivered in the transposon) to mediate degranulation and/or killing of a target cell expressing the VCAR ligand, and/or a phenotype of selected genetically-modified cells (including selected genetically-modified T cells of the disclosure) may be assessed by any means.

[0743] Cell product compositions of the disclosure may be released for administration to a subject upon meeting certain release criteria. Exemplary release criteria may include, but are not limited to, a particular percentage of modified, selected and/or expanded T cells expressing detectable levels of a VCAR on the cell surface.

### Genetic Modification of an Autologous T Cell Product Composition

[0744] Genetically-modified cells (including genetically-modified T cells) of the disclosure may be expanded using an expander technology. Expander technologies of the disclosure may comprise a commercially-available expander technology. Exemplary expander technologies of the disclosure include stimulation a genetically-modified T cell of the disclosure via the TCR. While all means for stimulation of a genetically-modified T cell of the disclosure are contemplated, stimulation a genetically-modified T cell of the disclosure via the TCR is a preferred method, yielding a product with a superior level of killing capacity.

[0745] To stimulate a genetically-modified T cell of the disclosure via the TCR, Thermo Expander DynaBeads may be used at a 3:1 bead to T cell ratio. If the expander beads are not biodegradable, the beads may be removed from the expander composition. For example, the beads may be removed from the expander composition after about 5 days. To stimulate a genetically-modified T cell of the disclosure via the TCR, a Miltenyi T Cell Activation/Expansion Reagent may be used. To stimulate a genetically-modified T cell of the disclosure via the TCR, StemCell Technologies' ImmunoCult Human CD3/CD28 or CD3/CD28/CD2 T Cell Activator Reagent may be used. This technology may be preferred since the soluble tetrameric antibody complexes would degrade after a period and would not require removal from the process.

[0746] Artificial antigen presenting cells (APCs) may be engineered to co-express the target antigen and may be used to stimulate a cell or T-cell of the disclosure through a TCR and/or VCAR of the disclosure. Artificial APCs may comprise or may be derived from a tumor cell line (including, for example, the immortalized myelogenous leukemia line K562) and may be engineered to co-express multiple costimulatory molecules or technologies (such as CD28, 4-1BBL, CD64, mbIL-21, mbIL-15, CAR target molecule, etc.). When artificial APCs of the disclosure are combined with costimulatory molecules, conditions may be optimized to prevent the development or emergence of an undesirable phenotype and functional capacity, namely terminally-differentiated effector T cells.

[0747] Irradiated PBMCs (auto or allo) may express some target antigens, such as CD19, and may be used to stimulate a cell or T-cell of the disclosure through a TCR and/or VCAR of the disclosure. Alternatively, or in addition, irradiated tumor cells may express some target antigens and may be used to stimulate a cell or T-cell of the disclosure through a TCR and/or VCAR of the disclosure.

[0748] Plate-bound and/or soluble anti-CD3, anti-CD2 and/or anti-CD28 stimulate may be used to stimulate a cell or T-cell of the disclosure through a TCR and/or VCAR of the disclosure.

[0749] Antigen-coated beads may display target protein and may be used to stimulate a cell or T-cell of the disclosure through a TCR and/or VCAR of the disclosure. Alternatively, or in addition, expander beads coated with a VCAR target protein may be used to stimulate a cell or T-cell of the disclosure through a TCR and/or VCAR of the disclosure.

[0750] Expansion methods drawn to stimulation of a cell or T-cell of the disclosure through the TCR or VCAR and via surface-expressed CD2, CD3, CD28, 4-1BB, and/or other markers on genetically-modified T cells.

[0751] An expansion technology may be applied to a cell of the disclosure immediately post-nucleofection until approximately 24 hours post-nucleofection. While various cell media may be used during an expansion procedure, a desirable T Cell Expansion Media of the disclosure may yield cells with, for example, greater viability, cell phenotype, total expansion, or greater capacity for in vivo persistence, engraftment, and/or CAR-mediated killing. Cell media of the disclosure may be optimized to improve/enhance expansion, phenotype, and function of genetically-modified cells of the disclosure. A preferred phenotype of expanded T cells may include a mixture of T stem cell memory, T central, and T effector memory cells. Expander Dynabeads may yield mainly central memory T cells which may lead to superior performance in the clinic.

[0752] Exemplary T cell expansion media of the disclosure may include, in part or in total, PBS, HBSS, OptiMEM, DMEM, RPMI 1640, AIM-V, X-VIVO 15, CellGro DC Medium, CTS OpTimizer T Cell Expansion SFM, TexMACS Medium, PRIME-XV T Cell Expansion Medium, ImmunoCult-XF T Cell Expansion Medium, or any combination thereof. T cell expansion media of the disclosure may further include one or more supplemental factors. Supplemental factors that may be included in a T cell expansion media of the disclosure enhance viability, cell phenotype, total expansion, or increase capacity for in vivo persistence, engraftment, and/or VCAR-mediated killing. Supplemental factors that may be included in a T cell expansion media of the disclosure include, but are not limited to, recombinant human cytokines, chemokines, and/or interleukins such as IL2, IL7, IL12, IL15, IL21, IL1, IL3, IL4, IL5, IL6, IL8, CXCL8, IL9, IL10, ILI1, IL13, IL14, IL16, IL17, IL18, IL19, IL20, IL22, IL23, IL25, IL26, IL27, IL28, IL29, IL30, IL31, IL32, IL33, IL35, IL36, GM-CSF, IFN-gamma, IL-1 alpha/IL-1F1, IL-1 beta/IL-1F2, IL-12 p70, IL-12/IL-35 p35, IL-13, IL-17/IL-17A, IL-17A/F Heterodimer, IL-17F, IL-18/IL-1F4, IL-23, IL-24, IL-32, IL-32 beta, IL-32 gamma, IL-33, LAP (TGF-beta 1), Lymphotoxin-alpha/TNF-beta, TGF-beta, TNF-alpha, TRANCE/TNFSF11/RANK L, or any combination thereof. Supplemental factors that may be included in a T cell expansion media of the disclosure include, but are not limited to, salts, minerals, and/or metabolites such as HEPES, Nicotinamide, Heparin, Sodium Pyruvate, L-Glutamine, MEM Non-Essential Amino Acid Solution, Ascorbic Acid, Nucleosides, FBS/FCS, Human serum, serum-substitute, anti-biotics, pH adjusters, Earle's Salts, 2-Mercaptoethanol, Human transferrin, Recombinant human insulin, Human serum albumin, Nucleofector PLUS Supplement, KCL, MgCl₂, Na2HPO4, NAH2PO4, Sodium lactobionate, Manitol, Sodium succinate, Sodium Chloride, CINa, Glucose, Ca(NO₃)2, Tris/HCl, K2HPO4, KH2PO4, Polyethylenimine, Poly-ethylene-glycol, Poloxamer 188, Poloxamer 181, Poloxamer 407, Poly-vinylpyrrolidone, Pop313, Crown-5 or any combination thereof. Supplemental factors that may be included in a T cell expansion media of the disclosure include, but are not limited to, inhibitors of cellular DNA sensing, metabolism, differentiation, signal transduction, and/or the apoptotic pathway such as inhibitors of TLR9, MyD88, IRAK, TRAF6, TRAF3, IRF-7, NF-KB, Type 1 Interferons, pro-inflammatory cytokines, cGAS, STING, Sec5, TBK1, IRF-3, RNA pol III, RIG-1, IPS-1, FADD, RIP1, TRAF3, AIM2, ASC, Caspasel, Pro-IL1B, PI3K, Akt, Wnt3A, inhibitors of glycogen synthase kinase-3B (GSK-3 P) (e.g., TWS119), Bafilomycin, Chloroquine, Quinacrine, AC-YVAD-CMK, Z-VAD-FMK, Z-IETD-FMK, or any combination thereof.

[0753] Supplemental factors that may be included in a T cell expansion media of the disclosure include, but are not limited to, reagents that modify or stabilize nucleic acids in a way to enhance cellular delivery, enhance nuclear delivery or transport, enhance the facilitated transport of nucleic acid into the nucleus, enhance degradation of epi-chromosomal nucleic acid, and/or decrease DNA-mediated toxicity, such as pH modifiers, DNA-binding proteins, lipids, phospholipids, CaPO4, net neutral charge DNA binding peptides with or without NLS sequences, TREX1 enzyme, or any combination thereof.

[0754] Genetically-modified cells of the disclosure may be selected during the expansion process by the use of selectable drugs or compounds. For example, in certain embodiments, when a transposon of the disclosure may encode a selection marker that confers to genetically-modified cells resistance to a drug added to the culture medium, selection may occur during the expansion process and may require approximately 1-14 days of culture for selection to occur. Examples of drug resistance genes that may be used as selection markers encoded by a transposon of the disclosure, include, but are not limited to, wild type (WT) or mutant forms of the genes neo, DHFR, TYMS, ALDH, MDR1, MGMT, FANCF, RAD51C, GCS, NKX2.2, or any combination thereof. Examples of corresponding drugs or compounds that may be added to the culture medium to which a selection marker may confer resistance include, but are not limited to, G418, Puromycin, Ampicillin, Kanamycin, Methotrexate, Mephalan, Temozolomide, Vincristine, Etoposide, Doxorubicin, Bendamustine, Fludarabine, Aredia (Pamidronate Disodium), Becenum (Carmustine), BiCNU (Carmustine), Bortezomib, Carfilzomib, Carmubris (Carmustine), Carmustine, Clafen (Cyclophosphamide), Cyclophosphamide, Cytoxan (Cyclophosphamide), Daratumumab, Darzalex (Daratumumab), Doxil (Doxorubicin Hydrochloride Liposome), Doxorubicin Hydrochloride Liposome, Dox-SL (Doxorubicin Hydrochloride Liposome), Elotuzumab, Empliciti (Elotuzumab), Evacet (Doxorubicin Hydrochloride Liposome), Farydak (Panobinostat), Ixazomib Citrate, Kyprolis (Carfilzomib), Lenalidomide, LipoDox (Doxorubicin Hydrochloride Liposome), Mozobil (Plerixafor), Neosar (Cyclophosphamide), Ninlaro (Ixazomib Citrate), Pamidronate Disodium, Panobinostat, Plerixafor, Pomalidomide, Pomalyst (Pomalidomide), Revlimid (Lenalidomide), Synovir (Thalidomide), Thalidomide, Thalomid (Thalidomide), Velcade (Bortezomib), Zoledronic Acid, Zometa (Zoledronic Acid), or any combination thereof.

[0755] A T-Cell Expansion process of the disclosure may occur in a cell culture bag in a WAVE Bioreactor, a G-Rex flask, or in any other suitable container and/or reactor.

[0756] A cell or T-cell culture of the disclosure may be kept steady, rocked, swirled, or shaken.

[0757] A cell or T-cell expansion process of the disclosure may optimize certain conditions, including, but not limited to culture duration, cell concentration, schedule for T cell medium addition/removal, cell size, total cell number, cell phenotype, purity of cell population, percentage of genetically-modified cells in growing cell population, use and composition of supplements, the addition/removal of expander technologies, or any combination thereof.

[0758] A cell or T-cell expansion process of the disclosure may continue until a predefined endpoint prior to formulation of the resultant expanded cell population. For example, a cell or T-cell expansion process of the disclosure may continue for a predetermined amount of time: at least, 2, 4, 6, 8, 10, 12, 14, 16, 18, 20, 22, 24 hours; at least 1, 2, 3, 4, 5, 6, 7, 8, 9, 10, 11, 12, 13, 14, 15, 16, 17, 18, 19, 20, 21, 22, 23, 24, 25, 26, 27, 28, 29, 30 days; at least 1, 2, 3, 4, 5, 6, 7, 8, 9, 10, 11, 12 weeks; at least 1, 2, 3, 4, 5, 6, months, or at least 1 year. A cell or T-cell expansion process of the disclosure may continue until the resultant culture reaches a predetermined overall cell density: 1, 10, 100, 1000, 104, 105, 106, 107, 108, 109, 1010 cells per volume (μl, ml, L) or any density in between. A cell or T-cell expansion process of the disclosure may continue until the genetically-modified cells of a resultant culture demonstrate a predetermined level of expression of a transposon of the disclosure: 1%, 10%, 20%, 30%, 40%, 50%, 60%, 70%, 80%, 90%, or 100% or any percentage in between of a threshold level of expression (a minimum, maximum or mean level of expression indicating the resultant genetically-modified cells are clinically-efficacious). A cell or T-cell expansion process of the disclosure may continue until the proportion of genetically-modified cells of a resultant culture to the proportion of unmodified cells reaches a predetermined threshold: at least 1:10, 1:9, 1:8, 1:7, 1:6, 1:5, 1:4, 1:3, 1:2, 1:1, 2:1, 2:1, 4:1, 5:1, 6:1,7:1, 8:1, 9:1 10:1 or any ratio in between.

### Analysis of Genetically-Modified Autologous T Cells for Release

[0759] A percentage of genetically-modified cells may be assessed during or after an expansion process of the disclosure. Cellular expression of a transposon by a genetically-modified cell of the disclosure may be measured by fluorescence-activated cell sorting (FACS). For example, FACS may be used to determine a percentage of cells or T cells expressing a VCAR of the disclosure. Alternatively, or in addition, a purity of genetically-modified cells or T cells, the Mean Fluorescence Intensity (MFI) of a VCAR expressed by a genetically-modified cell or T cell of the disclosure, an ability of the VCAR to mediate degranulation and/or killing of a target cell expressing the VCAR ligand, and/or a phenotype of VCAR+ T cells may be assessed.

[0760] Compositions of the disclosure intended for administration to a subject may be required to meet one or more “release criteria” that indicate that the composition is safe and efficacious for formulation as a pharmaceutical product and/or administration to a subject. Release criteria may include a requirement that a composition of the disclosure (e.g., a T-cell product of the disclosure) comprises a particular percentage of T cells expressing detectable levels of a VCAR of the disclosure on their cell surface.

[0761] The expansion process should be continued until a specific criterion has been met (e.g., achieving a certain total number of cells, achieving a particular population of memory cells, achieving a population of a specific size).

[0762] Certain criterion signal a point at which the expansion process should end. For example, cells should be formulated, reactivated, or cryopreserved once they reach a cell size of 300 fL (otherwise, cells reaching a size above this threshold may start to die). Cryopreservation immediately once a population of cells reaches an average cell size of less than 300 fL may yield better cell recovery upon thawing and culture because the cells haven't yet reached a fully quiescent state prior to cryopreservation (a fully quiescent size is approximately 180 fL). Prior to expansion, T cells of the disclosure may have a cell size of about 180 fL, but may more than quadruple their cell size to approximately 900 fL at 3 days post-expansion. Over the next 6-12 days, the population of T-cells will slowly decrease cell size to full quiescence at 180 fL.

[0763] A process for preparing a cell population for formulation may include, but is not limited to the steps of, concentrating the cells of the cell population, washing the cells, and/or further selection of the cells via drug resistance or magnetic bead sorting against a particular surface-expressed marker. A process for preparing a cell population for formulation may further include a sorting step to ensure the safety and purity of the final product. For example, if a tumor cell from a patient has been used to stimulate a genetically-modified T-cell of the disclosure or that have been genetically-modified in order to stimulate a genetically-modified T-cell of the disclosure that is being prepared for formulation, it is critical that no tumor cells from the patient are included in the final product.

Cell Product Infusion and/or Cryopreservation for Infusion

[0764] A pharmaceutical formulation of the disclosure may be distributed into bags for infusion, cryopreservation, and/or storage.

[0765] A pharmaceutical formulation of the disclosure may be cryopreserved using a standard protocol and, optionally, an infusible cryopreservation medium. For example, a DMSO free cryopreservant (e.g., CryoSOfree™ DMSO-free Cryopreservation Medium) may be used to reduce freezing-related toxicity. A cryopreserved pharmaceutical formulation of the disclosure may be stored for infusion to a patient at a later date. An effective treatment may require multiple administrations of a pharmaceutical formulation of the disclosure and, therefore, pharmaceutical formulations may be packaged in pre-aliquoted “doses” that may be stored frozen but separated for thawing of individual doses.

[0766] A pharmaceutical formulation of the disclosure may be stored at room temperature. An effective treatment may require multiple administrations of a pharmaceutical formulation of the disclosure and, therefore, pharmaceutical formulations may be packaged in pre-aliquoted “doses” that may be stored together but separated for administration of individual doses.

[0767] A pharmaceutical formulation of the disclosure may be archived for subsequent re-expansion and/or selection for generation of additional doses to the same patient in the case of an allogenic therapy who may need an administration at a future date following, for example, a remission and relapse of a condition.

### Formulations

[0768] As noted above, the disclosure provides for stable formulations, which preferably comprise a phosphate buffer with saline or a chosen salt, as well as preserved solutions and formulations containing a preservative as well as multi-use preserved formulations suitable for pharmaceutical or veterinary use, comprising at least one VCAR in a pharmaceutically acceptable formulation. Preserved formulations contain at least one known preservative or optionally selected from the group consisting of at least one phenol, m-cresol, β-cresol, o-cresol, chlorocresol, benzyl alcohol, phenylmercuric nitrite, phenoxyethanol, formaldehyde, chlorobutanol, magnesium chloride (e.g., hexahydrate), alkylparaben (methyl, ethyl, propyl, butyl and the like), benzalkonium chloride, benzethonium chloride, sodium dehydroacetate and thimerosal, polymers, or mixtures thereof in an aqueous diluent. Any suitable concentration or mixture can be used as known in the art, such as about 0.0015%, or any range, value, or fraction therein. Non-limiting examples include, no preservative, about 0.1-2% m-cresol (e.g., 0.2, 0.3. 0.4, 0.5, 0.9, 1.0%), about 0.1-3% benzyl alcohol (e.g., 0.5, 0.9, 1.1, 1.5, 1.9, 2.0, 2.5%), about 0.001-0.5% thimerosal (e.g., 0.005, 0.01), about 0.001-2.0% phenol (e.g., 0.05, 0.25, 0.28, 0.5, 0.9, 1.0%), 0.0005-1.0% alkylparaben(s) (e.g., 0.00075, 0.0009, 0.001, 0.002, 0.005, 0.0075, 0.009, 0.01, 0.02, 0.05, 0.075, 0.09, 0.1, 0.2, 0.3, 0.5, 0.75, 0.9, 1.0%), and the like.

[0769] As noted above, the invention provides an article of manufacture, comprising packaging material and at least one vial comprising a solution of at least one VCAR with the prescribed buffers and/or preservatives, optionally in an aqueous diluent, wherein said packaging material comprises a label that indicates that such solution can be held over a period of 1, 2, 3, 4, 5, 6, 9, 12, 18, 20, 24, 30, 36, 40, 48, 54, 60, 66, 72 hours or greater. The invention further comprises an article of manufacture, comprising packaging material, a first vial comprising lyophilized at least one VCAR, and a second vial comprising an aqueous diluent of prescribed buffer or preservative, wherein said packaging material comprises a label that instructs a patient to reconstitute the at least one VCAR in the aqueous diluent to form a solution that can be held over a period of twenty-four hours or greater.

[0770] The at least one VCAR used in accordance with the present invention can be produced by recombinant means, including from mammalian cell or transgenic preparations, or can be purified from other biological sources, as described herein or as known in the art.

[0771] The range of at least one VCAR in the product of the present invention includes amounts yielding upon reconstitution, if in a wet/dry system, concentrations from about 1.0 μg/ml to about 1000 mg/ml, although lower and higher concentrations are operable and are dependent on the intended delivery vehicle, e.g., solution formulations will differ from transdermal patch, pulmonary, transmucosal, or osmotic or micro pump methods.

[0772] Preferably, the aqueous diluent optionally further comprises a pharmaceutically acceptable preservative. Preferred preservatives include those selected from the group consisting of phenol, m-cresol, β-cresol, o-cresol, chlorocresol, benzyl alcohol, alkylparaben (methyl, ethyl, propyl, butyl and the like), benzalkonium chloride, benzethonium chloride, sodium dehydroacetate and thimerosal, or mixtures thereof. The concentration of preservative used in the formulation is a concentration sufficient to yield an anti-microbial effect. Such concentrations are dependent on the preservative selected and are readily determined by the skilled artisan.

[0773] Other excipients, e.g., isotonicity agents, buffers, antioxidants, and preservative enhancers, can be optionally and preferably added to the diluent. An isotonicity agent, such as glycerin, is commonly used at known concentrations. A physiologically tolerated buffer is preferably added to provide improved pH control. The formulations can cover a wide range of pHs, such as from about pH 4 to about pH 10, and preferred ranges from about pH 5 to about pH 9, and a most preferred range of about 6.0 to about 8.0. Preferably, the formulations of the present invention have a pH between about 6.8 and about 7.8. Preferred buffers include phosphate buffers, most preferably, sodium phosphate, particularly, phosphate buffered saline (PBS).

[0774] Other additives, such as a pharmaceutically acceptable solubilizers like Tween 20 (polyoxyethylene (20) sorbitan monolaurate), Tween 40 (polyoxyethylene (20) sorbitan monopalmitate), Tween 80 (polyoxyethylene (20) sorbitan monooleate), Pluronic F68 (polyoxyethylene polyoxypropylene block copolymers), and PEG (polyethylene glycol) or non-ionic surfactants, such as polysorbate 20 or 80 or poloxamer 184 or 188, Pluronic® polyls, other block co-polymers, and chelators, such as EDTA and EGTA, can optionally be added to the formulations or compositions to reduce aggregation. These additives are particularly useful if a pump or plastic container is used to administer the formulation. The presence of pharmaceutically acceptable surfactant mitigates the propensity for the protein to aggregate.

[0775] The formulations of the present invention can be prepared by a process which comprises mixing at least one VCAR and a preservative selected from the group consisting of phenol, m-cresol, p-cresol, o-cresol, chlorocresol, benzyl alcohol, alkylparaben, (methyl, ethyl, propyl, butyl and the like), benzalkonium chloride, benzethonium chloride, sodium dehydroacetate and thimerosal or mixtures thereof in an aqueous diluent. Mixing the at least one VCAR and preservative in an aqueous diluent is carried out using conventional dissolution and mixing procedures. To prepare a suitable formulation, for example, a measured amount of at least one VCAR in buffered solution is combined with the desired preservative in a buffered solution in quantities sufficient to provide the protein and preservative at the desired concentrations. Variations of this process would be recognized by one of ordinary skill in the art. For example, the order the components are added, whether additional additives are used, the temperature and pH at which the formulation is prepared, are all factors that can be optimized for the concentration and means of administration used.

[0776] The claimed formulations can be provided to patients as clear solutions or as dual vials comprising a vial of lyophilized at least one VCAR that is reconstituted with a second vial containing water, a preservative and/or excipients, preferably, a phosphate buffer and/or saline and a chosen salt, in an aqueous diluent. Either a single solution vial or dual vial requiring reconstitution can be reused multiple times and can suffice for a single or multiple cycles of patient treatment and thus can provide a more convenient treatment regimen than currently available.

[0777] The present claimed articles of manufacture are useful for administration over a period ranging from immediate to twenty-four hours or greater. Accordingly, the presently claimed articles of manufacture offer significant advantages to the patient. Formulations of the invention can optionally be safely stored at temperatures of from about 2° C. to about 40° C. and retain the biological activity of the protein for extended periods of time, thus allowing a package label indicating that the solution can be held and/or used over a period of 6, 12, 18, 24, 36, 48, 72, or 96 hours or greater. If preserved diluent is used, such label can include use up to 1-12 months, one-half, one and a half, and/or two years.

[0778] The solutions of at least one VCAR of the invention can be prepared by a process that comprises mixing at least one VCAR in an aqueous diluent. Mixing is carried out using conventional dissolution and mixing procedures. To prepare a suitable diluent, for example, a measured amount of at least one VCAR in water or buffer is combined in quantities sufficient to provide the protein and, optionally, a preservative or buffer at the desired concentrations. Variations of this process would be recognized by one of ordinary skill in the art. For example, the order the components are added, whether additional additives are used, the temperature and pH at which the formulation is prepared, are all factors that can be optimized for the concentration and means of administration used.

[0779] The claimed products can be provided to patients as clear solutions or as dual vials comprising a vial of lyophilized at least one VCAR that is reconstituted with a second vial containing the aqueous diluent. Either a single solution vial or dual vial requiring reconstitution can be reused multiple times and can suffice for a single or multiple cycles of patient treatment and thus provides a more convenient treatment regimen than currently available.

[0780] The claimed products can be provided indirectly to patients by providing to pharmacies, clinics, or other such institutions and facilities, clear solutions or dual vials comprising a vial of lyophilized at least one VCAR that is reconstituted with a second vial containing the aqueous diluent. The clear solution in this case can be up to one liter or even larger in size, providing a large reservoir from which smaller portions of the at least one VCAR solution can be retrieved one or multiple times for transfer into smaller vials and provided by the pharmacy or clinic to their customers and/or patients.

[0781] Recognized devices comprising single vial systems include pen-injector devices for delivery of a solution, such as BD Pens, BD Autojector®, Humaject®, NovoPen®, B-D® Pen, AutoPen®, and OptiPen®, GenotropinPen®, Genotronorm Pen@, Humatro Pen@, Reco-Pen®, Roferon Pen@, Biojector®, Iject®, J-tip Needle-Free Injector@, Intraject®, Medi-Ject®, e.g., as made or developed by Becton Dickinson (Franklin Lakes, N.J., www.bectondickenson.com), Disetronic (Burgdorf, Switzerland, www.disetronic.com; Bioject, Portland, Oreg. (www.bioject.com); National Medical Products, Weston Medical (Peterborough, UK, www.weston-medical.com), Medi-Ject Corp (Minneapolis, Minn., www.mediject.com), and similarly suitable devices. Recognized devices comprising a dual vial system include those pen-injector systems for reconstituting a lyophilized drug in a cartridge for delivery of the reconstituted solution, such as the HumatroPen®. Examples of other devices suitable include pre-filled syringes, auto-injectors, needle free injectors and needle free IV infusion sets.

[0782] The products presently claimed include packaging material. The packaging material provides, in addition to the information required by the regulatory agencies, the conditions under which the product can be used. The packaging material of the present invention provides instructions to the patient to reconstitute at least one VCAR in the aqueous diluent to form a solution and to use the solution over a period of 2-24 hours or greater for the two vial, wet/dry, product. For the single vial, solution product, the label indicates that such solution can be used over a period of 2-24 hours or greater. The presently claimed products are useful for human pharmaceutical product use.

[0783] The formulations of the present invention can be prepared by a process that comprises mixing at least one VCAR and a selected buffer, preferably, a phosphate buffer containing saline or a chosen salt. Mixing at least one VCAR and buffer in an aqueous diluent is carried out using conventional dissolution and mixing procedures. To prepare a suitable formulation, for example, a measured amount of at least one VCAR in water or buffer is combined with the desired buffering agent in water in quantities sufficient to provide the protein and buffer at the desired concentrations. Variations of this process would be recognized by one of ordinary skill in the art. For example, the order the components are added, whether additional additives are used, the temperature and pH at which the formulation is prepared, are all factors that can be optimized for the concentration and means of administration used.

[0784] The claimed stable or preserved formulations can be provided to patients as clear solutions or as dual vials comprising a vial of lyophilized VCAR that is reconstituted with a second vial containing a preservative or buffer and excipients in an aqueous diluent. Either a single solution vial or dual vial requiring reconstitution can be reused multiple times and can suffice for a single or multiple cycles of patient treatment and thus provides a more convenient treatment regimen than currently available.

[0785] Other formulations or methods of stabilizing the VCAR may result in other than a clear solution of lyophilized powder comprising the VCAR. Among non-clear solutions are formulations comprising particulate suspensions, said particulates being a composition containing the VCAR in a structure of variable dimension and known variously as a microsphere, microparticle, nanoparticle, nanosphere, or liposome. Such relatively homogenous, essentially spherical, particulate formulations containing an active agent can be formed by contacting an aqueous phase containing the active agent and a polymer and a nonaqueous phase followed by evaporation of the nonaqueous phase to cause the coalescence of particles from the aqueous phase as taught in U.S. Pat. No. 4,589,330. Porous microparticles can be prepared using a first phase containing active agent and a polymer dispersed in a continuous solvent and removing said solvent from the suspension by freeze-drying or dilution-extraction-precipitation as taught in U.S. Pat. No. 4,818,542. Preferred polymers for such preparations are natural or synthetic copolymers or polymers selected from the group consisting of gelatin agar, starch, arabinogalactan, albumin, collagen, polyglycolic acid, polylactic aced, glycolide-L(−) lactide poly(episilon-caprolactone, poly(epsilon-caprolactone-CO-lactic acid), poly(epsilon-caprolactone-CO-glycolic acid), poly(β-hydroxy butyric acid), polyethylene oxide, polyethylene, poly(alkyl-2-cyanoacrylate), poly(hydroxyethyl methacrylate), polyamides, poly(amino acids), poly(2-hydroxyethyl DL-aspartamide), poly(ester urea), poly(L-phenylalanine/ethylene glycol/1,6-diisocyanatohexane) and poly(methyl methacrylate). Particularly preferred polymers are polyesters, such as polyglycolic acid, polylactic aced, glycolide-L(−) lactide poly(episilon-caprolactone, poly(epsilon-caprolactone-CO-lactic acid), and poly(epsilon-caprolactone-CO-glycolic acid. Solvents useful for dissolving the polymer and/or the active include: water, hexafluoroisopropanol, methylenechloride, tetrahydrofuran, hexane, benzene, or hexafluoroacetone sesquihydrate. The process of dispersing the active containing phase with a second phase may include pressure forcing said first phase through an orifice in a nozzle to affect droplet formation.

[0786] Dry powder formulations may result from processes other than lyophilization, such as by spray drying or solvent extraction by evaporation or by precipitation of a crystalline composition followed by one or more steps to remove aqueous or nonaqueous solvent. Preparation of a spray-dried VCAR preparation is taught in U.S. Pat. No. 6,019,968. The VCAR-based dry powder compositions may be produced by spray drying solutions or slurries of the VCAR and, optionally, excipients, in a solvent under conditions to provide a respirable dry powder. Solvents may include polar compounds, such as water and ethanol, which may be readily dried. VCAR stability may be enhanced by performing the spray drying procedures in the absence of oxygen, such as under a nitrogen blanket or by using nitrogen as the drying gas. Another relatively dry formulation is a dispersion of a plurality of perforated microstructures dispersed in a suspension medium that typically comprises a hydrofluoroalkane propellant as taught in WO 9916419. The stabilized dispersions may be administered to the lung of a patient using a metered dose inhaler. Equipment useful in the commercial manufacture of spray dried medicaments are manufactured by Buchi Ltd. or Niro Corp.

[0787] At least one VCAR in either the stable or preserved formulations or solutions described herein, can be administered to a patient in accordance with the present invention via a variety of delivery methods including SC or IM injection; transdermal, pulmonary, transmucosal, implant, osmotic pump, cartridge, micro pump, or other means appreciated by the skilled artisan, as well-known in the art.

### Therapeutic Applications

[0788] The present invention also provides a method for modulating or treating a disease, in a cell, tissue, organ, animal, or patient, as known in the art or as described herein, using at least one VCAR of the present invention, e.g., administering or contacting the cell, tissue, organ, animal, or patient with a therapeutic effective amount of VCAR. The present invention also provides a method for modulating or treating a disease, in a cell, tissue, organ, animal, or patient including, but not limited to, a malignant disease.

[0789] The present invention also provides a method for modulating or treating at least one malignant disease in a cell, tissue, organ, animal or patient, including, but not limited to, at least one of: leukemia, acute leukemia, acute lymphoblastic leukemia (ALL), acute lymphocytic leukemia, B-cell, T-cell or FAB ALL, acute myeloid leukemia (AML), acute myelogenous leukemia, chronic myelocytic leukemia (CML), chronic lymphocytic leukemia (CLL), hairy cell leukemia, myelodyplastic syndrome (MDS), a lymphoma, Hodgkin's disease, a malignant lymphoma, non-Hodgkin's lymphoma, Burkitt's lymphoma, multiple myeloma, Kaposi's sarcoma, colorectal carcinoma, pancreatic carcinoma, nasopharyngeal carcinoma, malignant histiocytosis, paraneoplastic syndrome/hypercalcemia of malignancy, solid tumors, bladder cancer, breast cancer, colorectal cancer, endometrial cancer, head cancer, neck cancer, hereditary nonpolyposis cancer, Hodgkin's lymphoma, liver cancer, lung cancer, non-small cell lung cancer, ovarian cancer, pancreatic cancer, prostate cancer, renal cell carcinoma, testicular cancer, adenocarcinomas, sarcomas, malignant melanoma, hemangioma, metastatic disease, cancer related bone resorption, cancer related bone pain, and the like.

[0790] Any method of the present invention can comprise administering an effective amount of a composition or pharmaceutical composition comprising at least one VCAR to a cell, tissue, organ, animal or patient in need of such modulation, treatment or therapy. Such a method can optionally further comprise co-administration or combination therapy for treating such diseases or disorders, wherein the administering of said at least one VCAR, specified portion or variant thereof, further comprises administering, before concurrently, and/or after, at least one selected from at least one of an alkylating agent, an a mitotic inhibitor, and a radiopharmaceutical. Suitable dosages are well known in the art. See, e.g., Wells et al., eds., Pharmacotherapy Handbook, 2nd Edition, Appleton and Lange, Stamford, Conn. (2000); PDR Pharmacopoeia, Tarascon Pocket Pharmacopoeia 2000, Deluxe Edition, Tarascon Publishing, Loma Linda, Calif. (2000); Nursing 2001 Handbook of Drugs, 21st edition, Springhouse Corp., Springhouse, Pa., 2001; Health Professional's Drug Guide 2001, ed., Shannon, Wilson, Stang, Prentice-Hall, Inc, Upper Saddle River, N.J. each of which references are entirely incorporated herein by reference.

[0791] Preferred doses can optionally include about 0.1-99 and/or 100-500 mg/kg/administration, or any range, value or fraction thereof, or to achieve a serum concentration of about 0.1-5000 μg/ml serum concentration per single or multiple administration, or any range, value or fraction thereof. A preferred dosage range for the VCAR of the present invention is from about 1 mg/kg, up to about 3, about 6 or about 12 mg/kg of body weight of the patient.

[0792] Alternatively, the dosage administered can vary depending upon known factors, such as the pharmacodynamic characteristics of the particular agent, and its mode and route of administration; age, health, and weight of the recipient; nature and extent of symptoms, kind of concurrent treatment, frequency of treatment, and the effect desired. Usually a dosage of active ingredient can be about 0.1 to 100 milligrams per kilogram of body weight. Ordinarily 0.1 to 50, and preferably, 0.1 to 10 milligrams per kilogram per administration or in sustained release form is effective to obtain desired results.

[0793] As a non-limiting example, treatment of humans or animals can be provided as a one-time or periodic dosage of at least one VCAR of the present invention about 0.1 to 100 mg/kg or any range, value or fraction thereof per day, on at least one of day 1-40, or, alternatively or additionally, at least one of week 1-52, or, alternatively or additionally, at least one of 1-20 years, or any combination thereof, using single, infusion or repeated doses.

[0794] Dosage forms (composition) suitable for internal administration generally contain from about 0.001 milligram to about 500 milligrams of active ingredient per unit or container. In these pharmaceutical compositions the active ingredient will ordinarily be present in an amount of about 0.5-99.999% by weight based on the total weight of the composition.

[0795] For parenteral administration, the VCAR can be formulated as a solution, suspension, emulsion, particle, powder, or lyophilized powder in association, or separately provided, with a pharmaceutically acceptable parenteral vehicle. Examples of such vehicles are water, saline, Ringer's solution, dextrose solution, and about 1-10% human serum albumin. Liposomes and nonaqueous vehicles, such as fixed oils, can also be used. The vehicle or lyophilized powder can contain additives that maintain isotonicity (e.g., sodium chloride, mannitol) and chemical stability (e.g., buffers and preservatives). The formulation is sterilized by known or suitable techniques.

[0796] Suitable pharmaceutical carriers are described in the most recent edition of Remington's Pharmaceutical Sciences, A. Osol, a standard reference text in this field.

### Alternative Administration

[0797] Many known and developed modes can be used according to the present invention for administering pharmaceutically effective amounts of at least one VCAR according to the present invention. While pulmonary administration is used in the following description, other modes of administration can be used according to the present invention with suitable results. VCARs of the present invention can be delivered in a carrier, as a solution, emulsion, colloid, or suspension, or as a dry powder, using any of a variety of devices and methods suitable for administration by inhalation or other modes described here within or known in the art.

### Parenteral Formulations and Administration

[0798] Formulations for parenteral administration can contain as common excipients sterile water or saline, polyalkylene glycols, such as polyethylene glycol, oils of vegetable origin, hydrogenated naphthalenes and the like. Aqueous or oily suspensions for injection can be prepared by using an appropriate emulsifier or humidifier and a suspending agent, according to known methods. Agents for injection can be a non-toxic, non-orally administrable diluting agent, such as aqueous solution, a sterile injectable solution or suspension in a solvent. As the usable vehicle or solvent, water, Ringer's solution, isotonic saline, etc. are allowed; as an ordinary solvent or suspending solvent, sterile involatile oil can be used. For these purposes, any kind of involatile oil and fatty acid can be used, including natural or synthetic or semisynthetic fatty oils or fatty acids; natural or synthetic or semisynthtetic mono- or di- or tri-glycerides. Parental administration is known in the art and includes, but is not limited to, conventional means of injections, a gas pressured needle-less injection device as described in U.S. Pat. No. 5,851,198, and a laser perforator device as described in U.S. Pat. No. 5,839,446 entirely incorporated herein by reference.

### Alternative Delivery

[0799] The invention further relates to the administration of at least one VCAR by parenteral, subcutaneous, intramuscular, intravenous, intraarticular, intrabronchial, intraabdominal, intracapsular, intracartilaginous, intracavitary, intracelial, intracerebellar, intracerebroventricular, intracolic, intracervical, intragastric, intrahepatic, intramyocardial, intraosteal, intrapelvic, intrapericardiac, intraperitoneal, intrapleural, intraprostatic, intrapulmonary, intrarectal, intrarenal, intraretinal, intraspinal, intrasynovial, intrathoracic, intrauterine, intravesical, intralesional, bolus, vaginal, rectal, buccal, sublingual, intranasal, or transdermal means. At least one VCAR composition can be prepared for use for parenteral (subcutaneous, intramuscular or intravenous) or any other administration particularly in the form of liquid solutions or suspensions; for use in vaginal or rectal administration particularly in semisolid forms, such as, but not limited to, creams and suppositories; for buccal, or sublingual administration, such as, but not limited to, in the form of tablets or capsules; or intranasally, such as, but not limited to, the form of powders, nasal drops or aerosols or certain agents; or transdermally, such as not limited to a gel, ointment, lotion, suspension or patch delivery system with chemical enhancers such as dimethyl sulfoxide to either modify the skin structure or to increase the drug concentration in the transdermal patch (Junginger, et al. In “Drug Permeation Enhancement;” Hsieh, D. S., Eds., pp. 59-90 (Marcel Dekker, Inc. New York 1994, entirely incorporated herein by reference), or with oxidizing agents that enable the application of formulations containing proteins and peptides onto the skin (WO 98/53847), or applications of electric fields to create transient transport pathways, such as electroporation, or to increase the mobility of charged drugs through the skin, such as iontophoresis, or application of ultrasound, such as sonophoresis (U.S. Pat. Nos. 4,309,989 and 4,767,402) (the above publications and patents being entirely incorporated herein by reference).

### Pulmonary/Vasal Administration

[0800] For pulmonary administration, preferably, at least one VCAR composition is delivered in a particle size effective for reaching the lower airways of the lung or sinuses. According to the invention, at least one VCAR can be delivered by any of a variety of inhalation or nasal devices known in the art for administration of a therapeutic agent by inhalation. These devices capable of depositing aerosolized formulations in the sinus cavity or alveoli of a patient include metered dose inhalers, nebulizers, dry powder generators, sprayers, and the like. Other devices suitable for directing the pulmonary or nasal administration of VCARs are also known in the art. All such devices can use formulations suitable for the administration for the dispensing of VCAR in an aerosol. Such aerosols can be comprised of either solutions (both aqueous and nonaqueous) or solid particles.

[0801] Metered dose inhalers like the Ventolin metered dose inhaler, typically use a propellant gas and require actuation during inspiration (See, e.g., WO 94/16970, WO 98/35888). Dry powder inhalers like Turbuhaler™ (Astra), Rotahaler® (Glaxo), Diskus® (Glaxo), Spiros™ inhaler (Dura), devices marketed by Inhale Therapeutics, and the Spinhaler® powder inhaler (Fisons), use breath-actuation of a mixed powder (U.S. Pat. No. 4,668,218 Astra, EP 237507 Astra, WO 97/25086 Glaxo, WO 94/08552 Dura, U.S. Pat. No. 5,458,135 Inhale, WO 94/06498 Fisons, entirely incorporated herein by reference). Nebulizers like AERx™ Aradigm, the Ultravent® nebulizer (Mallinckrodt), and the Acorn II@nebulizer (Marquest Medical Products) (U.S. Pat. No. 5,404,871 Aradigm, WO 97/22376), the above references entirely incorporated herein by reference, produce aerosols from solutions, while metered dose inhalers, dry powder inhalers, etc. generate small particle aerosols. These specific examples of commercially available inhalation devices are intended to be a representative of specific devices suitable for the practice of this invention, and are not intended as limiting the scope of the invention.

[0802] Preferably, a composition comprising at least one VCAR is delivered by a dry powder inhaler or a sprayer. There are several desirable features of an inhalation device for administering at least one VCAR of the present invention. For example, delivery by the inhalation device is advantageously reliable, reproducible, and accurate. The inhalation device can optionally deliver small dry particles, e.g., less than about 10 μm, preferably about 1-5 μm, for good respirability.

### Administration of VCAR Compositions as a Spray

[0803] A spray including VCAR composition can be produced by forcing a suspension or solution of at least one VCAR through a nozzle under pressure. The nozzle size and configuration, the applied pressure, and the liquid feed rate can be chosen to achieve the desired output and particle size. An electrospray can be produced, for example, by an electric field in connection with a capillary or nozzle feed. Advantageously, particles of at least one VCAR composition delivered by a sprayer have a particle size less than about 10 μm, preferably, in the range of about 1 μm to about 5 μm, and, most preferably, about 2 μm to about 3 μm.

[0804] Formulations of at least one VCAR composition suitable for use with a sprayer typically include VCAR composition in an aqueous solution at a concentration of about 0.1 mg to about 100 mg of at least one VCAR composition per ml of solution or mg/gm, or any range, value, or fraction therein. The formulation can include agents, such as an excipient, a buffer, an isotonicity agent, a preservative, a surfactant, and, preferably, zinc. The formulation can also include an excipient or agent for stabilization of the VCAR composition, such as a buffer, a reducing agent, a bulk protein, or a carbohydrate. Bulk proteins useful in formulating VCAR compositions include albumin, protamine, or the like. Typical carbohydrates useful in formulating VCAR compositions include sucrose, mannitol, lactose, trehalose, glucose, or the like. The VCAR composition formulation can also include a surfactant, which can reduce or prevent surface-induced aggregation of the VCAR composition caused by atomization of the solution in forming an aerosol. Various conventional surfactants can be employed, such as polyoxyethylene fatty acid esters and alcohols, and polyoxyethylene sorbitol fatty acid esters. Amounts will generally range between 0.001 and 14% by weight of the formulation. Especially preferred surfactants for purposes of this invention are polyoxyethylene sorbitan monooleate, polysorbate 80, polysorbate 20, or the like. Additional agents known in the art for formulation of a protein, such as VCARs, or specified portions or variants, can also be included in the formulation.

### Administration of VCA R Compositions by a Nebulizer

[0805] VCAR compositions of the invention can be administered by a nebulizer, such as jet nebulizer or an ultrasonic nebulizer. Typically, in a jet nebulizer, a compressed air source is used to create a high-velocity air jet through an orifice. As the gas expands beyond the nozzle, a low-pressure region is created, which draws a solution of VCAR composition through a capillary tube connected to a liquid reservoir. The liquid stream from the capillary tube is sheared into unstable filaments and droplets as it exits the tube, creating the aerosol. A range of configurations, flow rates, and baffle types can be employed to achieve the desired performance characteristics from a given jet nebulizer. In an ultrasonic nebulizer, high-frequency electrical energy is used to create vibrational, mechanical energy, typically employing a piezoelectric transducer. This energy is transmitted to the formulation of VCAR composition either directly or through a coupling fluid, creating an aerosol including the VCAR composition. Advantageously, particles of VCAR composition delivered by a nebulizer have a particle size less than about 10 μm, preferably, in the range of about 1 μm to about 5 μm, and, most preferably, about 2 μm to about 3 μm.

[0806] Formulations of at least one VCAR suitable for use with a nebulizer, either jet or ultrasonic, typically include a concentration of about 0.1 mg to about 100 mg of at least one VCAR per ml of solution. The formulation can include agents, such as an excipient, a buffer, an isotonicity agent, a preservative, a surfactant, and, preferably, zinc. The formulation can also include an excipient or agent for stabilization of the at least one VCAR composition, such as a buffer, a reducing agent, a bulk protein, or a carbohydrate. Bulk proteins useful in formulating at least one VCAR compositions include albumin, protamine, or the like. Typical carbohydrates useful in formulating at least one VCAR include sucrose, mannitol, lactose, trehalose, glucose, or the like. The at least one VCAR formulation can also include a surfactant, which can reduce or prevent surface-induced aggregation of the at least one VCAR caused by atomization of the solution in forming an aerosol. Various conventional surfactants can be employed, such as polyoxyethylene fatty acid esters and alcohols, and polyoxyethylene sorbital fatty acid esters. Amounts will generally range between about 0.001 and 4% by weight of the formulation. Especially preferred surfactants for purposes of this invention are polyoxyethylene sorbitan mono-oleate, polysorbate 80, polysorbate 20, or the like. Additional agents known in the art for formulation of a protein, such as VCAR, can also be included in the formulation.

### Administration of VCAR Compositions by a Metered Dose Inhaler

[0807] In a metered dose inhaler (MDI), a propellant, at least one VCAR, and any excipients or other additives are contained in a canister as a mixture including a liquefied compressed gas. Actuation of the metering valve releases the mixture as an aerosol, preferably containing particles in the size range of less than about 10 μm, preferably, about 1 μm to about 5 μm, and, most preferably, about 2 μm to about 3 μm. The desired aerosol particle size can be obtained by employing a formulation of VCAR composition produced by various methods known to those of skill in the art, including jet-milling, spray drying, critical point condensation, or the like. Preferred metered dose inhalers include those manufactured by 3M or Glaxo and employing a hydrofluorocarbon propellant. Formulations of at least one VCAR for use with a metered-dose inhaler device will generally include a finely divided powder containing at least one VCAR as a suspension in a non-aqueous medium, for example, suspended in a propellant with the aid of a surfactant. The propellant can be any conventional material employed for this purpose, such as chlorofluorocarbon, a hydrochlorofluorocarbon, a hydrofluorocarbon, or a hydrocarbon, including trichlorofluoromethane, dichlorodifluoromethane, dichlorotetrafluoroethanol and 1,1,1,2-tetrafluoroethane, HFA-134a (hydrofluoroalkane-134a), HFA-227 (hydrofluoroalkane-227), or the like. Preferably, the propellant is a hydrofluorocarbon. The surfactant can be chosen to stabilize the at least one VCAR as a suspension in the propellant, to protect the active agent against chemical degradation, and the like. Suitable surfactants include sorbitan trioleate, soya lecithin, oleic acid, or the like. In some cases, solution aerosols are preferred using solvents, such as ethanol. Additional agents known in the art for formulation of a protein can also be included in the formulation. One of ordinary skill in the art will recognize that the methods of the current invention can be achieved by pulmonary administration of at least one VCAR composition via devices not described herein.

### Oral Formulations and Administration

[0808] Formulations for oral administration rely on the co-administration of adjuvants (e.g., resorcinols and nonionic surfactants, such as polyoxyethylene oleyl ether and n-hexadecylpolyethylene ether) to increase artificially the permeability of the intestinal walls, as well as the co-administration of enzymatic inhibitors (e.g., pancreatic trypsin inhibitors, diisopropylfluorophosphate (DFF) and trasylol) to inhibit enzymatic degradation. Formulations for delivery of hydrophilic agents including proteins and VCARs and a combination of at least two surfactants intended for oral, buccal, mucosal, nasal, pulmonary, vaginal transmembrane, or rectal administration are taught in U.S. Pat. No. 6,309,663. The active constituent compound of the solid-type dosage form for oral administration can be mixed with at least one additive, including sucrose, lactose, cellulose, mannitol, trehalose, raffinose, maltitol, dextran, starches, agar, arginates, chitins, chitosans, pectins, gum tragacanth, gum arabic, gelatin, collagen, casein, albumin, synthetic or semisynthetic polymer, and glyceride. These dosage forms can also contain other type(s) of additives, e.g., inactive diluting agent, lubricant, such as magnesium stearate, paraben, preserving agent, such as sorbic acid, ascorbic acid, .alpha.-tocopherol, antioxidant such as cysteine, disintegrator, binder, thickener, buffering agent, sweetening agent, flavoring agent, perfuming agent, etc.

[0809] Tablets and pills can be further processed into enteric-coated preparations. The liquid preparations for oral administration include emulsion, syrup, elixir, suspension and solution preparations allowable for medical use. These preparations can contain inactive diluting agents ordinarily used in said field, e.g., water. Liposomes have also been described as drug delivery systems for insulin and heparin (U.S. Pat. No. 4,239,754). More recently, microspheres of artificial polymers of mixed amino acids (proteinoids) have been used to deliver pharmaceuticals (U.S. Pat. No. 4,925,673). Furthermore, carrier compounds described in U.S. Pat. Nos. 5,879,681 and 5,871,753 and used to deliver biologically active agents orally are known in the art.

### Hucosal Formulations and Administration

[0810] A formulation for orally administering a bioactive agent encapsulated in one or more biocompatible polymer or copolymer excipients, preferably, a biodegradable polymer or copolymer, affording microcapsules which due to the proper size of the resultant microcapsules results in the agent reaching and being taken up by the folliculi lymphatic aggregati, otherwise known as the “Peyer's patch,” or “GALT” of the animal without loss of effectiveness due to the agent having passed through the gastrointestinal tract. Similar folliculi lymphatic aggregati can be found in the bronchei tubes (BALT) and the large intestine. The above-described tissues are referred to in general as mucosally associated lymphoreticular tissues (MALT). For absorption through mucosal surfaces, compositions and methods of administering at least one VCAR include an emulsion comprising a plurality of submicron particles, a mucoadhesive macromolecule, a bioactive peptide, and an aqueous continuous phase, which promotes absorption through mucosal surfaces by achieving mucoadhesion of the emulsion particles (U.S. Pat. No. 5,514,670). Mucous surfaces suitable for application of the emulsions of the present invention can include corneal, conjunctival, buccal, sublingual, nasal, vaginal, pulmonary, stomachic, intestinal, and rectal routes of administration. Formulations for vaginal or rectal administration, e.g., suppositories, can contain as excipients, for example, polyalkyleneglycols, vaseline, cocoa butter, and the like. Formulations for intranasal administration can be solid and contain as excipients, for example, lactose or can be aqueous or oily solutions of nasal drops. For buccal administration, excipients include sugars, calcium stearate, magnesium stearate, pregelinatined starch, and the like (U.S. Pat. No. 5,849,695).

### Transdermal Formulations and Administration

[0811] For transdermal administration, the at least one VCAR is encapsulated in a delivery device, such as a liposome or polymeric nanoparticles, microparticle, microcapsule, or microspheres (referred to collectively as microparticles unless otherwise stated). A number of suitable devices are known, including microparticles made of synthetic polymers, such as polyhydroxy acids, such as polylactic acid, polyglycolic acid and copolymers thereof, polyorthoesters, polyanhydrides, and polyphosphazenes, and natural polymers, such as collagen, polyamino acids, albumin and other proteins, alginate and other polysaccharides, and combinations thereof (U.S. Pat. No. 5,814,599).

### Prolonged Administration and Formulations

[0812] It can be desirable to deliver the compounds of the present invention to the subject over prolonged periods of time, for example, for periods of one week to one year from a single administration. Various slow release, depot or implant dosage forms can be utilized. For example, a dosage form can contain a pharmaceutically acceptable non-toxic salt of the compounds that has a low degree of solubility in body fluids, for example, (a) an acid addition salt with a polybasic acid, such as phosphoric acid, sulfuric acid, citric acid, tartaric acid, tannic acid, pamoic acid, alginic acid, polyglutamic acid, naphthalene mono- or di-sulfonic acids, polygalacturonic acid, and the like; (b) a salt with a polyvalent metal cation, such as zinc, calcium, bismuth, barium, magnesium, aluminum, copper, cobalt, nickel, cadmium and the like, or with an organic cation formed from e.g., N,N′-dibenzyl-ethylenediamine or ethylenediamine; or (c) combinations of (a) and (b), e.g., a zinc tannate salt. Additionally, the compounds of the present invention or, preferably, a relatively insoluble salt, such as those just described, can be formulated in a gel, for example, an aluminum monostearate gel with, e.g., sesame oil, suitable for injection. Particularly preferred salts are zinc salts, zinc tannate salts, pamoate salts, and the like. Another type of slow release depot formulation for injection would contain the compound or salt dispersed for encapsulation in a slow degrading, non-toxic, non-antigenic polymer, such as a polylactic acid/polyglycolic acid polymer for example as described in U.S. Pat. No. 3,773,919. The compounds or, preferably, relatively insoluble salts, such as those described above, can also be formulated in cholesterol matrix silastic pellets, particularly for use in animals. Additional slow release, depot or implant formulations, e.g., gas or liquid liposomes, are known in the literature (U.S. Pat. No. 5,770,222 and “Sustained and Controlled Release Drug Delivery Systems”, J. R. Robinson ed., Marcel Dekker, Inc., N.Y., 1978).

### Infusion of Modified Cells as Adoptive Cell Therapy

[0813] The disclosure provides modified cells that express one or more CARs and/or VCARs of the disclosure that have been selected and/or expanded for administration to a subject in need thereof. Modified cells of the disclosure may be formulated for storage at any temperature including room temperature and body temperature. Modified cells of the disclosure may be formulated for cryopreservation and subsequent thawing. Modified cells of the disclosure may be formulated in a pharmaceutically acceptable carrier for direct administration to a subject from sterile packaging. Modified cells of the disclosure may be formulated in a pharmaceutically acceptable carrier with an indicator of cell viability and/or CAR/VCAR expression level to ensure a minimal level of cell function and CAR/VCAR expression. Modified cells of the disclosure may be formulated in a pharmaceutically acceptable carrier at a prescribed density with one or more reagents to inhibit further expansion and/or prevent cell death.

### Inducible Proapoptotic Polypeptides

[0814] Inducible proapoptotic polypeptides of the disclosure are superior to existing inducible polypeptides because the inducible proapoptotic polypeptides of the disclosure are far less immunogenic. While inducible proapoptotic polypeptides of the disclosure are recombinant polypeptides, and, therefore, non-naturally occurring, the sequences that are recombined to produce the inducible proapoptotic polypeptides of the disclosure do not comprise non-human sequences that the host human immune system could recognize as “non-self” and, consequently, induce an immune response in the subject receiving an inducible proapoptotic polypeptide of the disclosure, a cell comprising the inducible proapoptotic polypeptide or a composition comprising the inducible proapoptotic polypeptide or the cell comprising the inducible proapoptotic polypeptide.

[0815] The disclosure provides inducible proapoptotic polypeptides comprising a ligand binding region, a linker, and a proapoptotic peptide, wherein the inducible proapoptotic polypeptide does not comprise a non-human sequence. In certain embodiments, the non-human sequence comprises a restriction site. In certain embodiments, the proapoptotic peptide is a caspase polypeptide. In certain embodiments, the caspase polypeptide is a caspase 9 polypeptide. In certain embodiments, the caspase 9 polypeptide is a truncated caspase 9 polypeptide. Inducible proapoptotic polypeptides of the disclosure may be non-naturally occurring.

[0816] Caspase polypeptides of the disclosure include, but are not limited to, caspase 1, caspase 2, caspase 3, caspase 4, caspase 5, caspase 6, caspase 7, caspase 8, caspase 9, caspase 10, caspase 11, caspase 12, and caspase 14. Caspase polypeptides of the disclosure include, but are not limited to, those caspase polypeptides associated with apoptosis including caspase 2, caspase 3, caspase 6, caspase 7, caspase 8, caspase 9, and caspase 10. Caspase polypeptides of the disclosure include, but are not limited to, those caspase polypeptides that initiate apoptosis, including caspase 2, caspase 8, caspase 9, and caspase 10. Caspase polypeptides of the disclosure include, but are not limited to, those caspase polypeptides that execute apoptosis, including caspase 3, caspase 6, and caspase 7.

[0817] Caspase polypeptides of the disclosure may be encoded by an amino acid or a nucleic acid sequence having one or more modifications compared to a wild type amino acid or a nucleic acid sequence. The nucleic acid sequence encoding a caspase polypeptide of the disclosure may be codon optimized. The one or more modifications to an amino acid and/or nucleic acid sequence of a caspase polypeptide of the disclosure may increase an interaction, a cross-linking, a cross-activation, or an activation of the caspase polypeptide of the disclosure compared to a wild type amino acid or a nucleic acid sequence. Alternatively, or in addition, the one or more modifications to an amino acid and/or nucleic acid sequence of a caspase polypeptide of the disclosure may decrease the immunogenicity of the caspase polypeptide of the disclosure compared to a wild type amino acid or a nucleic acid sequence.

[0818] Caspase polypeptides of the disclosure may be truncated compared to a wild type caspase polypeptide. For example, a caspase polypeptide may be truncated to eliminate a sequence encoding a Caspase Activation and Recruitment Domain (CARD) to eliminate or minimize the possibility of activating a local inflammatory response in addition to initiating apoptosis in the cell comprising an inducible caspase polypeptide of the disclosure. The nucleic acid sequence encoding a caspase polypeptide of the disclosure may be spliced to form a variant amino acid sequence of the caspase polypeptide of the disclosure compared to a wild type caspase polypeptide. Caspase polypeptides of the disclosure may be encoded by recombinant and/or chimeric sequences. Recombinant and/or chimeric caspase polypeptides of the disclosure may include sequences from one or more different caspase polypeptides. Alternatively, or in addition, recombinant and/or chimeric caspase polypeptides of the disclosure may include sequences from one or more species (e.g. a human sequence and a non-human sequence). Caspase polypeptides of the disclosure may be non-naturally occurring.

[0819] The ligand binding region of an inducible proapoptotic polypeptide of the disclosure may include any polypeptide sequence that facilitates or promotes the dimerization of a first inducible proapoptotic polypeptide of the disclosure with a second inducible proapoptotic polypeptide of the disclosure, the dimerization of which activates or induces cross-linking of the proapoptotic polypeptides and initiation of apoptosis in the cell.

[0820] The ligand-binding (“dimerization”) region may comprise any polypeptide or functional domain thereof that will allow for induction using an endogenous or non-naturally-occurring ligand (i.e. and induction agent), for example, a non-naturally-occurring synthetic ligand. The ligand-binding region may be internal or external to the cellular membrane, depending upon the nature of the inducible proapoptotic polypeptide and the choice of ligand (i.e. induction agent). A wide variety of ligand-binding polypeptides and functional domains thereof, including receptors, are known. Ligand-binding regions of the disclosure may include one or more sequences from a receptor. Of particular interest are ligand-binding regions for which ligands (for example, small organic ligands) are known or may be readily produced. These ligand-binding regions or receptors may include, but are not limited to, the FKBPs and cyclophilin receptors, the steroid receptors, the tetracycline receptor, and the like, as well as “non-naturally-occurring” receptors, which can be obtained from antibodies, particularly the heavy or light chain subunit, mutated sequences thereof, random amino acid sequences obtained by stochastic procedures, combinatorial syntheses, and the like. In certain embodiments, the ligand-binding region is selected from the group consisting of a FKBP ligand-binding region, a cyclophilin receptor ligand-binding region, a steroid receptor ligand-binding region, a cyclophilin receptors ligand-binding region, and a tetracycline receptor ligand-binding region.

[0821] The ligand-binding regions comprising one or more receptor domain(s) may be at least about 50 amino acids, and fewer than about 350 amino acids, usually fewer than 200 amino acids, either as the endogenous domain or truncated active portion thereof. The binding region may, for example, be small (<25 kDa, to allow efficient transfection in viral vectors), monomeric, nonimmunogenic, have synthetically accessible, cell permeable, nontoxic ligands that can be configured for dimerization.

[0822] The ligand-binding regions comprising one or more receptor domain(s) may be intracellular or extracellular depending upon the design of the inducible proapoptotic polypeptide and the availability of an appropriate ligand (i.e. induction agent). For hydrophobic ligands, the binding region can be on either side of the membrane, but for hydrophilic ligands, particularly protein ligands, the binding region will usually be external to the cell membrane, unless there is a transport system for internalizing the ligand in a form in which it is available for binding. For an intracellular receptor, the inducible proapoptotic polypeptide or a transposon or vector comprising the inducible proapoptotic polypeptide may encode a signal peptide and transmembrane domain 5′ or 3′ of the receptor domain sequence or may have a lipid attachment signal sequence 5′ of the receptor domain sequence. Where the receptor domain is between the signal peptide and the transmembrane domain, the receptor domain will be extracellular.

[0823] Antibodies and antibody subunits, e.g., heavy or light chain, particularly fragments, more particularly all or part of the variable region, or fusions of heavy and light chain to create high-affinity binding, can be used as a ligand binding region of the disclosure. Antibodies that are contemplated include ones that are an ectopically expressed human product, such as an extracellular domain that would not trigger an immune response and generally not expressed in the periphery (i.e., outside the CNS/brain area). Such examples, include, but are not limited to low affinity nerve growth factor receptor (LNGFR), and embryonic surface proteins (i.e., carcinoembryonic antigen). Yet further, antibodies can be prepared against haptenic molecules, which are physiologically acceptable, and the individual antibody subunits screened for binding affinity. The cDNA encoding the subunits can be isolated and modified by deletion of the constant region, portions of the variable region, mutagenesis of the variable region, or the like, to obtain a binding protein domain that has the appropriate affinity for the ligand. In this way, almost any physiologically acceptable haptenic compound can be employed as the ligand or to provide an epitope for the ligand. Instead of antibody units, endogenous receptors can be employed, where the binding region or domain is known and there is a useful or known ligand for binding.

[0824] For multimerizing the receptor, the ligand for the ligand-binding region/receptor domains of the inducible proapoptotic polypeptides may be multimeric in the sense that the ligand can have at least two binding sites, with each of the binding sites capable of binding to a ligand receptor region (i.e. a ligand having a first binding site capable of binding the ligand-binding region of a first inducible proapoptotic polypeptide and a second binding site capable of binding the ligand-binding region of a second inducible proapoptotic polypeptide, wherein the ligand-binding regions of the first and the second inducible proapoptotic polypeptides are either identical or distinct). Thus, as used herein, the term “multimeric ligand binding region” refers to a ligand-binding region of an inducible proapoptotic polypeptide of the disclosure that binds to a multimeric ligand. Multimeric ligands of the disclosure include dimeric ligands. A dimeric ligand of the disclosure may have two binding sites capable of binding to the ligand receptor domain. In certain embodiments, multimeric ligands of the disclosure are a dimer or higher order oligomer, usually not greater than about tetrameric, of small synthetic organic molecules, the individual molecules typically being at least about 150 Da and less than about 5 kDa, usually less than about 3 kDa. A variety of pairs of synthetic ligands and receptors can be employed. For example, in embodiments involving endogenous receptors, dimeric FK506 can be used with an FKBP12 receptor, dimerized cyclosporin A can be used with the cyclophilin receptor, dimerized estrogen with an estrogen receptor, dimerized glucocorticoids with a glucocorticoid receptor, dimerized tetracycline with the tetracycline receptor, dimerized vitamin D with the vitamin D receptor, and the like. Alternatively higher orders of the ligands, e.g., trimeric can be used. For embodiments involving non-naturally occurring receptors, e.g., antibody subunits, modified antibody subunits, single chain antibodies comprised of heavy and light chain variable regions in tandem, separated by a flexible linker, or modified receptors, and mutated sequences thereof, and the like, any of a large variety of compounds can be used. A significant characteristic of the units comprising a multimeric ligand of the disclosure is that each binding site is able to bind the receptor with high affinity, and preferably, that they are able to be dimerized chemically. Also, methods are available to balance the hydrophobicity/hydrophilicity of the ligands so that they are able to dissolve in serum at functional levels, yet diffuse across plasma membranes for most applications.

[0825] Activation of inducible proapoptotic polypeptides of the disclosure may be accomplished through, for example, chemically induced dimerization (CID) mediated by an induction agent to produce a conditionally controlled protein or polypeptide. Proapoptotic polypeptides of the disclosure not only inducible, but the induction of these polypeptides is also reversible, due to the degradation of the labile dimerizing agent or administration of a monomeric competitive inhibitor.

[0826] In certain embodiments, the ligand-binding region comprises a FK506 binding protein 12 (FKBP12) polypeptide. In certain embodiments, the ligand-binding region comprises a FKBP12 polypeptide having a substitution of valine (V) for phenylalanine (F) at position 36 (F36V). In certain embodiments, in which the ligand binding region comprises a FKBP12 polypeptide having a substitution of valine (V) for phenylalanine (F) at position 36 (F36V), the induction agent may comprise AP1903, a synthetic drug (CAS Index Name: 2-Piperidinecarboxylic acid, 1-[(2S)-1-oxo-2-(3,4,5-trimethoxyphenyl)butyl]-, 1,2-ethanediylbis[imino(2-oxo-2,1-ethanediyl)oxy-3,1-phenylene[(1R)-3-(3,4-dimethoxyphenyl)propylidene]]ester, [2S-[1 (R*),2R*[S*[S*[1(R*),2R*]]]]]-(9CI) CAS Registry Number: 195514-63-7; Molecular Formula: C78H98N4020; Molecular Weight: 1411.65)). In certain embodiments, in which the ligand-binding region comprises a FKBP12 polypeptide having a substitution of valine (V) for phenylalanine (F) at position 36 (F36V), the induction agent may comprise AP20187 (CAS Registry Number: 195514-80-8 and Molecular Formula: C82H107N5020). In certain embodiments, the induction agent is an AP20187 analog, such as, for example, AP1510. As used herein, the induction agents AP20187, AP1903 and AP1510 may be used interchangeably.

[0827] AP1903 API is manufactured by Alphora Research Inc. and AP1903 Drug Product for Injection is made by Formatech Inc. It is formulated as a 5 mg/mL solution of AP1903 in a 25% solution of the non-ionic solubilizer Solutol HS 15 (250 mg/mL, BASF). At room temperature, this formulation is a clear, slightly yellow solution. Upon refrigeration, this formulation undergoes a reversible phase transition, resulting in a milky solution. This phase transition is reversed upon re-warming to room temperature. The fill is 2.33 mL in a 3 mL glass vial (approximately 10 mg AP1903 for Injection total per vial). Upon determining a need to administer AP1903, patients may be, for example, administered a single fixed dose of AP1903 for Injection (0.4 mg/kg) via IV infusion over 2 hours, using a non-DEHP, non-ethylene oxide sterilized infusion set. The dose of AP1903 is calculated individually for all patients, and is not be recalculated unless body weight fluctuates by ≥10%. The calculated dose is diluted in 100 mL in 0.9% normal saline before infusion. In a previous Phase I study of AP1903, 24 healthy volunteers were treated with single doses of AP1903 for Injection at dose levels of 0.01, 0.05, 0.1, 0.5 and 1.0 mg/kg infused IV over 2 hours. AP1903 plasma levels were directly proportional to dose, with mean Cmax values ranging from approximately 10⁻¹²⁷⁵ ng/mL over the 0.01-1.0 mg/kg dose range. Following the initial infusion period, blood concentrations demonstrated a rapid distribution phase, with plasma levels reduced to approximately 18, 7, and 1% of maximal concentration at 0.5, 2 and 10 hours post-dose, respectively. AP1903 for Injection was shown to be safe and well tolerated at all dose levels and demonstrated a favorable pharmacokinetic profile. luliucci J D, et al., J Clin Pharmacol. 41: 870-9, 2001.

[0828] The fixed dose of AP1903 for injection used, for example, may be 0.4 mg/kg intravenously infused over 2 hours. The amount of AP1903 needed in vitro for effective signaling of cells is 10⁻¹⁰⁰ nM (1600 Da MW). This equates to 16-160 μg/L or \hat{~}0.016-1.6 μg/kg (1.6-160 μg/kg). Doses up to 1 mg/kg were well tolerated in the Phase I study of AP1903 described above. Therefore, 0.4 mg/kg may be a safe and effective dose of AP1903 for this Phase I study in combination with the therapeutic cells.

[0829] The amino acid and/or nucleic acid sequence encoding ligand binding of the disclosure may contain sequence one or more modifications compared to a wild type amino acid or nucleic acid sequence. For example, the amino acid and/or nucleic acid sequence encoding ligand-binding region of the disclosure may be a codon-optimized sequence. The one or more modifications may increase the binding affinity of a ligand (e.g., an induction agent) for the ligand-binding region of the disclosure compared to a wild type polypeptide. Alternatively, or in addition, the one or more modifications may decrease the immunogenicity of the ligand-binding region of the disclosure compared to a wild type polypeptide. Ligand binding regions of the disclosure and/or induction agents of the disclosure may be non-naturally occurring.

[0830] Inducible proapoptotic polypeptides of the disclosure comprise a ligand-binding region, a linker and a proapoptotic peptide, wherein the inducible proapoptotic polypeptide does not comprise a non-human sequence. In certain embodiments, the non-human sequence comprises a restriction site. The linker may comprise any organic or inorganic material that permits, upon dimerization of the ligand-binding region, interaction, cross-linking, cross-activation, or activation of the proapoptotic polypeptides such that the interaction or activation of the proapoptotic polypeptides initiates apoptosis in the cell. In certain embodiments, the linker is a polypeptide. In certain embodiments, the linker is a polypeptide comprising a G/S rich amino acid sequence (a “GS” linker). In certain embodiments, the linker is a polypeptide comprising the amino acid sequence GGGGS (SEQ ID NO: 18024). In preferred embodiments, the linker is a polypeptide and the nucleic acid encoding the polypeptide does not contain a restriction site for a restriction endonuclease. Linkers of the disclosure may be non-naturally occurring.

[0831] Inducible proapoptotic polypeptides of the disclosure may be expressed in a cell under the transcriptional regulation of any promoter capable of initiating and/or regulating the expression of an inducible proapoptotic polypeptide of the disclosure in that cell. The term “promoter” as used herein refers to a promoter that acts as the initial binding site for RNA polymerase to transcribe a gene. For example, inducible proapoptotic polypeptides of the disclosure may be expressed in a mammalian cell under the transcriptional regulation of any promoter capable of initiating and/or regulating the expression of an inducible proapoptotic polypeptide of the disclosure in a mammalian cell, including, but not limited to native, endogenous, exogenous, and heterologous promoters. Preferred mammalian cells include human cells. Thus, inducible proapoptotic polypeptides of the disclosure may be expressed in a human cell under the transcriptional regulation of any promoter capable of initiating and/or regulating the expression of an inducible proapoptotic polypeptide of the disclosure in a human cell, including, but not limited to, a human promoter or a viral promoter. Exemplary promoters for expression in human cells include, but are not limited to, a human cytomegalovirus (CMV) immediate early gene promoter, a SV40 early promoter, a Rous sarcoma virus long terminal repeat, β-actin promoter, a rat insulin promoter and a glyceraldehyde-3-phosphate dehydrogenase promoter, each of which may be used to obtain high-level expression of an inducible proapoptotic polypeptide of the disclosure. The use of other viral or mammalian cellular or bacterial phage promoters that are well known in the art to achieve expression of an inducible proapoptotic polypeptide of the disclosure is contemplated as well, provided that the levels of expression are sufficient for initiating apoptosis in a cell. By employing a promoter with well-known properties, the level and pattern of expression of the protein of interest following transfection or transformation can be optimized.

[0832] Selection of a promoter that is regulated in response to specific physiologic or synthetic signals can permit inducible expression of the inducible proapoptotic polypeptide of the disclosure. The ecdysone system (Invitrogen, Carlsbad, Calif.) is one such system. This system is designed to allow regulated expression of a gene of interest in mammalian cells. It consists of a tightly regulated expression mechanism that allows virtually no basal level expression of a transgene, but over 200-fold inducibility. The system is based on the heterodimeric ecdysone receptor of Drosophila, and when ecdysone or an analog such as muristerone A binds to the receptor, the receptor activates a promoter to turn on expression of the downstream transgene high levels of mRNA transcripts are attained. In this system, both monomers of the heterodimeric receptor are constitutively expressed from one vector, whereas the ecdysone-responsive promoter, which drives expression of the gene of interest, is on another plasmid. Engineering of this type of system into a vector of interest may therefore be useful. Another inducible system that may be useful is the Tet-Off™ or Tet-On™ system (Clontech, Palo Alto, Calif.) originally developed by Gossen and Bujard (Gossen and Bujard, Proc. Natl. Acad. Sci. USA, 89:5547-5551, 1992; Gossen et al., Science, 268:1766-1769, 1995). This system also allows high levels of gene expression to be regulated in response to tetracycline or tetracycline derivatives such as doxycycline. In the Tet-On™ system, gene expression is turned on in the presence of doxycycline, whereas in the Tet-Off™ system, gene expression is turned on in the absence of doxycycline. These systems are based on two regulatory elements derived from the tetracycline resistance operon of E. coli: the tetracycline operator sequence (to which the tetracycline repressor binds) and the tetracycline repressor protein. The gene of interest is cloned into a plasmid behind a promoter that has tetracycline-responsive elements present in it. A second plasmid contains a regulatory element called the tetracycline-controlled transactivator, which is composed, in the Tet-Off™ system, of the VP16 domain from the herpes simplex virus and the wild-type tetracycline repressor. Thus in the absence of doxycycline, transcription is constitutively on. In the Tet-On™ system, the tetracycline repressor is not wild type and in the presence of doxycycline activates transcription. For gene therapy vector production, the Tet-Off™ system may be used so that the producer cells could be grown in the presence of tetracycline or doxycycline and prevent expression of a potentially toxic transgene, but when the vector is introduced to the patient, the gene expression would be constitutively on.

[0833] In some circumstances, it is desirable to regulate expression of a transgene in a gene therapy vector. For example, different viral promoters with varying strengths of activity are utilized depending on the level of expression desired. In mammalian cells, the CMV immediate early promoter is often used to provide strong transcriptional activation. The CMV promoter is reviewed in Donnelly, J. J., et al., 1997. Annu. Rev. Immunol. 15:617-48. Modified versions of the CMV promoter that are less potent have also been used when reduced levels of expression of the transgene are desired. When expression of a transgene in hematopoietic cells is desired, retroviral promoters such as the LTRs from MLV or MMTV are often used. Other viral promoters that are used depending on the desired effect include SV40, RSV LTR, HIV-1 and HIV-2 LTR, adenovirus promoters such as from the E1A, E2A, or MLP region, AAV LTR, HSV-TK, and avian sarcoma virus.

[0834] In other examples, promoters may be selected that are developmentally regulated and are active in particular differentiated cells. Thus, for example, a promoter may not be active in a pluripotent stem cell, but, for example, where the pluripotent stem cell differentiates into a more mature cell, the promoter may then be activated.

[0835] Similarly, tissue specific promoters are used to effect transcription in specific tissues or cells so as to reduce potential toxicity or undesirable effects to non-targeted tissues. These promoters may result in reduced expression compared to a stronger promoter such as the CMV promoter, but may also result in more limited expression, and immunogenicity (Bojak, A., et al., 2002. Vaccine. 20:1975-79; Cazeaux, N., et al., 2002. Vaccine 20:3322-31). For example, tissue specific promoters such as the PSA associated promoter or prostate-specific glandular kallikrein, or the muscle creatine kinase gene may be used where appropriate.

[0836] Examples of tissue specific or differentiation specific promoters include, but are not limited to, the following: B29 (B cells); CD14 (monocytic cells); CD43 (leukocytes and platelets); CD45 (hematopoietic cells); CD68 (macrophages); desmin (muscle); elastase-1 (pancreatic acinar cells); endoglin (endothelial cells); fibronectin (differentiating cells, healing tissues); and Flt-1 (endothelial cells); GFAP (astrocytes).

[0837] In certain indications, it is desirable to activate transcription at specific times after administration of the gene therapy vector. This is done with such promoters as those that are hormone or cytokine regulatable. Cytokine and inflammatory protein responsive promoters that can be used include K and T kininogen (Kageyama et al., (1987) J. Biol. Chem., 262, 2345-2351), c-fos, TNF-alpha, C-reactive protein (Arcone, et al., (1988) Nucl. Acids Res., 16(8), 3195-3207), haptoglobin (Oliviero et al., (1987) EMBO J., 6,1905-1912), serum amyloid A2, C/EBP alpha, IL-1, IL-6 (Poli and Cortese, (1989) Proc. Nat'l Acad. Sci. USA, 86, 8202-8206), Complement C3 (Wilson et al., (1990) Mol. Cell. Biol., 6181-6191), IL-8, alpha-1 acid glycoprotein (Prowse and Baumann, (1988) Mol Cell Biol, 8, 42-51), alpha-1 antitrypsin, lipoprotein lipase (Zechner et al., Mol. Cell. Biol., 2394-2401, 1988), angiotensinogen (Ron, et al., (1991) Mol. Cell. Biol., 2887-2895), fibrinogen, c-jun (inducible by phorbol esters, TNF-alpha, UV radiation, retinoic acid, and hydrogen peroxide), collagenase (induced by phorbol esters and retinoic acid), metallothionein (heavy metal and glucocorticoid inducible), Stromelysin (inducible by phorbol ester, interleukin-1 and EGF), alpha-2 macroglobulin and alpha-1 anti-chymotrypsin. Other promoters include, for example, SV40, MMTV, Human Immunodeficiency Virus (MV), Moloney virus, ALV, Epstein Barr virus, Rous Sarcoma virus, human actin, myosin, hemoglobin, and creatine.

[0838] It is envisioned that any of the above promoters alone or in combination with another can be useful depending on the action desired. Promoters, and other regulatory elements, are selected such that they are functional in the desired cells or tissue. In addition, this list of promoters should not be construed to be exhaustive or limiting; other promoters that are used in conjunction with the promoters and methods disclosed herein.

### Armored T-Cells “Knock Down” Strategy

[0839] T-cells of the disclosure may be genetically modified to enhance their therapeutic potential. Alternatively, or in addition, T-cells of the disclosure may be modified to render them less sensitive to immunologic and/or metabolic checkpoints. Modifications of this type “armor” the T cells of the disclosure, which, following the modification, may be referred to here as “armored” T cells. Armored T cells of the disclosure may be produced by, for example, blocking and/or diluting specific checkpoint signals delivered to the T-cells (i.e. checkpoint inhibition) naturally, within the tumor immunosuppressive microenvironment, for example.

[0840] In some embodiments, an armored T-cell of the disclosure is derived from a T cell, a NK cell, a hematopoietic progenitor cell, a peripheral blood (PB) derived T cell (including a T cell isolated or derived from G-CSF-mobilized peripheral blood), or an umbilical cord blood (UCB) derived T cell. In some embodiments, an armored T-cell of the disclosure comprises one or more of a chimeric ligand receptor (CLR comprising a single domain antibody,)/chimeric antigen receptor (CAR comprising a protein scaffold, an antibody, an ScFv, or an antibody mimetic), a CARTyrin (a CAR comprising a Centyrin), and/or a VCAR (a CAR comprising a camelid VHH or a single domain VH) of the disclosure. In some embodiments, an armored T-cell of the disclosure comprises an inducible proapoptotic polypeptide comprising (a) a ligand binding region, (b) a linker, and (c) a truncated caspase 9 polypeptide, wherein the inducible proapoptotic polypeptide does not comprise a non-human sequence. In some embodiments, the non-human sequence is a restriction site. In some embodiments, the ligand binding region inducible caspase polypeptide comprises a FK506 binding protein 12 (FKBP12) polypeptide. In some embodiments, the amino acid sequence of the FK506 binding protein 12 (FKBP12) polypeptide comprises a modification at position 36 of the sequence. In some embodiments, the modification is a substitution of valine (V) for phenylalanine (F) at position 36 (F36V). In some embodiments, an armored T-cell of the disclosure comprises an exogenous sequence. In some embodiments, the exogenous sequence comprises a sequence encoding a therapeutic protein. Exemplary therapeutic proteins may be nuclear, cytoplasmic, intracellular, transmembrane, cell-surface bound, or secreted proteins. Exemplary therapeutic proteins expressed by the armored T cell may modify an activity of the armored T cell or may modify an activity of a second cell. In some embodiments, an armored T-cell of the disclosure comprises a selection gene or a selection marker. In some embodiments, an armored T-cell of the disclosure comprises a synthetic gene expression cassette (also referred to herein as an inducible transgene construct).

[0841] In some embodiments, a T-cell of the disclosure is modified to silence or reduce expression one or more gene(s) encoding receptor(s) of inhibitory checkpoint signals to produce an armored T-cell of the disclosure. Examples of inhibitory checkpoint signals include, but are not limited to, a PD-L1 ligand binding to a PD-1 receptor on a CAR-T cell of the disclosure or a TGFβcytokine binding to a TGFβRII receptor on a CAR-T cell. Receptors of inhibitory checkpoint signals are expressed on the cell surface or within the cytoplasm of a T-cell. Silencing or reducing expressing of the gene encoding the receptor of the inhibitory checkpoint signal results a loss of protein expression of the inhibitory checkpoint receptors on the surface or within the cytoplasm of an armored T-cell of the disclosure. Thus, armored T cells of the disclosure having silenced or reduced expression of one or more genes encoding an inhibitory checkpoint receptor is resistant, non-receptive or insensitive to checkpoint signals. The armored T cell's resistance or decreased sensitivity to inhibitory checkpoint signals enhances the armored T cell's therapeutic potential in the presence of these inhibitory checkpoint signals. Inhibitory checkpoint signals include but are not limited to the examples listed in Table 1. Exemplary inhibitory checkpoint signals that may be silenced in an armored T cell of the disclosure include, but are not limited to, PD-1 and TGFβRII.

TABLE 1
Exemplary Inhibitory Checkpoint Signals (and proteins that
induce immunosuppression). A CSR of the disclosure may comprise
an endodomain of any one of the proteins of this table.

| Full Name | Abbreviation | SEQ ID NO: |
|---|---|---|
| Programmed cell death protein 1 | PD1 | 14643-14644 |
| transforming growth factor β Receptor 1 | TGFβR1 | 14645 |
| transforming growth factor β Receptor 2 | TGFβR2 | 14646 |
| T-cell immunoglobulin and mucin-domain | TIM3 | 14647 |
| containing-3 | | |
| Lymphocyte-activation gene 3 | LAG3 | 14648 |
| Cytotoxic T-lymphocyte protein 4 | CTLA4 | 14649 |
| B- and T-lymphocyte attenuator | BTLA | 14650 |
| Killer cell immunoglobulin-like receptor | KIR | 14651 |
| Alpha-2A adrenergic receptor | A2aR | 14652 |
| V-type immunoglobulin domain-containing | VISTA | 14653 |
| suppressor of T-cell activation | | |
| T-cell immunoreceptor with Ig and ITIM | TIGIT | 14654 |
| domains | | |
| Programmed cell death 1 ligand 1 | B7H1 or PD-L1 | 14655 |
| Programmed cell death 1 ligand 2 | B7DC or PD-L2 | 14656 |
| T-lymphocyte activation antigen CD80 | B7-1 or CD80 | 14657 |
| T-lymphocyte activation antigen CD86 | B7-2 or CD86 | 14658 |
| CD160 antigen | CD160 | 14659 |
| Leukocyte-associated immunoglobulin-like | LAIR1 | 14660 |
| receptor 1 | | |
| T-cell immunoglobulin and mucin domain- | TIM4 or TIMD4 | 14661 |
| containing protein 4 | | |
| Natural killer cell receptor 2B4 | 2B4 or CD244 | 14662 |
| Major Histocompatibility Complex type I | MHC I | 14663 |
| Major Histocompatibility Complex type II | MHC II | |
| Putative 2-methylcitrate dehydratase receptor | PDH1R | |
| T-cell immunoglobulin and mucin domain 1 | TIM1R | |
| receptor | | |
| T-cell immunoglobulin and mucin domain 4 | TIM4R | |
| receptor | | |
| B7-H3 receptor | B7H3R or CD176 | |
| | Receptor | |
| B7-H4 receptor | B7H4R | |
| Immunoglobulin-like transcript (ILT) 3 receptor | ILT3R | |
| phosphoinositide 3-kinase, subunit alpha | PI3K alpha | 14664 |
| phosphoinositide 3-kinase, subunit gamma | PI3K gamma | 14665 |
| Tyrosine-protein phosphatase non-receptor type | SHP2 or PTPN11 | 14666 |
| 11 | | |
| Protein phosphatase 2, subunit gamma | PP2A gamma | 14667 |
| Protein phosphatase 2, subunit beta | PP2A beta | 14668 |
| Protein phosphatase 2, subunit delta | PP2A delta | 14669 |
| Protein phosphatase 2, subunit epsilon | PP2A epsilon | 14670 |
| Protein phosphatase 2, subunit alpha | PP2A alpha | 14671 |
| T-cell Receptor, subunit alpha | TCR alpha | 14672 |
| T-cell Receptor, subunit beta | TCR beta | 14673 |
| T-cell Receptor, subunit zeta | TCR zeta | 14674 |
| T-cell Receptor, subunit CD3 epsilon | TCR CD3 epsilon | 14675 |
| T-cell Receptor, subunit CD3 gamma | TCR CD3 gamma | 14676 |
| T-cell Receptor, subunit CD3 delta | TCR CD3 delta | 14677 |
| Cluster of Differentiation 28 | CD28 | 14678 |
| Galectins | Galectins | |
| Galectin 9 | Galectin 9 | 14679 |
| High Mobility Group Box 1 | HMGB1 | 14680 |
| Arginase 1 | ARG1 | 14681 |
| Prostaglandin-Endoperoxide Synthase 1 | PTGS1 | 14682 |
| Prostaglandin-Endoperoxide Synthase 2 | PTGS2 | 14683 |
| Mucin 1, Cell Surface Associated | MUC1 | 14684 |
| Mucin 2, Oligomeric Mucus/Gel-Forming | MUC2 | 14685 |
| Mucin 3A, Cell Surface Associated | MUC3A | 14686 |
| Mucin 3B, Cell Surface Associated | MUC3B | 14687 |
| Mucin 4, Cell Surface Associated | MUC4 | 14688 |
| Mucin 5AC, Oligomeric Mucus/Gel-Forming | MUC5AC | 14689 |
| Mucin 5B, Oligomeric Mucus/Gel-Forming | MUC5B | 14690 |
| Mucin 6, Oligomeric Mucus/Gel-Forming | MUC6 | 14691 |
| Mucin 7, Secreted | MUC7 | 14692 |
| Mucin 8 | MUC8 | |
| Mucin 12, Cell Surface Associated | MUC12 | 14693 |
| Mucin 13, Cell Surface Associated | MUC13 | 14694 |
| Mucin 15, Cell Surface Associated | MUC15 | 14695 |
| Mucin 16, Cell Surface Associated | MUC16 | 14696 |
| Mucin 17, Cell Surface Associated | MUC17 | 14697 |
| Mucin 19, Oligomeric | MUC19 | 14698 |
| Mucin 20, Cell Surface Associated | MUC20 | 14699 |
| Mucin 21, Cell Surface Associated | MUC21 | 14700 |
| Mucin 22 | MUC22 | 14701 |
| Indoleamine 2,3-Dioxygenase 1 | IDO1 | 14702 |
| Indoleamine 2,3-Dioxygenase 2 | IDO2 | 14703 |
| Inducible T Cell Costimulator Ligand | ICOSLG | 14704 |
| ROS Proto-Oncogene 1, Receptor Tyrosine | ROS1 | 14705 |
| Kinase | | |
| Tumor Necrosis Factor Receptor Superfamily | 4-1BB, CD137, ILA or | 14706 |
| Member 9 | TNFRSF9 | |
| 4-1BB Ligand | 4-1BB-L | 14707 |
| Glucocorticoid-induced TNFR family related | GITR | 14708 |
| gene | | |
| Glucocorticoid-induced TNFR family related | GITRL | 14709 |
| gene ligand | | |

[0842] In some embodiments, a T-cell of the disclosure is modified to silence or reduce expression of one or more gene(s) encoding intracellular proteins involved in checkpoint signaling to produce an armored T-cell of the disclosure. The activity of a T-cell of the disclosure may be enhanced by targeting any intracellular signaling protein involved in a checkpoint-signaling pathway, thereby achieving checkpoint inhibition or interference to one or more checkpoint pathways. Intracellular signaling proteins involved in checkpoint signaling include, but are not limited to, exemplary intracellular signaling proteins listed in Table 2.

TABLE 2
Exemplary Intracellular Signaling Proteins.

| Full Name | Abbreviation | SEQ ID NO: |
|---|---|---|
| phosphoinositide 3-kinase, subunit alpha | PI3K alpha | 14710 |
| phosphoinositide 3-kinase, subunit gamma | PI3K gamma | 14711 |
| Tyrosine-protein phosphatase non-receptor type | SHP2 or PTPN11 | 14712 |
| 11 | | |
| Protein phosphatase 2, subunit gamma | PP2A gamma | 14713 |
| Protein phosphatase 2, subunit beta | PP2A beta | 14714 |
| Protein phosphatase 2, subunit delta | PP2A delta | 14715 |
| Protein phosphatase 2, subunit epsilon | PP2A epsilon | 14716 |
| Protein phosphatase 2, subunit alpha | PP2A alpha | 14717 |
| RAC-alpha serine/threonine-protein kinase | AKT or PKB | 14718 |
| Tyrosine-protein kinase ZAP-70 | ZAP70 | 14719 |
| Amino acid sequence (KIEELE)-containing | KIEELE-domain | |
| domain protein | containing proteins | |
| BCL2 associated athanogene 6 | Bat3, Bag6 or Scythe | 14720 |
| B-cell lymphoma-extra large | Bcl-xL | 14721 |
| Bcl-2-related protein A1 | Bfl-1 or BCL2A1 | 14722 |

[0843] In some embodiments, a T-cell of the disclosure is modified to silence or reduce expression of one or more gene(s) encoding a transcription factor that hinders the efficacy of a therapy to produce an armored T-cell of the disclosure. The activity of armored T-cells may be enhanced or modulated by silencing or reducing expression (or repressing a function) of a transcription factor that hinders the efficacy of a therapy. Exemplary transcription factors that may be modified to silence or reduce expression or to repress a function thereof include, but are not limited to, the exemplary transcription factors listed in Table 3. For example, expression of a FOXP3 gene may be silenced or reduced in an armored T cell of the disclosure to prevent or reduce the formation of T regulatory CAR-T-cells (CAR-Treg cells), the expression or activity of which may reduce efficacy of a therapy.

TABLE 3
Exemplary Transcription Factors.

| Full Name | Abbreviation | SEQ ID NO: |
|---|---|---|
| activity-dependent neuroprotector homeobox | ADNP | 14723 |
| ADNP homeobox 2 | ADNP2 | 14724 |
| AE binding protein 1 | AEBP1 | 14725 |
| AE binding protein 2 | AEBP2 | 14726 |
| AF4/FMR2 family member 1 | AFF1 | 14727 |
| AF4/FMR2 family member 2 | AFF2 | 14728 |
| AF4/FMR2 family member 3 | AFF3 | 14729 |
| AF4/FMR2 family member 4 | AFF4 | 14730 |
| AT-hook containing transcription factor 1 | AHCTF1 | 14731 |
| aryl hydrocarbon receptor | AHR | 14732 |
| aryl-hydrocarbon receptor repressor | AHRR | 14733 |
| autoimmune regulator | AIRE | 14734 |
| AT-hook transcription factor | AKNA | 14735 |
| ALX homeobox 1 | ALX1 | 14736 |
| ALX homeobox 3 | ALX3 | 14737 |
| ALX homeobox 4 | ALX4 | 14738 |
| ankyrin repeat and zinc finger domain containing 1 | ANKZF1 | 14739 |
| adaptor related protein complex 5 zeta 1 subunit | AP5Z1 | 14740 |
| androgen receptor | AR | 14741 |
| arginine-fifty homeobox | ARGFX | 14742 |
| Rho GTPase activating protein 35 | ARHGAP35 | 14743 |
| AT-rich interaction domain 1A | ARID1A | 14744 |
| AT-rich interaction domain 1B | ARID1B | 14745 |
| AT-rich interaction domain 2 | ARID2 | 14746 |
| AT-rich interaction domain 3A | ARID3A | 14747 |
| AT-rich interaction domain 3B | ARID3B | 14748 |
| AT-rich interaction domain 3C | ARID3C | 14749 |
| AT-rich interaction domain 4A | ARID4A | 14750 |
| AT-rich interaction domain 4B | ARID4B | 14751 |
| AT-rich interaction domain 5A | ARID5A | 14752 |
| AT-rich interaction domain 5B | ARID5B | 14753 |
| aryl hydrocarbon receptor nuclear translocator | ARNT | 14754 |
| aryl hydrocarbon receptor nuclear translocator 2 | ARNT2 | 14755 |
| aryl hydrocarbon receptor nuclear translocator like | ARNTL | 14756 |
| aryl hydrocarbon receptor nuclear translocator like 2 | ARNTL2 | 14757 |
| aristaless related homeobox | ARX | 14758 |
| achaete-scute family bHLH transcription factor 1 | ASCL1 | 14759 |
| achaete-scute family bHLH transcription factor 2 | ASCL2 | 14760 |
| achaete-scute family bHLH transcription factor 3 | ASCL3 | 14761 |
| achaete-scute family bHLH transcription factor 4 | ASCL4 | 14762 |
| achaete-scute family bHLH transcription factor 5 | ASCL5 | 14763 |
| ash1 (absent, small, or homeotic)-like (Drosophila) | ASH1L | 14764 |
| ash2 (absent, small, or homeotic)-like (Drosophila) | ASH2L | 14765 |
| activating transcription factor 1 | ATF1 | 14766 |
| activating transcription factor 2 | ATF2 | 14767 |
| activating transcription factor 3 | ATF3 | 14768 |
| activating transcription factor 4 | ATF4 | 14769 |
| activating transcription factor 5 | ATF5 | 14770 |
| activating transcription factor 6 | ATF6 | 14771 |
| activating transcription factor 6 beta | ATF6B | 14772 |
| activating transcription factor 7 | ATF7 | 14773 |
| atonal bHLH transcription factor 1 | ATOH1 | 14774 |
| atonal bHLH transcription factor 7 | ATOH7 | 14775 |
| atonal bHLH transcription factor 8 | ATOH8 | 14776 |
| alpha thalassemia/mental retardation syndrome X- | ATRX | 14777 |
| linked | | |
| ataxin 7 | ATXN7 | 14778 |
| BTB and CNC homology 1, basic leucine zipper | BACH1 | 14779-14780 |
| transcription factor1 | | |
| BTB domain and CNC homolog 2 | BACH2 | 14781 |
| BarH like homeobox 1 | BARHL1 | 14782 |
| BarH like homeobox 2 | BARHL2 | 14783 |
| BARX homeobox 1 | BARX1 | 14784 |
| BARX homeobox 2 | BARX2 | 14785 |
| Basic Leucine Zipper ATF-Like Transcription Factor, | Batf | 14786 |
| basic leucine zipper transcription factor, ATF-like | BATF | 14786 |
| basic leucine zipper transcription factor, ATF-like 2 | BATF2 | 14787 |
| basic leucine zipper transcription factor, ATF-like 3 | BATF3 | 14788 |
| bobby sox homolog (Drosophila) | BBX | 14789 |
| B-cell CLL/lymphoma 11A | BCL11A | 14790 |
| B-cell CLL/lymphoma 11B | BCL11B | 14791 |
| B-cell CLL/lymphoma 3 | BCL3 | 14792 |
| B-cell CLL/lymphoma 6 | BCL6 | 14793 |
| B-cell CLL/lymphoma 6, member B | BCL6B | 14794 |
| BCL2 associated transcription factor 1 | BCLAF1 | 14795 |
| basic helix-loop-helix family member a15 | BHLHA15 | 14796 |
| basic helix-loop-helix family member a9 | BHLHA9 | 14797 |
| basic helix-loop-helix domain containing, class B, 9 | BHLHB9 | 14798 |
| basic helix-loop-helix family member e22 | BHLHE22 | 14799 |
| basic helix-loop-helix family member e23 | BHLHE23 | 14800 |
| basic helix-loop-helix family member e40 | BHLHE40 | 14801 |
| basic helix-loop-helix family member e41 | BHLHE41 | 14802 |
| Beta-Interferon Gene Positive-Regulatory Domain I | Blimp-1 | 14803 |
| Binding Factor | | |
| bone morphogenetic protein 2 | BMP2 | 14804 |
| basonuclin 1 | BNC1 | 14805 |
| basonuclin 2 | BNC2 | 14806 |
| bolA family member 1 | BOLA1 | 14807 |
| bolA family member 2 | BOLA2 | 14808 |
| bolA family member 3 | BOLA3 | 14809 |
| bromodomain PHD finger transcription factor | BPTF | 14810 |
| breast cancer 1 | BRCA1 | 14811 |
| brain specific homeobox | BSX | 14812 |
| chromosome 20 open reading frame 194 | C20orf194 | 14813 |
| calmodulin binding transcription activator 1 | CAMTA1 | 14814 |
| calmodulin binding transcription activator 2 | CAMTA2 | 14815 |
| calcium regulated heat stable protein 1 | CARHSP1 | 14816 |
| castor zinc finger 1 | CASZ1 | 14817 |
| core-binding factor, beta subunit | CBFB | 14818 |
| coiled-coil domain containing 79 | CCDC79 | 14819 |
| cell division cycle 5 like | CDC5L | 14820 |
| caudal type homeobox 1 | CDX1 | 14821 |
| caudal type homeobox 2 | CDX2 | 14822 |
| caudal type homeobox 4 | CDX4 | 14823 |
| CCAAT/enhancer binding protein alpha | CEBPA | 14824 |
| CCAAT/enhancer binding protein beta | CEBPB | 14825 |
| CCAAT/enhancer binding protein delta | CEBPD | 14826 |
| CCAAT/enhancer binding protein epsilon | CEBPE | 14827 |
| CCAAT/enhancer binding protein gamma | CEBPG | 14828 |
| CCAAT/enhancer binding protein zeta | CEBPZ | 14829 |
| centromere protein T | CENPT | 14830 |
| ceramide synthase 3 | CERS3 | 14831 |
| ceramide synthase 6 | CERS6 | 14832 |
| chromosome alignment maintaining phosphoprotein 1 | CHAMP1 | 14833 |
| capicua transcriptional repressor | CIC | 14834 |
| CDKN1A interacting zinc finger protein 1 | CIZ1 | 14835 |
| clock circadian regulator | CLOCK | 14836 |
| CCR4-NOT transcription complex subunit 4 | CNOT4 | 14837 |
| CPX chromosome region, candidate 1 | CPXCR1 | 14838 |
| cramped chromatin regulator homolog 1 | CRAMP1 | 14839 |
| cAMP responsive element binding protein 1 | CREB1 | 14840 |
| cAMP responsive element binding protein 3 | CREB3 | 14841 |
| cAMP responsive element binding protein 3-like 1 | CREB3L1 | 14842 |
| cAMP responsive element binding protein 3-like 2 | CREB3L2 | 14843 |
| cAMP responsive element binding protein 3-like 3 | CREB3L3 | 14844 |
| cAMP responsive element binding protein 3-like 4 | CREB3L4 | 14845 |
| cAMP responsive element binding protein 5 | CREB5 | 14846 |
| CREB binding protein | CREBBP | 14847 |
| cAMP responsive element binding protein-like 2 | CREBL2 | 14848 |
| CREB3 regulatory factor | CREBRF | 14849 |
| CREB/ATF bZIP transcription factor | CREBZF | 14850 |
| cAMP responsive element modulator | CREM | 14851 |
| cone-rod homeobox | CRX | 14852 |
| cysteine-serine-rich nuclear protein 1 | CSRNP1 | 14853 |
| cysteine-serine-rich nuclear protein 2 | CSRNP2 | 14854 |
| cysteine-serine-rich nuclear protein 3 | CSRNP3 | 14855 |
| CCCTC-binding factor (zinc finger protein) | CTCF | 14856 |
| CCCTC-binding factor like | CTCFL | 14857 |
| cut-like homeobox 1 | CUX1 | 14858-14859 |
| cut-like homeobox 2 | CUX2 | 14860 |
| CXXC finger protein 1 | CXXC1 | 14861 |
| dachshund family transcription factor 1 | DACH1 | 14862 |
| dachshund family transcription factor 2 | DACH2 | 14863 |
| D site of albumin promoter (albumin D-box) binding | DBP | 14864 |
| protein | | |
| developing brain homeobox 1 | DBX1 | 14865 |
| developing brain homeobox 2 | DBX2 | 14866 |
| damage specific DNA binding protein 2 | DDB2 | 14867 |
| DNA damage inducible transcript 3 | DDIT3 | 14868 |
| DEAF1, transcription factor | DEAF1 | 14869 |
| distal-less homeobox 1 | DLX1 | 14870 |
| distal-less homeobox 2 | DLX2 | 14871 |
| distal-less homeobox 3 | DLX3 | 14872 |
| distal-less homeobox 4 | DLX4 | 14873 |
| distal-less homeobox 5 | DLX5 | 14874 |
| distal-less homeobox 6 | DLX6 | 14875 |
| DNA methyltransferase 1 associated protein 1 | DMAP1 | 14876 |
| diencephalon/mesencephalon homeobox 1 | DMBX1 | 14877 |
| doublesex and mab-3 related transcription factor 1 | DMRT1 | 14878 |
| doublesex and mab-3 related transcription factor 2 | DMRT2 | 14879 |
| doublesex and mab-3 related transcription factor 3 | DMRT3 | 14880 |
| DMRT like family A1 | DMRTA1 | 14881 |
| DMRT like family A2 | DMRTA2 | 14882 |
| DMRT like family B with proline rich C-terminal 1 | DMRTB1 | 14883 |
| DMRT like family C1 | DMRTC1 | 14884 |
| DMRT like family C1B | DMRTC1B | 14884 |
| DMRT like family C2 | DMRTC2 | 14885 |
| cyclin D binding myb like transcription factor 1 | DMTF1 | 14886 |
| DnaJ heat shock protein family (Hsp40) member C1 | DNAJC1 | 14887 |
| DnaJ heat shock protein family (Hsp40) member C2 | DNAJC2 | 14888 |
| DnaJ heat shock protein family (Hsp40) member C21 | DNAJC21 | 14889 |
| DNA (cytosine-5-)-methyltransferase 1 | DNMT1 | 14890 |
| DNA (cytosine-5-)-methyltransferase 3 alpha | DNMT3A | 14891 |
| DNA (cytosine-5-)-methyltransferase 3 beta | DNMT3B | 14892 |
| DNA (cytosine-5-)-methyltransferase 3-like | DNMT3L | 14893 |
| double PHD fingers 1 | DPF1 | 14894 |
| double PHD fingers 2 | DPF2 | 14895 |
| double PHD fingers 3 | DPF3 | 14896 |
| divergent-paired related homeobox | DPRX | 14897 |
| down-regulator of transcription 1 | DR1 | 14898 |
| DR1 associated protein 1 | DRAP1 | 14899 |
| dorsal root ganglia homeobox | DRGX | 14900 |
| double homeobox 4 | DUX4 | 14901 |
| double homeobox 4 like 9 | DUX4L9 | 14902 |
| double homeobox A | DUXA | 14903 |
| E2F transcription factor 1 | E2F1 | 14904 |
| E2F transcription factor 2 | E2F2 | 14905 |
| E2F transcription factor 3 | E2F3 | 14906 |
| E2F transcription factor 4 | E2F4 | 14907 |
| E2F transcription factor 5 | E2F5 | 14908 |
| E2F transcription factor 6 | E2F6 | 14909 |
| E2F transcription factor 7 | E2F7 | 14910 |
| E2F transcription factor 8 | E2F8 | 14911 |
| E4F transcription factor 1 | E4F1 | 14912 |
| early B-cell factor 1 | EBF1 | 14913 |
| early B-cell factor 2 | EBF2 | 14914 |
| early B-cell factor 3 | EBF3 | 14915 |
| early B-cell factor 4 | EBF4 | 14916 |
| early growth response 1 | EGR1 | 14917 |
| early growth response 2 | EGR2 | 14918 |
| early growth response 3 | EGR3 | 14919 |
| early growth response 4 | EGR4 | 14920 |
| ets homologous factor | EHF | 14921 |
| E74-like factor 1 (ets domain transcription factor) | ELF1 | 14922 |
| E74-like factor 2 (ets domain transcription factor) | ELF2 | 14923 |
| E74-like factor 3 (ets domain transcription factor, | ELF3 | 14924 |
| epithelial-specific) | | |
| E74-like factor 4 (ets domain transcription factor) | ELF4 | 14925 |
| E74-like factor 5 (ets domain transcription factor) | ELF5 | 14926 |
| ELK1, member of ETS oncogene family | ELK1 | 14927 |
| ELK3, ETS-domain protein (SRF accessory protein 2) | ELK3 | 14928 |
| ELK4, ETS-domain protein (SRF accessory protein 1) | ELKA | 14929 |
| ELM2 and Myb/SANT-like domain containing 1 | ELMSAN1 | 14930 |
| empty spiracles homeobox 1 | EMX1 | 14931 |
| empty spiracles homeobox 2 | EMX2 | 14932 |
| engrailed homeobox 1 | EN1 | 14933 |
| engrailed homeobox 2 | EN2 | 14934 |
| enolase 1, (alpha) | ENO1 | 14935 |
| eomesodermin | EOMES | 14936 |
| endothelial PAS domain protein 1 | EPAS1 | 14937 |
| Ets2 repressor factor | ERF | 14938 |
| v-ets avian erythroblastosis virus E26 oncogene | ERG | 14939-14940 |
| homolog | | |
| estrogen receptor 1 | ESR1 | 14941 |
| estrogen receptor 2 (ER beta) | ESR2 | 14942 |
| estrogen related receptor alpha | ESRRA | 14943 |
| estrogen related receptor beta | ESRRB | 14944 |
| estrogen related receptor gamma | ESRRG | 14945 |
| ESX homeobox 1 | ESX1 | 14946 |
| v-ets avian erythroblastosis virus E26 oncogene | ETS1 | 14947 |
| homolog 1 | | |
| v-ets avian erythroblastosis virus E26 oncogene | ETS2 | 14948 |
| homolog 2 | | |
| ets variant 1 | ETV1 | 14949 |
| ets variant 2 | ETV2 | 14950 |
| ets variant 3 | ETV3 | 14951 |
| ets variant 3-like | ETV3L | 14952 |
| ets variant 4 | ETV4 | 14953 |
| ets variant 5 | ETV5 | 14954 |
| ets variant 6 | ETV6 | 14955 |
| ets variant 7 | ETV7 | 14956 |
| even-skipped homeobox 1 | EVX1 | 14957 |
| even-skipped homeobox 2 | EVX2 | 14958 |
| enhancer of zeste 1 polycomb repressive complex 2 | EZH1 | 14959 |
| subunit | | |
| enhancer of zeste 2 polycomb repressive complex 2 | EZH2 | 14960 |
| subunit | | |
| family with sequence similarity 170 member A | FAM170A | 14961 |
| Fer3-like bHLH transcription factor | FERD3L | 14962 |
| FEV (ETS oncogene family) | FEV | 14963 |
| FEZ family zinc finger 1 | FEZF1 | 14964 |
| FEZ family zinc finger 2 | FEZF2 | 14965 |
| folliculogenesis specific bHLH transcription factor | FIGLA | 14966 |
| FLT3-interacting zinc finger 1 | FIZ1 | 14967 |
| Fli-1 proto-oncogene, ETS transcription factor | FLI1 | 14968 |
| FBJ murine osteosarcoma viral oncogene homolog | FOS | 14969 |
| FBJ murine osteosarcoma viral oncogene homolog B | FOSB | 14970 |
| FOS like antigen 1 | FOSL1 | 14971 |
| FOS like antigen 2 | FOSL2 | 14972 |
| forkhead box A1 | FOXA1 | 14973 |
| forkhead box A2 | FOXA2 | 14974 |
| forkhead box A3 | FOXA3 | 14975 |
| forkhead box B1 | FOXB1 | 14976 |
| forkhead box B2 | FOXB2 | 14977 |
| forkhead box C1 | FOXC1 | 14978 |
| forkhead box C2 | FOXC2 | 14979 |
| forkhead box D1 | FOXD1 | 14980 |
| forkhead box D2 | FOXD2 | 14981 |
| forkhead box D3 | FOXD3 | 14982 |
| forkhead box D4 | FOXD4 | 14983 |
| forkhead box D4-like 1 | FOXD4L1 | 14984 |
| forkhead box D4-like 3 | FOXD4L3 | 14985 |
| forkhead box D4-like 4 | FOXD4L4 | 14986 |
| forkhead box D4-like 5 | FOXD4L5 | 14987 |
| forkhead box D4-like 6 | FOXD4L6 | 14988 |
| forkhead box E1 | FOXE1 | 14989 |
| forkhead box E3 | FOXE3 | 14990 |
| forkhead box F1 | FOXF1 | 14991 |
| forkhead box F2 | FOXF2 | 14992 |
| forkhead box G1 | FOXG1 | 14993 |
| forkhead box H1 | FOXH1 | 14994 |
| forkhead box I1 | FOXI1 | 14995 |
| forkhead box I2 | FOXI2 | 14996 |
| forkhead box I3 | FOXI3 | 14997 |
| forkhead box J1 | FOXJ1 | 14998 |
| forkhead box J2 | FOXJ2 | 14999 |
| forkhead box J3 | FOXJ3 | 15000 |
| forkhead box K1 | FOXK1 | 15001 |
| forkhead box K2 | FOXK2 | 15002 |
| forkhead box L1 | FOXL1 | 15003 |
| forkhead box L2 | FOXL2 | 15004 |
| forkhead box M1 | FOXM1 | 15005 |
| forkhead box N1 | FOXN1 | 15006 |
| forkhead box N2 | FOXN2 | 15007 |
| forkhead box N3 | FOXN3 | 15008 |
| forkhead box N4 | FOXN4 | 15009 |
| forkhead box O1 | FOXO1 | 15010 |
| forkhead box O3 | FOXO3 | 15011 |
| forkhead box O4 | FOXO4 | 15012 |
| forkhead box O6 | FOXO6 | 15013 |
| forkhead box P1 | FOXP1 | 15014 |
| forkhead box P2 | FOXP3 | 15015 |
| forkhead box P3 | FOXP4 | 15016 |
| forkhead box P4 | FOXQ1 | 15017 |
| forkhead box Q1 | FOXR1 | 15018 |
| forkhead box R1 | FOXR2 | 15019 |
| forkhead box R2 | FOXS1 | 15020 |
| forkhead box S1 | FOXP3 | 15021 |
| far upstream element binding protein 1 | FUBP1 | 15022 |
| far upstream element (FUSE) binding protein 3 | FUBP3 | 15023 |
| GA binding protein transcription factor alpha subunit | GABPA | 15024 |
| GA binding protein transcription factor, beta subunit 1 | GABPB1 | 15025 |
| GA binding protein transcription factor, beta subunit 2 | GABPB2 | 15026 |
| GATA binding protein 1 (globin transcription factor 1) | GATA1 | 15027 |
| GATA binding protein 2 | GATA2 | 15028 |
| GATA binding protein 3 | GATA3 | 15029 |
| GATA binding protein 4 | GATA4 | 15030 |
| GATA binding protein 5 | GATA5 | 15031 |
| GATA binding protein 6 | GATA6 | 15032 |
| GATA zinc finger domain containing 1 | GATAD1 | 15033 |
| GATA zinc finger domain containing 2A | GATAD2A | 15034 |
| GATA zinc finger domain containing 2B | GATAD2B | 15035 |
| gastrulation brain homeobox 1 | GBX1 | 15036 |
| gastrulation brain homeobox 2 | GBX2 | 15037 |
| GC-rich sequence DNA-binding factor 2 | GCFC2 | 15038 |
| glial cells missing homolog 1 | GCM1 | 15039 |
| glial cells missing homolog 2 | GCM2 | 15040 |
| growth factor independent 1 transcription repressor | GFI1 | 15041 |
| growth factor independent 1B transcription repressor | GFI1B | 15042 |
| GLI family zinc finger 1 | GLI1 | 15043 |
| GLI family zinc finger 2 | GLI2 | 15044 |
| GLI family zinc finger 3 | GLI3 | 15045 |
| GLI family zinc finger 4 | GLI4 | 15046 |
| GLIS family zinc finger 1 | GLIS1 | 15047 |
| GLIS family zinc finger 2 | GLIS2 | 15048 |
| GLIS family zinc finger 3 | GLIS3 | 15049 |
| glucocorticoid modulatory element binding protein 1 | GMEB1 | 15050 |
| glucocorticoid modulatory element binding protein 2 | GMEB2 | 15051 |
| gon-4-like (C. elegans) | GON4L | 15052 |
| grainyhead like transcription factor 1 | GRHL1 | 15053 |
| grainyhead like transcription factor 2 | GRHL2 | 15054 |
| grainyhead like transcription factor 3 | GRHL3 | 15055 |
| goosecoid homeobox | GSC | 15056 |
| goosecoid homeobox 2 | GSC2 | 15057 |
| GS homeobox 1 | GSX1 | 15058 |
| GS homeobox 2 | GSX2 | 15059 |
| general transcription factor IIi | GTF2I | 15060 |
| general transcription factor IIIA | GTF3A | 15061 |
| GDNF inducible zinc finger protein 1 | GZF1 | 15062 |
| heart and neural crest derivatives expressed 1 | HAND1 | 15063 |
| heart and neural crest derivatives expressed 2 | HAND2 | 15064 |
| HMG-box transcription factor 1 | HBP1 | 15065-15066 |
| highly divergent homeobox | HDX | 15067 |
| helt bHLH transcription factor | HELT | 15068 |
| hes family bHLH transcription factor 1 | HES1 | 15069-15070 |
| hes family bHLH transcription factor 2 | HES2 | 15071 |
| hes family bHLH transcription factor 3 | HES3 | 15072 |
| hes family bHLH transcription factor 4 | HES4 | 15073 |
| hes family bHLH transcription factor 5 | HES5 | 15074 |
| hes family bHLH transcription factor 6 | HES6 | 15075 |
| hes family bHLH transcription factor 7 | HES7 | 15076 |
| HESX homeobox 1 | HESX1 | 15077 |
| hes-related family bHLH transcription factor with | HEY1 | 15078 |
| YRPW motif 1 | | |
| hes-related family bHLH transcription factor with | HEY2 | 15079 |
| YRPW motif 2 | | |
| hes-related family bHLH transcription factor with | HEYL | 15080 |
| YRPW motif-like | | |
| hematopoietically expressed homeobox | HHEX | 15081 |
| hypermethylated in cancer 1 | HIC1 | 15082 |
| hypermethylated in cancer 2 | HIC2 | 15083 |
| hypoxia inducible factor 1, alpha subunit (basic helix- | HIF1A | 15084 |
| loop-helix transcription factor) | | |
| hypoxia inducible factor 3, alpha subunit | HIF3A | 15085 |
| histone H4 transcription factor | HINFP | 15086 |
| human immunodeficiency virus type I enhancer | HIVEP1 | 15087 |
| binding protein 1 | | |
| human immunodeficiency virus type I enhancer | HIVEP2 | 15088 |
| binding protein 2 | | |
| human immunodeficiency virus type I enhancer | HIVEP3 | 15089 |
| binding protein 3 | | |
| HKR1, GLI-Kruppel zinc finger family member | HKR1 | 15090 |
| hepatic leukemia factor | HLF | 15091 |
| helicase-like transcription factor | HLTF | 15092 |
| H2.0-like homeobox | HLX | 15093 |
| homeobox containing 1 | HMBOX1 | 15094 |
| high mobility group 20A | HMG20A | 15095 |
| high mobility group 20B | HMG20B | 15096 |
| high mobility group AT-hook 1 | HMGA1 | 15097 |
| high mobility group AT-hook 2 | HMGA2 | 15098 |
| HMG-box containing 3 | HMGXB3 | 15099 |
| HMG-box containing 4 | HMGXB4 | 15100 |
| H6 family homeobox 1 | HMX1 | 15101 |
| H6 family homeobox 2 | HMX2 | 15102 |
| H6 family homeobox 3 | HMX3 | 15103-15104 |
| HNF1 homeobox A | HNF1A | 15105 |
| HNF1 homeobox B | HNF1B | 15106 |
| hepatocyte nuclear factor 4 alpha | HNF4A | 15107 |
| hepatocyte nuclear factor 4 gamma | HNF4G | 15108 |
| heterogeneous nuclear ribonucleoprotein K | HNRNPK | 15109 |
| homeobox and leucine zipper encoding | HOMEZ | 15110 |
| HOP homeobox | HOPX | 15111 |
| homeobox A1 | HOXA1 | 15112 |
| homeobox A10 | HOXA10 | 15113 |
| homeobox A11 | HOXA11 | 15114 |
| homeobox A13 | HOXA13 | 15115 |
| homeobox A2 | HOXA2 | 15116 |
| homeobox A3 | HOXA3 | 15117 |
| homeobox A4 | HOXA4 | 15118 |
| homeobox A5 | HOXA5 | 15119 |
| homeobox A6 | HOXA6 | 15120 |
| homeobox A7 | HOXA7 | 15121 |
| homeobox A9 | HOXA9 | 15122 |
| homeobox B1 | HOXB1 | 15123 |
| homeobox B13 | HOXB13 | 15124 |
| homeobox B2 | HOXB2 | 15125 |
| homeobox B3 | HOXB3 | 15126 |
| homeobox B4 | HOXB4 | 15127 |
| homeobox B5 | HOXB5 | 15128 |
| homeobox B6 | HOXB6 | 15129 |
| homeobox B7 | HOXB7 | 15130 |
| homeobox B8 | HOXB8 | 15131 |
| homeobox B9 | HOXB9 | 15132 |
| homeobox C10 | HOXC10 | 15133 |
| homeobox C11 | HOXC11 | 15134 |
| homeobox C12 | HOXC12 | 15135 |
| homeobox C13 | HOXC13 | 15136 |
| homeobox C4 | HOXC4 | 15137 |
| homeobox C5 | HOXC5 | 15138 |
| homeobox C6 | HOXC6 | 15139 |
| homeobox C8 | HOXC8 | 15140 |
| homeobox C9 | HOXC9 | 15141 |
| homeobox D1 | HOXD1 | 15142 |
| homeobox D10 | HOXD10 | 15143 |
| homeobox D11 | HOXD11 | 15144 |
| homeobox D12 | HOXD12 | 15145 |
| homeobox D13 | HOXD13 | 15146 |
| homeobox D3 | HOXD3 | 15147 |
| homeobox D4 | HOXD4 | 15148 |
| homeobox D8 | HOXD8 | 15149 |
| homeobox D9 | HOXD9 | 15150 |
| heat shock transcription factor 1 | HSF1 | 15151 |
| heat shock transcription factor 2 | HSF2 | 15152 |
| heat shock transcription factor 4 | HSF4 | 15153 |
| heat shock transcription factor family member 5 | HSF5 | 15154 |
| heat shock transcription factor family, X-linked 1 | HSFX1 | 15155 |
| heat shock transcription factor, Y-linked 1 | HSFY1 | 15156 |
| heat shock transcription factor, Y-linked 2 | HSFY2 | 15156 |
| inhibitor of DNA binding 1, dominant negative helix- | ID1 | 15157 |
| loop-helix protein | | |
| inhibitor of DNA binding 2, dominant negative helix- | ID2 | 15158 |
| loop-helix protein | | |
| inhibitor of DNA binding 3, dominant negative helix- | ID3 | 15159 |
| loop-helix protein | | |
| inhibitor of DNA binding 4, dominant negative helix- | ID4 | 15160 |
| loop-helix protein | | |
| interferon, gamma-inducible protein 16 | IFI16 | 15161 |
| IKAROS family zinc finger 1 | IKZF1 | 15162 |
| IKAROS family zinc finger 2 | IKZF2 | 15163 |
| IKAROS family zinc finger 3 | IKZF3 | 15164 |
| IKAROS family zinc finger 4 | IKZF4 | 15165 |
| IKAROS family zinc finger 5 | IKZF5 | 15166 |
| insulinoma associated 1 | INSM1 | 15167 |
| insulinoma-associated 2 | INSM2 | 15168 |
| interferon regulatory factor 1 | IRF1 | 15169 |
| interferon regulatory factor 2 | IRF2 | 15170 |
| interferon regulatory factor 3 | IRF3 | 15171 |
| interferon regulatory factor 4 | IRF4 | 15172 |
| interferon regulatory factor 5 | IRF5 | 15173 |
| interferon regulatory factor 6 | IRF6 | 15174 |
| interferon regulatory factor 7 | IRF7 | 15175 |
| interferon regulatory factor 8 | IRF8 | 15176 |
| interferon regulatory factor 9 | IRF9 | 15177 |
| iroquois homeobox 1 | IRX1 | 15178 |
| iroquois homeobox 2 | IRX2 | 15179 |
| iroquois homeobox 3 | IRX3 | 15180 |
| iroquois homeobox 4 | IRX4 | 15181 |
| iroquois homeobox 5 | IRX5 | 15182 |
| iroquois homeobox 6 | IRX6 | 15183 |
| ISL LIM homeobox 1 | ISL1 | 15184 |
| ISL LIM homeobox 2 | ISL2 | 15185 |
| intestine specific homeobox | ISX | 15186 |
| jumonji and AT-rich interaction domain containing 2 | JARID2 | 15187 |
| JAZF zinc finger 1 | JAZF1 | 15188 |
| Jun dimerization protein 2 | JDP2 | 15189 |
| jun proto-oncogene | JUN | 15190 |
| jun B proto-oncogene | JUNB | 15191 |
| jun D proto-oncogene | JUND | 15192 |
| K(lysine) acetyltransferase 5 | KAT5 | 15193 |
| lysine acetyltransferase 6A | KAT6A | 15194 |
| lysine acetyltransferase 6B | KAT6B | 15195 |
| lysine acetyltransferase 7 | KAT7 | 15196 |
| lysine acetyltransferase 8 | KAT8 | 15197 |
| potassium channel modulatory factor 1 | KCMF1 | 15198 |
| potassium voltage-gated channel interacting protein 3 | KCNIP3 | 15199 |
| lysine demethylase 2A | KDM2A | 15200 |
| lysine demethylase 5A | KDM5A | 15201 |
| lysine demethylase 5B | KDM5B | 15202 |
| lysine demethylase 5C | KDM5C | 15203 |
| lysine demethylase 5D | KDM5D | 15204 |
| KH-type splicing regulatory protein | KHSRP | 15205 |
| KIAA1549 | KIAA1549 | 15206 |
| Kruppel-like factor 1 (erythroid) | KLF1 | 15207 |
| Kruppel-like factor 10 | KLF10 | 15208 |
| Kruppel-like factor 11 | KLF11 | 15209 |
| Kruppel-like factor 12 | KLF12 | 15210 |
| Kruppel-like factor 13 | KLF13 | 15211 |
| Kruppel-like factor 14 | KLF14 | 15212 |
| Kruppel-like factor 15 | KLF15 | 15213 |
| Kruppel-like factor 16 | KLF16 | 15214 |
| Kruppel-like factor 17 | KLF17 | 15215 |
| Kruppel-like factor 2 | KLF2 | 15216 |
| Kruppel-like factor 3 (basic) | KLF3 | 15217 |
| Kruppel-like factor 4 (gut) | KLF4 | 15218 |
| Kruppel-like factor 5 (intestinal) | KLF5 | 15219 |
| Kruppel-like factor 6 | KLF6 | 15220 |
| Kruppel-like factor 7 (ubiquitous) | KLF7 | 15221 |
| Kruppel-like factor 8 | KLF8 | 15222 |
| Kruppel-like factor 9 | KLF9 | 15223 |
| lysine methyltransferase 2A | KMT2A | 15224 |
| lysine methyltransferase 2B | KMT2B | 15225 |
| lysine methyltransferase 2C | KMT2C | 15226 |
| lysine methyltransferase 2E | KMT2E | 15227 |
| l(3)mbt-like 1 (Drosophila) | L3MBTL1 | 15228 |
| l(3)mbt-like 2 (Drosophila) | L3MBTL2 | 15229 |
| l(3)mbt-like 3 (Drosophila) | L3MBTL3 | 15230 |
| l(3)mbt-like 4 (Drosophila) | L3MBTL4 | 15231 |
| ladybird homeobox 1 | LBX1 | 15232 |
| ladybird homeobox 2 | LBX2 | 15233 |
| ligand dependent nuclear receptor corepressor | LCOR | 15234 |
| ligand dependent nuclear receptor corepressor like | LCORL | 15235 |
| lymphoid enhancer binding factor 1 | LEF1 | 15236 |
| leucine twenty homeobox | LEUTX | 15237 |
| LIM homeobox 1 | LHX1 | 15238 |
| LIM homeobox 2 | LHX2 | 15239 |
| LIM homeobox 3 | LHX3 | 15240 |
| LIM homeobox 4 | LHX4 | 15241 |
| LIM homeobox 5 | LHX5 | 15242 |
| LIM homeobox 6 | LHX6 | 15243 |
| LIM homeobox 8 | LHX8 | 15244 |
| LIM homeobox 9 | LHX9 | 15245 |
| LIM homeobox transcription factor 1, alpha | LMX1A | 15246 |
| LIM homeobox transcription factor 1, beta | LMX1B | 15247 |
| LOC730110 | LOC730110 | |
| leucine rich repeat (in FLII) interacting protein 1 | LRRFIP1 | 15248 |
| leucine rich repeat (in FLII) interacting protein 2 | LRRFIP2 | 15249 |
| Ly1 antibody reactive | LYAR | 15250 |
| lymphoblastic leukemia associated hematopoiesis | LYL1 | 15251 |
| regulator 1 | | |
| maelstrom spermatogenic transposon silencer | MAEL | 15252 |
| v-maf avian musculoaponeurotic fibrosarcoma | MAF | 15253 |
| oncogene homolog | | |
| MAF1 homolog, negative regulator of RNA | MAF1 | 15254 |
| polymerase III | | |
| v-maf avian musculoaponeurotic fibrosarcoma | MAFA | 15255-15256 |
| oncogene homolog A | | |
| v-maf avian musculoaponeurotic fibrosarcoma | MAFB | 15257 |
| oncogene homolog B | | |
| v-maf avian musculoaponeurotic fibrosarcoma | MAFF | 15258 |
| oncogene homolog F | | |
| v-maf avian musculoaponeurotic fibrosarcoma | MAFG | 15259 |
| oncogene homolog G | | |
| v-maf avian musculoaponeurotic fibrosarcoma | MAFK | 15260 |
| oncogene homolog K | | |
| matrin 3 | MATR3 | 15261 |
| MYC associated factor X | MAX | 15262 |
| MYC associated zinc finger protein | MAZ | 15263 |
| methyl-CpG binding domain protein 1 | MBD1 | 15264 |
| methyl-CpG binding domain protein 2 | MBD2 | 15265 |
| methyl-CpG binding domain protein 3 | MBD3 | 15266 |
| methyl-CpG binding domain protein 3-like 1 | MBD3L1 | 15267 |
| methyl-CpG binding domain protein 3-like 2 | MBD3L2 | 15268 |
| methyl-CpG binding domain 4 DNA glycosylase | MBD4 | 15269 |
| methyl-CpG binding domain protein 5 | MBD5 | 15270 |
| methyl-CpG binding domain protein 6 | MBD6 | 15271 |
| muscleblind like splicing regulator 3 | MBNL3 | 15272 |
| MDS1 and EVI1 complex locus | MECOM | 15273 |
| methyl-CpG binding protein 2 | MECP2 | 15274 |
| myocyte enhancer factor 2A | MEF2A | 15275 |
| myocyte enhancer factor 2B | MEF2B | 15276 |
| myocyte enhancer factor 2C | MEF2C | 15277 |
| myocyte enhancer factor 2D | MEF2D | 15278 |
| Meis homeobox 1 | MEIS1 | 15279 |
| Meis homeobox 2 | MEIS2 | 15280 |
| Meis homeobox 3 | MEIS3 | 15281 |
| Meis homeobox 3 pseudogene 1 | MEIS3P1 | 15282 |
| Meis homeobox 3 pseudogene 2 | MEIS3P2 | 15283 |
| mesenchyme homeobox 1 | MEOX1 | 15284 |
| mesenchyme homeobox 2 | MEOX2 | 15285 |
| mesoderm posterior bHLH transcription factor 1 | MESP1 | 15286 |
| mesoderm posterior bHLH transcription factor 2 | MESP2 | 15287 |
| MGA, MAX dimerization protein | MGA | 15288-15289 |
| MIER1 transcriptional regulator | MIER1 | 15290 |
| MIER family member 2 | MIER2 | 15291 |
| MIER family member 3 | MIER3 | 15292 |
| MIS18 binding protein 1 | MIS18BP1 | 15293 |
| microphthalmia-associated transcription factor | MITF | 15294 |
| Mix paired-like homeobox | MIXL1 | 15295 |
| mohawk homeobox | MKX | 15296 |
| myeloid/lymphoid or mixed-lineage leukemia; | MLLT1 | 15297 |
| translocated to, 1 | | |
| myeloid/lymphoid or mixed-lineage leukemia; | MLLT10 | 15298 |
| translocated to, 10 | | |
| myeloid/lymphoid or mixed-lineage leukemia; | MLLT11 | 15299 |
| translocated to, 11 | | |
| myeloid/lymphoid or mixed-lineage leukemia; | MLLT3 | 15300 |
| translocated to, 3 | | |
| myeloid/lymphoid or mixed-lineage leukemia; | MLLT4 | 15301 |
| translocated to, 4 | | |
| myeloid/lymphoid or mixed-lineage leukemia; | MLLT6 | 15302 |
| translocated to, 6 | | |
| MLX, MAX dimerization protein | MLX | 15303 |
| MLX interacting protein | MLXIP | 15304 |
| MLX interacting protein-like | MLXIPL | 15305 |
| MAX network transcriptional repressor | MNT | 15306 |
| motor neuron and pancreas homeobox 1 | MNX1 | 15307 |
| musculin | MSC | 15308 |
| mesogenin 1 | MSGN1 | 15309 |
| msh homeobox 1 | MSX1 | 15310 |
| msh homeobox 2 | MSX2 | 15311 |
| metastasis associated 1 | MTA1 | 15312 |
| metastasis associated 1 family member 2 | MTA2 | 15313 |
| metastasis associated 1 family member 3 | MTA3 | 15314 |
| metal-regulatory transcription factor 1 | MTF1 | 15315 |
| metal response element binding transcription factor 2 | MTF2 | 15316 |
| MAX dimerization protein 1 | MXD1 | 15317 |
| MAX dimerization protein 3 | MXD3 | 15318 |
| MAX dimerization protein 4 | MXD4 | 15319 |
| MAX interactor 1, dimerization protein | MXI1 | 15320 |
| v-myb avian myeloblastosis viral oncogene homolog | MYB | 15321 |
| v-myb avian myeloblastosis viral oncogene homolog- | MYBL1 | 15322 |
| like 1 | | |
| v-myb avian myeloblastosis viral oncogene homolog- | MYBL2 | 15323 |
| like 2 | | |
| v-myc avian myelocytomatosis viral oncogene | MYC | 15324 |
| homolog | | |
| v-myc avian myelocytomatosis viral oncogene lung | MYCL | 15325 |
| carcinoma derived homolog | | |
| MYCL pseudogene 1 | MYCLP1 | 15326 |
| v-myc avian myelocytomatosis viral oncogene | MYCN | 15327 |
| neuroblastoma derived homolog | | |
| myogenic factor 5 | MYF5 | 15328 |
| myogenic factor 6 | MYF6 | 15329 |
| myoneurin | MYNN | 15330 |
| myogenic differentiation 1 | MYOD1 | 15331 |
| myogenin (myogenic factor 4) | MYOG | 15332 |
| myelin regulatory factor | MYRF | 15333 |
| Myb-like, SWIRM and MPN domains 1 | MYSM1 | 15334 |
| myelin transcription factor 1 | MYT1 | 15335-15336 |
| myelin transcription factor 1 like | MYT1L | 15337 |
| myeloid zinc finger 1 | MZF1 | 15338 |
| Nanog homeobox | NANOG | 15339 |
| NANOG neighbor homeobox | NANOGNB | 15340 |
| Nanog homeobox pseudogene 1 | NANOGP1 | 15341 |
| Nanog homeobox pseudogene 8 | NANOGP8 | 15342 |
| nuclear receptor coactivator 1 | NCOA1 | 15343 |
| nuclear receptor coactivator 2 | NCOA2 | 15344 |
| nuclear receptor coactivator 3 | NCOA3 | 15345 |
| nuclear receptor coactivator 4 | NCOA4 | 15346 |
| nuclear receptor coactivator 5 | NCOA5 | 15347 |
| nuclear receptor coactivator 6 | NCOA6 | 15348 |
| nuclear receptor coactivator 7 | NCOA7 | 15349 |
| nuclear receptor corepressor 1 | NCOR1 | 15350 |
| nuclear receptor corepressor 2 | NCOR2 | 15351 |
| neuronal differentiation 1 | NEUROD1 | 15352 |
| neuronal differentiation 2 | NEUROD2 | 15353 |
| neuronal differentiation 4 | NEUROD4 | 15354 |
| neuronal differentiation 6 | NEUROD6 | 15355 |
| neurogenin 1 | NEUROG1 | 15356 |
| neurogenin 2 | NEUROG2 | 15357 |
| neurogenin 3 | NEUROG3 | 15358 |
| nuclear factor of activated T-cells 5, tonicity- | NFAT5 | 15359 |
| responsive | | |
| nuclear factor of activated T-cells, cytoplasmic, | NFATC1 | 15360 |
| calcineurin-dependent 1 | | |
| nuclear factor of activated T-cells, cytoplasmic, | NFATC2 | 15361 |
| calcineurin-dependent 2 | | |
| nuclear factor of activated T-cells, cytoplasmic, | NFATC3 | 15362 |
| calcineurin-dependent 3 | | |
| nuclear factor of activated T-cells, cytoplasmic, | NFATC4 | 15363 |
| calcineurin-dependent 4 | | |
| nuclear factor, erythroid 2 | NFE2 | 15364 |
| nuclear factor, erythroid 2 like 1 | NFE2L1 | 15365 |
| nuclear factor, erythroid 2 like 2 | NFE2L2 | 15366 |
| nuclear factor, erythroid 2 like 3 | NFE2L3 | 15367 |
| nuclear factor I/A | NFIA | 15368 |
| nuclear factor I/B | NFIB | 15369 |
| nuclear factor I/C (CCAAT-binding transcription | NFIC | 15370 |
| factor) | | |
| nuclear factor, interleukin 3 regulated | NFIL3 | 15371 |
| nuclear factor I/X (CCAAT-binding transcription | NFIX | 15372 |
| factor) | | |
| nuclear factor of kappa light polypeptide gene | NFKB1 | 15373 |
| enhancer in B-cells 1 | | |
| nuclear factor of kappa light polypeptide gene | NFKB2 | 15374 |
| enhancer in B-cells 2 (p49/p100) | | |
| nuclear factor of kappa light polypeptide gene | NFKBIA | 15375 |
| enhancer in B-cells inhibitor, alpha | | |
| nuclear factor of kappa light polypeptide gene | NFKBIB | 15376 |
| enhancer in B-cells inhibitor, beta | | |
| nuclear factor of kappa light polypeptide gene | NFKBID | 15377 |
| enhancer in B-cells inhibitor, delta | | |
| nuclear factor of kappa light polypeptide gene | NFKBIE | 15378 |
| enhancer in B-cells inhibitor, epsilon | | |
| nuclear factor of kappa light polypeptide gene | NFKBIL1 | 15379 |
| enhancer in B-cells inhibitor-like 1 | | |
| nuclear factor of kappa light polypeptide gene | NFKBIZ | 15380 |
| enhancer in B-cells inhibitor, zeta | | |
| nuclear factor related to kappaB binding protein | NFRKB | 15381 |
| nuclear transcription factor, X-box binding 1 | NFX1 | 15382 |
| nuclear transcription factor, X-box binding-like 1 | NFXL1 | 15383 |
| nuclear transcription factor Y subunit alpha | NFYA | 15384 |
| nuclear transcription factor Y subunit beta | NFYB | 15385 |
| nuclear transcription factor Y subunit gamma | NFYC | 15386 |
| nescient helix-loop-helix 1 | NHLH1 | 15387 |
| nescient helix-loop-helix 2 | NHLH2 | 15388 |
| NFKB repressing factor | NKRF | 15389 |
| NK1 homeobox 1 | NKX1-1 | 15390 |
| NK1 homeobox 2 | NKX1-2 | 15391 |
| NK2 homeobox 1 | NKX2-1 | 15392 |
| NK2 homeobox 2 | NKX2-2 | 15393 |
| NK2 homeobox 3 | NKX2-3 | 15394 |
| NK2 homeobox 4 | NKX2-4 | 15395 |
| NK2 homeobox 5 | NKX2-5 | 15396 |
| NK2 homeobox 6 | NKX2-6 | 15397 |
| NK2 homeobox 8 | NKX2-8 | 15398 |
| NK3 homeobox 1 | NKX3-1 | 15399 |
| NK3 homeobox 2 | NKX3-2 | 15400 |
| NK6 homeobox 1 | NKX6-1 | 15401 |
| NK6 homeobox 2 | NKX6-2 | 15402 |
| NK6 homeobox 3 | NKX6-3 | 15403 |
| NOBOX oogenesis homeobox | NOBOX | 15404 |
| NOC3 like DNA replication regulator | NOC3L | 15405 |
| nucleolar complex associated 4 homolog | NOC4L | 15406 |
| non-POU domain containing, octamer-binding | NONO | 15407 |
| notochord homeobox | NOTO | 15408 |
| neuronal PAS domain protein 1 | NPAS1 | 15409 |
| neuronal PAS domain protein 2 | NPAS2 | 15410 |
| neuronal PAS domain protein 3 | NPAS3 | 15411 |
| neuronal PAS domain protein 4 | NPAS4 | 15412 |
| nuclear receptor subfamily 0 group B member 1 | NR0B1 | 15413 |
| nuclear receptor subfamily 0 group B member 2 | NR0B2 | 15414 |
| nuclear receptor subfamily 1 group D member 1 | NR1D1 | 15415 |
| nuclear receptor subfamily 1 group D member 2 | NR1D2 | 15416 |
| nuclear receptor subfamily 1 group H member 2 | NR1H2 | 15417 |
| nuclear receptor subfamily 1 group H member 3 | NR1H3 | 15418 |
| nuclear receptor subfamily 1 group H member 4 | NR1H4 | 15419 |
| nuclear receptor subfamily 1 group I member 2 | NR1I2 | 15420 |
| nuclear receptor subfamily 1 group I member 3 | NR1I3 | 15421 |
| nuclear receptor subfamily 2 group C member 1 | NR2C1 | 15422 |
| nuclear receptor subfamily 2 group C member 2 | NR2C2 | 15423 |
| nuclear receptor subfamily 2 group E member 1 | NR2E1 | 15424 |
| nuclear receptor subfamily 2 group E member 3 | NR2E3 | 15425 |
| nuclear receptor subfamily 2 group F member 1 | NR2F1 | 15426 |
| nuclear receptor subfamily 2 group F member 2 | NR2F2 | 15427 |
| nuclear receptor subfamily 2 group F member 6 | NR2F6 | 15428 |
| nuclear receptor subfamily 3 group C member 1 | NR3C1 | 15429 |
| nuclear receptor subfamily 3 group C member 2 | NR3C2 | 15430 |
| nuclear receptor subfamily 4 group A member 1 | NR4A1 | 15431 |
| nuclear receptor subfamily 4 group A member 2 | NR4A2 | 15432 |
| nuclear receptor subfamily 4 group A member 3 | NR4A3 | 15433 |
| nuclear receptor subfamily 5 group A member 1 | NR5A1 | 15434 |
| nuclear receptor subfamily 5 group A member 2 | NR5A2 | 15435 |
| nuclear receptor subfamily 6 group A member 1 | NR6A1 | 15436 |
| nuclear respiratory factor 1 | NRF1 | 15437-15438 |
| neural retina leucine zipper | NRL | 15439 |
| oligodendrocyte transcription factor 1 | OLIG1 | 15440 |
| oligodendrocyte lineage transcription factor 2 | OLIG2 | 15441 |
| oligodendrocyte transcription factor 3 | OLIG3 | 15442 |
| one cut homeobox 1 | ONECUT1 | 15443 |
| one cut homeobox 2 | ONECUT2 | 15444 |
| one cut homeobox 3 | ONECUT3 | 15445 |
| odd-skipped related transciption factor 1 | OSR1 | 15446 |
| odd-skipped related transciption factor 2 | OSR2 | 15447 |
| orthopedia homeobox | OTP | 15448 |
| orthodenticle homeobox 1 | OTX1 | 15449 |
| orthodenticle homeobox 2 | OTX2 | 15450 |
| ovo like zinc finger 1 | OVOL1 | 15451 |
| ovo like zinc finger 2 | OVOL2 | 15452 |
| ovo like zinc finger 3 | OVOL3 | 15453 |
| poly(ADP-ribose) polymerase 1 | PARP1 | 15454 |
| poly(ADP-ribose) polymerase family member 12 | PARP12 | 15455 |
| POZ/BTB and AT hook containing zinc finger 1 | PATZ1 | 15456 |
| PRKC, apoptosis, WT1, regulator | PAWR | 15457 |
| paired box 1 | PAX1 | 15458 |
| paired box 2 | PAX2 | 15459 |
| paired box 3 | PAX3 | 15460 |
| paired box 4 | PAX4 | 15461 |
| paired box 5 | PAX5 | 15462 |
| paired box 6 | PAX6 | 15463 |
| paired box 7 | PAX7 | 15464 |
| paired box 8 | PAX8 | 15465 |
| paired box 9 | PAX9 | 15466 |
| PAX3 and PAX7 binding protein 1 | PAXBP1 | 15467 |
| polybromo 1 | PBRM1 | 15468 |
| pre-B-cell leukemia homeobox 1 | PBX1 | 15469 |
| pre-B-cell leukemia homeobox 2 | PBX2 | 15470 |
| pre-B-cell leukemia homeobox 3 | PBX3 | 15471 |
| pre-B-cell leukemia homeobox 4 | PBX4 | 15472 |
| poly(rC) binding protein 1 | PCBP1 | 15473 |
| poly(rC) binding protein 2 | PCBP2 | 15474 |
| poly(rC) binding protein 3 | PCBP3 | 15475 |
| poly(rC) binding protein 4 | PCBP4 | 15476 |
| poly comb group ring finger 6 | PCGF6 | 15477 |
| pancreatic and duodenal homeobox 1 | PDX1 | 15478-15479 |
| paternally expressed 3 | PEG3 | 15480 |
| progesterone receptor | PGR | 15481 |
| prohibitin | PHB | 15482 |
| prohibitin 2 | PHB2 | 15483 |
| PHD finger protein 20 | PHF20 | 15484 |
| PHD finger protein 5A | PHF5A | 15485 |
| paired like homeobox 2a | PHOX2A | 15486 |
| paired like homeobox 2b | PHOX2B | 15487 |
| putative homeodomain transcription factor 1 | PHTF1 | 15488 |
| putative homeodomain transcription factor 2 | PHTF2 | 15489 |
| paired like homeodomain 1 | PITX1 | 15490 |
| paired like homeodomain 2 | PITX2 | 15491 |
| paired like homeodomain 3 | PITX3 | 15492 |
| PBX/knotted 1 homeobox 1 | PKNOX1 | 15493 |
| PBX/knotted 1 homeobox 2 | PKNOX2 | 15494 |
| PLAG1 zinc finger | PLAG1 | 15495 |
| PLAG1 like zinc finger 1 | PLAGL1 | 15496 |
| PLAG1 like zinc finger 2 | PLAGL2 | 15497 |
| pleckstrin | PLEK | 15498 |
| promyelocytic leukaemia zinc finger | PLZF | 15499 |
| pogo transposable element with ZNF domain | POGZ | 15500 |
| POU class 1 homeobox 1 | POU1F1 | 15501 |
| POU class 2 associating factor 1 | POU2AF1 | 15502 |
| POU class 2 homeobox 1 | POU2F1 | 15503 |
| POU class 2 homeobox 2 | POU2F2 | 15504 |
| POU class 2 homeobox 3 | POU2F3 | 15505 |
| POU class 3 homeobox 1 | POU3F1 | 15506 |
| POU class 3 homeobox 2 | POU3F2 | 15507 |
| POU class 3 homeobox 3 | POU3F3 | 15508 |
| POU class 3 homeobox 4 | POU3F4 | 15509 |
| POU class 4 homeobox 1 | POU4F1 | 15510 |
| POU class 4 homeobox 2 | POU4F2 | 15511 |
| POU class 4 homeobox 3 | POU4F3 | 15512 |
| POU class 5 homeobox 1 | POU5F1 | 15513 |
| POU class 5 homeobox 1B | POU5F1B | 15514 |
| POU domain class 5, transcription factor 2 | POU5F2 | 15515 |
| POU class 6 homeobox 1 | POU6F1 | 15516 |
| POU class 6 homeobox 2 | POU6F2 | 15517 |
| peroxisome proliferator activated receptor alpha | PPARA | 15518 |
| peroxisome proliferator activated receptor delta | PPARD | 15519 |
| peroxisome proliferator activated receptor gamma | PPARG | 15520 |
| protein phosphatase 1 regulatory subunit 13 like | PPP1R13L | 15521 |
| PR domain 1 | PRDM1 | 15522 |
| PR domain 10 | PRDM10 | 15523 |
| PR domain 11 | PRDM11 | 15524 |
| PR domain 12 | PRDM12 | 15525 |
| PR domain 13 | PRDM13 | 15526 |
| PR domain 14 | PRDM14 | 15527 |
| PR domain 15 | PRDM15 | 15528 |
| PR domain 16 | PRDM16 | 15529 |
| PR domain 2 | PRDM2 | 15530 |
| PR domain 4 | PRDM4 | 15531 |
| PR domain 5 | PRDM5 | 15532 |
| PR domain 6 | PRDM6 | 15533 |
| PR domain 7 | PRDM7 | 15534 |
| PR domain 8 | PRDM8 | 15535 |
| PR domain 9 | PRDM9 | 15536 |
| prolactin regulatory element binding | PREB | 15537 |
| PROP paired-like homeobox 1 | PROP1 | 15538 |
| prospero homeobox 1 | PROX1 | 15539 |
| prospero homeobox 2 | PROX2 | 15540 |
| paired related homeobox 1 | PRRX1 | 15541 |
| paired related homeobox 2 | PRRX2 | 15542 |
| paraspeckle component 1 | PSPC1 | 15543 |
| pancreas specific transcription factor, 1a | PTF1A | 15544 |
| purine-rich element binding protein A | PURA | 15545 |
| purine-rich element binding protein B | PURB | 15546 |
| purine-rich element binding protein G | PURG | 15547 |
| retinoic acid receptor alpha | RARA | 15548 |
| retinoic acid receptor beta | RARB | 15549 |
| retinoic acid receptor gamma | RARG | 15550 |
| retina and anterior neural fold homeobox | RAX | 15551-15552 |
| retina and anterior neural fold homeobox 2 | RAX2 | 15553 |
| RB associated KRAB zinc finger | RBAK | 15554 |
| RNA binding motif protein 22 | RBM22 | 15555 |
| recombination signal binding protein for | RBPJ | 15556 |
| immunoglobulin kappa J region | | |
| recombination signal binding protein for | RBPJL | 15557 |
| immunoglobulin kappa J region-like | | |
| ring finger and CCCH-type domains 1 | RC3H1 | 15558 |
| ring finger and CCCH-type domains 2 | RC3H2 | 15559 |
| REST corepressor 1 | RCOR1 | 15560 |
| REST corepressor 2 | RCOR2 | 15561 |
| REST corepressor 3 | RCOR3 | 15562 |
| v-rel avian reticuloendotheliosis viral oncogene | REL | 15563 |
| homolog | | |
| v-rel avian reticuloendotheliosis viral oncogene | RELA | 15564 |
| homolog A | | |
| v-rel avian reticuloendotheliosis viral oncogene | RELB | 15565 |
| homolog B | | |
| arginine-glutamic acid dipeptide (RE) repeats | RERE | 15566 |
| RE1-silencing transcription factor | REST | 15567 |
| regulatory factor X1 | RFX1 | 15568 |
| regulatory factor X2 | RFX2 | 15569 |
| regulatory factor X3 | RFX3 | 15570 |
| regulatory factor X4 | RFX4 | 15571 |
| regulatory factor X5 | RFX5 | 15572 |
| regulatory factor X6 | RFX6 | 15573 |
| regulatory factor X7 | RFX7 | 15574 |
| RFX family member 8, lacking RFX DNA binding | RFX8 | 15575 |
| domain | | |
| regulatory factor X associated ankyrin containing | RFXANK | 15576 |
| protein | | |
| regulatory factor X associated protein | RFXAP | 15577 |
| Rhox homeobox family member 1 | RHOXF1 | 15578 |
| Rhox homeobox family member 2 | RHOXF2 | 15579 |
| Rhox homeobox family member 2B | RHOXF2B | 15580 |
| rearranged L-myc fusion | RLF | 15581-15582 |
| RAR related orphan receptor A | RORA | 15583 |
| RAR related orphan receptor B | RORB | 15584 |
| RAR related orphan receptor C | RORC | 15585 |
| retinoic acid receptor-related orphan nuclear receptor | RORgT | 15586 |
| gamma | | |
| ras responsive element binding protein 1 | RREB1 | 15587 |
| runt related transcription factor 1 | RUNX1 | 15588 |
| runt related transcription factor 1; translocated to, 1 | RUNX1T1 | 15589 |
| (cyclin D related) | | |
| runt related transcription factor 2 | RUNX2 | 15590 |
| runt related transcription factor 3 | RUNX3 | 15591 |
| retinoid X receptor alpha | RXRA | 15592 |
| retinoid X receptor beta | RXRB | 15593 |
| retinoid X receptor gamma | RXRG | 15594 |
| spalt-like transcription factor 1 | SALL1 | 15595 |
| spalt-like transcription factor 2 | SALL2 | 15596 |
| spalt-like transcription factor 3 | SALL3 | 15597 |
| spalt-like transcription factor 4 | SALL4 | 15598 |
| SATB homeobox 1 | SATB1 | 15599 |
| SATB homeobox 2 | SATB2 | 15600 |
| S-phase cyclin A-associated protein in the ER | SCAPER | 15601 |
| scratch family zinc finger 1 | SCRT1 | 15602 |
| scratch family zinc finger 2 | SCRT2 | 15603 |
| scleraxis bHLH transcription factor | SCX | 15604 |
| SEBOX homeobox | SEBOX | 15605 |
| SET binding protein 1 | SETBP1 | 15606 |
| splicing factor proline/glutamine-rich | SFPQ | 15607 |
| short stature homeobox | SHOX | 15608 |
| short stature homeobox 2 | SHOX2 | 15609 |
| single-minded family bHLH transcription factor 1 | SIM1 | 15610 |
| single-minded family bHLH transcription factor 2 | SIM2 | 15611 |
| SIX homeobox 1 | SIX1 | 15612 |
| SIX homeobox 2 | SIX2 | 15613 |
| SIX homeobox 3 | SIX3 | 15614 |
| SIX homeobox 4 | SIX4 | 15615 |
| SIX homeobox 5 | SIX5 | 15616 |
| SIX homeobox 6 | SIX6 | 15617 |
| SKI proto-oncogene | SKI | 15618 |
| SKI-like proto-oncogene | SKIL | 15619 |
| SKI family transcriptional corepressor 1 | SKOR1 | 15620 |
| SKI family transcriptional corepressor 2 | SKOR2 | 15621 |
| solute carrier family 30 (zinc transporter), member 9 | SLC30A9 | 15622 |
| SMAD family member 1 | SMAD1 | 15623 |
| SMAD family member 2 | SMAD2 | 15624 |
| SMAD family member 3 | SMAD3 | 15625 |
| SMAD family member 4 | SMAD4 | 15626 |
| SMAD family member 5 | SMAD5 | 15627 |
| SMAD family member 6 | SMAD6 | 15628 |
| SMAD family member 7 | SMAD7 | 15629 |
| SMAD family member 9 | SMAD9 | 15630 |
| SWI/SNF related, matrix associated, actin dependent | SMARCA1 | 15631 |
| regulator of chromatin, subfamily a, member 1 | | |
| SWI/SNF related, matrix associated, actin dependent | SMARCA2 | 15632 |
| regulator of chromatin, subfamily a, member 2 | | |
| SWI/SNF related, matrix associated, actin dependent | SMARCA4 | 15633 |
| regulator of chromatin, subfamily a, member 4 | | |
| SWI/SNF related, matrix associated, actin dependent | SMARCA5 | 15634 |
| regulator of chromatin, subfamily a, member 5 | | |
| SWI/SNF-related, matrix-associated actin-dependent | SMARCAD1 | 15635 |
| regulator of chromatin, subfamily a, containing | | |
| DEAD/H box 1 | | |
| SWI/SNF related, matrix associated, actin dependent | SMARCAL1 | 15636 |
| regulator of chromatin, subfamily a-like 1 | | |
| SWI/SNF related, matrix associated, actin dependent | SMARCB1 | 15637 |
| regulator of chromatin, subfamily b, member 1 | | |
| SWI/SNF related, matrix associated, actin dependent | SMARCC1 | 15638 |
| regulator of chromatin, subfamily c, member 1 | | |
| SWI/SNF related, matrix associated, actin dependent | SMARCC2 | 15639 |
| regulator of chromatin, subfamily c, member 2 | | |
| SWI/SNF related, matrix associated, actin dependent | SMARCD1 | 15640 |
| regulator of chromatin, subfamily d, member 1 | | |
| SWI/SNF related, matrix associated, actin dependent | SMARCD2 | 15641 |
| regulator of chromatin, subfamily d, member 2 | | |
| SWI/SNF related, matrix associated, actin dependent | SMARCD3 | 15642 |
| regulator of chromatin, subfamily d, member 3 | | |
| SWI/SNF related, matrix associated, actin dependent | SMARCE1 | 15643 |
| regulator of chromatin, subfamily e, member 1 | | |
| snail family zinc finger 1 | SNAI1 | 15644 |
| snail family zinc finger 2 | SNAI2 | 15645 |
| snail family zinc finger 3 | SNAI3 | 15646 |
| small nuclear RNA activating complex polypeptide 4 | SNAPC4 | 15647 |
| spermatogenesis and oogenesis specific basic helix- | SOHLH1 | 15648 |
| loop-helix 1 | | |
| spermatogenesis and oogenesis specific basic helix- | SOHLH2 | 15649 |
| loop-helix 2 | | |
| SRY-box 1 | SOX1 | 15650 |
| SRY-box 10 | SOX10 | 15651 |
| SRY-box 11 | SOX11 | 15652 |
| SRY-box 12 | SOX12 | 15653 |
| SRY-box 13 | SOX13 | 15654 |
| SRY-box 14 | SOX14 | 15655 |
| SRY-box 15 | SOX15 | 15656 |
| SRY-box 17 | SOX17 | 15657 |
| SRY-box 18 | SOX18 | 15658 |
| SRY-box 2 | SOX2 | 15659 |
| SRY-box 21 | SOX21 | 15660 |
| SRY-box 3 | SOX3 | 15661 |
| SRY-box 30 | SOX30 | 15662 |
| SRY-box 4 | SOX4 | 15663 |
| SRY-box 5 | SOX5 | 15664 |
| SRY-box 6 | SOX6 | 15665 |
| SRY-box 7 | SOX7 | 15666 |
| SRY-box 8 | SOX8 | 15667 |
| SRY-box 9 | SOX9 | 15668 |
| Sp1 transcription factor | SP1 | 15669-15670 |
| SP100 nuclear antigen | SP100 | 15671 |
| SP110 nuclear body protein | SP110 | 15672 |
| SP140 nuclear body protein | SP140 | 15673 |
| SP140 nuclear body protein like | SP140L | 15674 |
| Sp2 transcription factor | SP2 | 15675 |
| Sp3 transcription factor | SP3 | 15676 |
| Sp4 transcription factor | SP4 | 15677 |
| Sp5 transcription factor | SP5 | 15678 |
| Sp6 transcription factor | SP6 | 15679 |
| Sp7 transcription factor | SP7 | 15680 |
| Sp8 transcription factor | SP8 | 15681 |
| Sp9 transcription factor | SP9 | 15682 |
| SAM pointed domain containing ETS transcription | SPDEF | 15683 |
| factor | | |
| Spi-1 proto-oncogene | SPI1 | 15684 |
| Spi-B transcription factor (Spi-1/PU.1 related) | SPIB | 15685 |
| Spi-C transcription factor (Spi-1/PU.1 related) | SPIC | 15686 |
| spermatogenic leucine zipper 1 | SPZ1 | 15687 |
| sterol regulatory element binding transcription factor 1 | SREBF1 | 15688 |
| sterol regulatory element binding transcription factor 2 | SREBF2 | 15689 |
| serum response factor | SRF | 15690 |
| sex determining region Y | SRY | 15691 |
| structure specific recognition protein 1 | SSRP1 | 15692 |
| suppression of tumorigenicity 18, zinc finger | ST18 | 15693 |
| signal transducer and activator of transcription 1 | STAT1 | 15694 |
| signal transducer and activator of transcription 2 | STAT2 | 15695 |
| signal transducer and activator of transcription 3 | STAT3 | 15696 |
| (acute-phase response factor) | | |
| signal transducer and activator of transcription 4 | STAT4 | 15697 |
| signal transducer and activator of transcription 5 | STAT5 | 15698 |
| signal transducer and activator of transcription 5A | STAT5A | 15699 |
| signal transducer and activator of transcription 5B | STAT5B | 15700 |
| signal transducer and activator of transcription 6, | STAT6 | 15701 |
| interleukin-4 induced | | |
| transcriptional adaptor 2A | TADA2A | 15702 |
| transcriptional adaptor 2B | TADA2B | 15703 |
| TATA-box binding protein associated factor 1 | TAF1 | 15704 |
| T-cell acute lymphocytic leukemia 1 | TAL1 | 15705 |
| T-cell acute lymphocytic leukemia 2 | TAL2 | 15706 |
| Tax1 (human T-cell leukemia virus type I) binding | TAX1BP1 | 15707 |
| protein 1 | | |
| Tax1 (human T-cell leukemia virus type I) binding | TAX1BP3 | 15708 |
| protein 3 | | |
| T-box transcription factor T-bet | Tbet | 15709 |
| TATA-box binding protein | TBP | 15710 |
| TATA-box binding protein like 1 | TBPL1 | 15711 |
| TATA-box binding protein like 2 | TBPL2 | 15712 |
| T-box, brain 1 | TBR1 | 15713 |
| T-box 1 | TBX1 | 15714 |
| T-box 10 | TBX10 | 15715 |
| T-box 15 | TBX15 | 15716 |
| T-box 18 | TBX18 | 15717 |
| T-box 19 | TBX19 | 15718 |
| T-box 2 | TBX2 | 15719 |
| T-box 20 | TBX20 | 15720 |
| T-box 21 | TBX21 | 15721 |
| T-box 22 | TBX22 | 15722 |
| T-box 3 | TBX3 | 15723 |
| T-box 4 | TBX4 | 15724 |
| T-box 5 | TBX5 | 15725 |
| T-box 6 | TBX6 | 15726 |
| transcription factor 12 | TCF12 | 15727 |
| transcription factor 15 (basic helix-loop-helix) | TCF15 | 15728 |
| transcription factor 19 | TCF19 | 15729 |
| transcription factor 20 (AR1) | TCF20 | 15730 |
| transcription factor 21 | TCF21 | 15731 |
| transcription factor 23 | TCF23 | 15732 |
| transcription factor 24 | TCF24 | 15733 |
| transcription factor 25 (basic helix-loop-helix) | TCF25 | 15734 |
| transcription factor 3 | TCF3 | 15735 |
| transcription factor 4 | TCF4 | 15736 |
| transcription factor 7 (T-cell specific, HMG-box, | TCF7 | 15737 |
| TCF1) | | |
| transcription factor 7 like 1 | TCF7L1 | 15738 |
| transcription factor 7 like 2 | TCF7L2 | 15739 |
| transcription factor-like 5 (basic helix-loop-helix) | TCFL5 | 15740 |
| TEA domain transcription factor 1 | TEAD1 | 15741 |
| TEA domain transcription factor 2 | TEAD2 | 15742 |
| TEA domain transcription factor 3 | TEAD3 | 15743 |
| TEA domain transcription factor 4 | TEAD4 | 15744 |
| thyrotrophic embryonic factor | TEF | 15745 |
| telomeric repeat binding factor (NIMA-interacting) 1 | TERF1 | 15746 |
| telomeric repeat binding factor 2 | TERF2 | 15747 |
| tet methylcytosine dioxygenase 1 | TET1 | 15748 |
| tet methylcytosine dioxygenase 2 | TET2 | 15749 |
| tet methylcytosine dioxygenase 3 | TET3 | 15750 |
| transcription factor A, mitochondrial | TFAM | 15751 |
| transcription factor AP-2 alpha (activating enhancer | TFAP2A | 15752 |
| binding protein 2 alpha) | | |
| transcription factor AP-2 beta (activating enhancer | TFAP2B | 15753 |
| binding protein 2 beta) | | |
| transcription factor AP-2 gamma (activating enhancer | TFAP2C | 15754 |
| binding protein 2 gamma) | | |
| transcription factor AP-2 delta (activating enhancer | TFAP2D | 15755 |
| binding protein 2 delta) | | |
| transcription factor AP-2 epsilon (activating enhancer | TFAP2E | 15756 |
| binding protein 2 epsilon) | | |
| transcription factor AP-4 (activating enhancer binding | TFAP4 | 15757 |
| protein 4) | | |
| transcription factor B1, mitochondrial | TFB1M | 15758 |
| transcription factor B2, mitochondrial | TFB2M | 15759 |
| transcription factor CP2 | TFCP2 | 15760 |
| transcription factor CP2-like 1 | TFCP2L1 | 15761 |
| transcription factor Dp-1 | TFDP1 | 15762 |
| transcription factor Dp-2 (E2F dimerization partner 2) | TFDP2 | 15763 |
| transcription factor Dp family member 3 | TFDP3 | 15764 |
| transcription factor binding to IGHM enhancer 3 | TFE3 | 15765 |
| transcription factor EB | TFEB | 15766 |
| transcription factor EC | TFEC | 15767 |
| TGFB induced factor homeobox 1 | TGIF1 | 15768 |
| TGFB induced factor homeobox 2 | TGIF2 | 15769 |
| TGFB induced factor homeobox 2 like, X-linked | TGIF2LX | 15770 |
| TGFB induced factor homeobox 2 like, Y-linked | TGIF2LY | 15771 |
| THAP domain containing, apoptosis associated protein | THAP1 | 15772 |
| 1 | | |
| THAP domain containing 10 | THAP10 | 15773 |
| THAP domain containing 11 | THAP11 | 15774 |
| THAP domain containing 12 | THAP12 | 15775 |
| THAP domain containing, apoptosis associated protein | THAP2 | 15776 |
| 2 | | |
| THAP domain containing, apoptosis associated protein | THAP3 | 15777 |
| 3 | | |
| THAP domain containing 4 | THAP4 | 15778 |
| THAP domain containing 5 | THAP5 | 15779 |
| THAP domain containing 6 | THAP6 | 15780 |
| THAP domain containing 7 | THAP7 | 15781 |
| THAP domain containing 8 | THAP8 | 15782 |
| THAP domain containing 9 | THAP9 | 15783 |
| Th inducing POZ-Kruppel Factor | ThPOK | 15784 |
| thyroid hormone receptor, alpha | THRA | 15785 |
| thyroid hormone receptor, beta | THRB | 15786 |
| T-cell leukemia homeobox 1 | TLX1 | 15787 |
| T-cell leukemia homeobox 2 | TLX2 | 15788 |
| T-cell leukemia homeobox 3 | TLX3 | 15789 |
| target of EGR1, member 1 (nuclear) | TOE1 | 15790 |
| tonsoku-like, DNA repair protein | TONSL | 15791 |
| topoisomerase I binding, arginine/serine-rich, E3 | TOPORS | 15792 |
| ubiquitin protein ligase | | |
| thymocyte selection associated high mobility group | TOX | 15793 |
| box | | |
| TOX high mobility group box family member 2 | TOX2 | 15794 |
| TOX high mobility group box family member 3 | TOX3 | 15795 |
| TOX high mobility group box family member 4 | TOX4 | 15796 |
| tumor protein p53 | TP53 | 15797 |
| tumor protein p63 | TP63 | 15798 |
| tumor protein p73 | TP73 | 15799 |
| tetra-peptide repeat homeobox 1 | TPRX1 | 15800 |
| tetra-peptide repeat homeobox-like | TPRXL | 15801 |
| transcriptional regulating factor 1 | TRERF1 | 15802 |
| trichorhinophalangeal syndrome I | TRPS1 | 15803 |
| TSC22 domain family member 1 | TSC22D1 | 15804 |
| TSC22 domain family member 2 | TSC22D2 | 15805 |
| TSC22 domain family member 3 | TSC22D3 | 15806 |
| TSC22 domain family member 4 | TSC22D4 | 15807 |
| teashirt zinc finger homeobox 1 | TSHZ1 | 15808 |
| teashirt zinc finger homeobox 2 | TSHZ2 | 15809 |
| teashirt zinc finger homeobox 3 | TSHZ3 | 15810 |
| transcription termination factor, RNA polymerase I | TTF1 | 15811-15812 |
| transcription termination factor, RNA polymerase II | TTF2 | 15813-15814 |
| tubby bipartite transcription factor | TUB | 15815 |
| twist family bHLH transcription factor 1 | TWIST1 | 15816 |
| twist family bHLH transcription factor 2 | TWIST2 | 15817 |
| upstream binding protein 1 (LBP-1a) | UBP1 | 15818 |
| upstream binding transcription factor, RNA | UBTF | 15819 |
| polymerase I | | |
| upstream binding transcription factor, RNA | UBTFL1 | 15820 |
| polymerase I-like 1 | | |
| upstream binding transcription factor, RNA | UBTFL6 | 15821 |
| polymerase I-like 6 (pseudogene) | | |
| UNC homeobox | UNCX | 15822 |
| unkempt family zinc finger | UNK | 15823 |
| unkempt family like zinc finger | UNKL | 15824 |
| upstream transcription factor 1 | USF1 | 15825 |
| upstream transcription factor 2, c-fos interacting | USF2 | 15826 |
| upstream transcription factor family member 3 | USF3 | 15827 |
| undifferentiated embryonic cell transcription factor 1 | UTF1 | 15828 |
| ventral anterior homeobox 1 | VAX1 | 15829 |
| ventral anterior homeobox 2 | VAX2 | 15830 |
| vitamin D (1,25-dihydroxyvitamin D3) receptor | VDR | 15831 |
| VENT homeobox | VENTX | 15832 |
| vascular endothelial zinc finger 1 | VEZF1 | 15833 |
| visual system homeobox 1 | VSX1 | 15834 |
| visual system homeobox 2 | VSX2 | 15835 |
| WD repeat and HMG-box DNA binding protein 1 | WDHD1 | 15836 |
| Wolf-Hirschhorn syndrome candidate 1 | WHSC1 | 15837 |
| widely interspaced zinc finger motifs | WIZ | 15838 |
| Wilms tumor 1 | WT1 | 15839 |
| X-box binding protein 1 | XBP1 | 15840 |
| Y-box binding protein 1 | YBX1 | 15841 |
| Y-box binding protein 2 | YBX2 | 15842 |
| Y-box binding protein 3 | YBX3 | 15843 |
| YEATS domain containing 2 | YEATS2 | 15844 |
| YEATS domain containing 4 | YEATS4 | 15845 |
| YY1 transcription factor | YY1 | 15846 |
| YY2 transcription factor | YY2 | 15847 |
| zinc finger BED-type containing 1 | ZBED1 | 15848 |
| zinc finger BED-type containing 2 | ZBED2 | 15849 |
| zinc finger BED-type containing 3 | ZBED3 | 15850 |
| zinc finger BED-type containing 4 | ZBED4 | 15851 |
| zinc finger BED-type containing 5 | ZBED5 | 15852 |
| zinc finger, BED-type containing 6 | ZBED6 | 15853 |
| Z-DNA binding protein 1 | ZBP1 | 15854-15855 |
| zinc finger and BTB domain containing 1 | ZBTB1 | 15856 |
| zinc finger and BTB domain containing 10 | ZBTB10 | 15857 |
| zinc finger and BTB domain containing 11 | ZBTB11 | 15858 |
| zinc finger and BTB domain containing 12 | ZBTB12 | 15859 |
| zinc finger and BTB domain containing 14 | ZBTB14 | 15860 |
| zinc finger and BTB domain containing 16 | ZBTB16 | 15861 |
| zinc finger and BTB domain containing 17 | ZBTB17 | 15862 |
| zinc finger and BTB domain containing 18 | ZBTB18 | 15863 |
| zinc finger and BTB domain containing 2 | ZBTB2 | 15864 |
| zinc finger and BTB domain containing 20 | ZBTB20 | 15865 |
| zinc finger and BTB domain containing 21 | ZBTB21 | 15866 |
| zinc finger and BTB domain containing 22 | ZBTB22 | 15867 |
| zinc finger and BTB domain containing 24 | ZBTB24 | 15868 |
| zinc finger and BTB domain containing 25 | ZBTB25 | 15869 |
| zinc finger and BTB domain containing 26 | ZBTB26 | 15870 |
| zinc finger and BTB domain containing 3 | ZBTB3 | 15871 |
| zinc finger and BTB domain containing 32 | ZBTB32 | 15872 |
| zinc finger and BTB domain containing 33 | ZBTB33 | 15873 |
| zinc finger and BTB domain containing 34 | ZBTB34 | 15874 |
| zinc finger and BTB domain containing 37 | ZBTB37 | 15875 |
| zinc finger and BTB domain containing 38 | ZBTB38 | 15876 |
| zinc finger and BTB domain containing 39 | ZBTB39 | 15877 |
| zinc finger and BTB domain containing 4 | ZBTB4 | 15878 |
| zinc finger and BTB domain containing 40 | ZBTB40 | 15879 |
| zinc finger and BTB domain containing 41 | ZBTB41 | 15880 |
| zinc finger and BTB domain containing 42 | ZBTB42 | 15881 |
| zinc finger and BTB domain containing 43 | ZBTB43 | 15882 |
| zinc finger and BTB domain containing 44 | ZBTB44 | 15883 |
| zinc finger and BTB domain containing 45 | ZBTB45 | 15884 |
| zinc finger and BTB domain containing 46 | ZBTB46 | 15885 |
| zinc finger and BTB domain containing 47 | ZBTB47 | 15886 |
| zinc finger and BTB domain containing 48 | ZBTB48 | 15887 |
| zinc finger and BTB domain containing 49 | ZBTB49 | 15888 |
| zinc finger and BTB domain containing 5 | ZBTB5 | 15889 |
| zinc finger and BTB domain containing 6 | ZBTB6 | 15890 |
| zinc finger and BTB domain containing 7A | ZBTB7A | 15891 |
| zinc finger and BTB domain containing 7B | ZBTB7B | 15892 |
| zinc finger and BTB domain containing 7C | ZBTB7C | 15893 |
| zinc finger and BTB domain containing 8A | ZBTB8A | 15894 |
| zinc finger and BTB domain containing 9 | ZBTB9 | 15895 |
| zinc finger CCCH-type containing 10 | ZC3H10 | 15896 |
| zinc finger CCCH-type containing 11A | ZC3H11A | 15897 |
| zinc finger CCCH-type containing 12A | ZC3H12A | 15898 |
| zinc finger CCCH-type containing 12B | ZC3H12B | 15899 |
| zinc finger CCCH-type containing 13 | ZC3H13 | 15900 |
| zinc finger CCCH-type containing 14 | ZC3H14 | 15901 |
| zinc finger CCCH-type containing 15 | ZC3H15 | 15902 |
| zinc finger CCCH-type containing 18 | ZC3H18 | 15903 |
| zinc finger CCCH-type containing 3 | ZC3H3 | 15904 |
| zinc finger CCCH-type containing 4 | ZC3H4 | 15905 |
| zinc finger CCCH-type containing 6 | ZC3H6 | 15906 |
| zinc finger CCCH-type containing 7A | ZC3H7A | 15907 |
| zinc finger CCCH-type containing 7B | ZC3H7B | 15908 |
| zinc finger CCCH-type containing 8 | ZC3H8 | 15909 |
| zinc finger CCHC-type containing 11 | ZCCHC11 | 15910 |
| zinc finger CCHC-type containing 6 | ZCCHC6 | 15911 |
| zinc finger E-box binding homeobox 1 | ZEB1 | 15912 |
| zinc finger E-box binding homeobox 2 | ZEB2 | 15913 |
| zinc finger and AT-hook domain containing | ZFAT | 15914 |
| zinc finger homeobox 2 | ZFHX2 | 15915 |
| zinc finger homeobox 3 | ZFHX3 | 15916 |
| zinc finger homeobox 4 | ZFHX4 | 15917 |
| ZFP1 zinc finger protein | ZFP1 | 15918 |
| ZFP14 zinc finger protein | ZFP14 | 15919 |
| ZFP2 zinc finger protein | ZFP2 | 15920 |
| ZFP28 zinc finger protein | ZFP28 | 15921 |
| ZFP3 zinc finger protein | ZFP3 | 15922 |
| ZFP30 zinc finger protein | ZFP30 | 15923 |
| ZFP36 ring finger protein-like 1 | ZFP36L1 | 15924 |
| ZFP36 ring finger protein-like 2 | ZFP36L2 | 15925 |
| ZFP37 zinc finger protein | ZFP37 | 15926 |
| ZFP41 zinc finger protein | ZFP41 | 15927 |
| ZFP42 zinc finger protein | ZFP42 | 15928 |
| ZFP57 zinc finger protein | ZFP57 | 15929 |
| ZFP62 zinc finger protein | ZFP62 | 15930 |
| ZFP64 zinc finger protein | ZFP64 | 15931 |
| ZFP69 zinc finger protein | ZFP69 | 15932-15933 |
| ZFP69 zinc finger protein B | ZFP69B | 15934 |
| ZFP82 zinc finger protein | ZFP82 | 15935 |
| ZFP90 zinc finger protein | ZFP90 | 15936 |
| ZFP91 zinc finger protein | ZFP91 | 15937 |
| ZFP92 zinc finger protein | ZFP92 | 15938 |
| zinc finger protein, FOG family member 1 | ZFPM1 | 15939 |
| zinc finger protein, FOG family member 2 | ZFPM2 | 15940 |
| zinc finger protein, X-linked | ZFX | 15941 |
| zinc finger protein, Y-linked | ZFY | 15942 |
| zinc finger, FYVE domain containing 26 | ZFYVE26 | 15943 |
| zinc finger, GATA-like protein 1 | ZGLP1 | 15944 |
| zinc finger CCCH-type and G-patch domain | ZGPAT | 15945 |
| containing | | |
| zinc fingers and homeoboxes 1 | ZHX1 | 15946 |
| zinc fingers and homeoboxes 2 | ZHX2 | 15947 |
| zinc fingers and homeoboxes 3 | ZHX3 | 15948 |
| Zic family member 1 | ZIC1 | 15949 |
| Zic family member 2 | ZIC2 | 15950 |
| Zic family member 3 | ZIC3 | 15951 |
| Zic family member 4 | ZIC4 | 15952 |
| Zic family member 5 | ZIC5 | 15953 |
| zinc finger protein interacting with K protein 1 | ZIK1 | 15954 |
| zinc finger, imprinted 2 | ZIM2 | 15955 |
| zinc finger, imprinted 3 | ZIM3 | 15956 |
| zinc finger with KRAB and SCAN domains 1 | ZKSCAN1 | 15957 |
| zinc finger with KRAB and SCAN domains 2 | ZKSCAN2 | 15958 |
| zinc finger with KRAB and SCAN domains 3 | ZKSCAN3 | 15959 |
| zinc finger with KRAB and SCAN domains 4 | ZKSCAN4 | 15960 |
| zinc finger with KRAB and SCAN domains 5 | ZKSCAN5 | 15961 |
| zinc finger with KRAB and SCAN domains 7 | ZKSCAN7 | 15962 |
| zinc finger with KRAB and SCAN domains 8 | ZKSCAN8 | 15963 |
| zinc finger matrin-type 1 | ZMAT1 | 15964 |
| zinc finger matrin-type 2 | ZMAT2 | 15965 |
| zinc finger matrin-type 3 | ZMAT3 | 15966 |
| zinc finger matrin-type 4 | ZMAT4 | 15967 |
| zinc finger matrin-type 5 | ZMAT5 | 15968 |
| zinc finger protein 10 | ZNF10 | 15969 |
| zinc finger protein 100 | ZNF100 | 15970 |
| zinc finger protein 101 | ZNF101 | 15971 |
| zinc finger protein 106 | ZNF106 | 15972 |
| zinc finger protein 107 | ZNF107 | 15973 |
| zinc finger protein 112 | ZNF112 | 15974 |
| zinc finger protein 114 | ZNF114 | 15975 |
| zinc finger protein 117 | ZNF117 | 15976 |
| zinc finger protein 12 | ZNF12 | 15977 |
| zinc finger protein 121 | ZNF121 | 15978 |
| zinc finger protein 124 | ZNF124 | 15979 |
| zinc finger protein 131 | ZNF131 | 15980 |
| zinc finger protein 132 | ZNF132 | 15981 |
| zinc finger protein 133 | ZNF133 | 15982 |
| zinc finger protein 134 | ZNF134 | 15983 |
| zinc finger protein 135 | ZNF135 | 15984 |
| zinc finger protein 136 | ZNF136 | 15985 |
| zinc finger protein 137, pseudogene | ZNF137P | 15986 |
| zinc finger protein 138 | ZNF138 | 15987 |
| zinc finger protein 14 | ZNF14 | 15988 |
| zinc finger protein 140 | ZNF140 | 15989 |
| zinc finger protein 141 | ZNF141 | 15990 |
| zinc finger protein 142 | ZNF142 | 15991 |
| zinc finger protein 143 | ZNF143 | 15992 |
| zinc finger protein 146 | ZNF146 | 15993 |
| zinc finger protein 148 | ZNF148 | 15994 |
| zinc finger protein 154 | ZNF154 | 15995 |
| zinc finger protein 155 | ZNF155 | 15996 |
| zinc finger protein 157 | ZNF157 | 15997 |
| zinc finger protein 16 | ZNF16 | 15998 |
| zinc finger protein 160 | ZNF160 | 15999 |
| zinc finger protein 165 | ZNF165 | 16000 |
| zinc finger protein 169 | ZNF169 | 16001 |
| zinc finger protein 17 | ZNF17 | 16002 |
| zinc finger protein 174 | ZNF174 | 16003 |
| zinc finger protein 175 | ZNF175 | 16004 |
| zinc finger protein 18 | ZNF18 | 16005 |
| zinc finger protein 180 | ZNF180 | 16006 |
| zinc finger protein 181 | ZNF181 | 16007 |
| zinc finger protein 182 | ZNF182 | 16008 |
| zinc finger protein 184 | ZNF184 | 16009 |
| zinc finger protein 189 | ZNF189 | 16010 |
| zinc finger protein 19 | ZNF19 | 16011 |
| zinc finger protein 195 | ZNF195 | 16012 |
| zinc finger protein 197 | ZNF197 | 16013 |
| zinc finger protein 2 | ZNF2 | 16014 |
| zinc finger protein 20 | ZNF20 | 16015-16016 |
| zinc finger protein 200 | ZNF200 | 16017 |
| zinc finger protein 202 | ZNF202 | 16018 |
| zinc finger protein 205 | ZNF205 | 16019 |
| zinc finger protein 207 | ZNF207 | 16020 |
| zinc finger protein 208 | ZNF208 | 16021 |
| zinc finger protein 211 | ZNF211 | 16022 |
| zinc finger protein 212 | ZNF212 | 16023 |
| zinc finger protein 213 | ZNF213 | 16024 |
| zinc finger protein 214 | ZNF214 | 16025 |
| zinc finger protein 215 | ZNF215 | 16026 |
| zinc finger protein 217 | ZNF217 | 16027 |
| zinc finger protein 219 | ZNF219 | 16028 |
| zinc finger protein 22 | ZNF22 | 16029 |
| zinc finger protein 221 | ZNF221 | 16030 |
| zinc finger protein 223 | ZNF223 | 16031 |
| zinc finger protein 224 | ZNF224 | 16032 |
| zinc finger protein 225 | ZNF225 | 16033-16034 |
| zinc finger protein 226 | ZNF226 | 16035 |
| zinc finger protein 227 | ZNF227 | 16036 |
| zinc finger protein 229 | ZNF229 | 16037 |
| zinc finger protein 23 | ZNF23 | 16038 |
| zinc finger protein 230 | ZNF230 | 16039-16040 |
| zinc finger protein 232 | ZNF232 | 16041 |
| zinc finger protein 233 | ZNF233 | 16042-16043 |
| zinc finger protein 234 | ZNF234 | 16044 |
| zinc finger protein 235 | ZNF235 | 16045 |
| zinc finger protein 236 | ZNF236 | 16046 |
| zinc finger protein 239 | ZNF239 | 16047 |
| zinc finger protein 24 | ZNF24 | 16048 |
| zinc finger protein 248 | ZNF248 | 16049 |
| zinc finger protein 25 | ZNF25 | 16050 |
| zinc finger protein 250 | ZNF250 | 16051 |
| zinc finger protein 251 | ZNF251 | 16052 |
| zinc finger protein 252, pseudogene | ZNF252P | 16053 |
| zinc finger protein 253 | ZNF253 | 16054 |
| zinc finger protein 254 | ZNF254 | 16055 |
| zinc finger protein 256 | ZNF256 | 16056 |
| zinc finger protein 257 | ZNF257 | 16057 |
| zinc finger protein 26 | ZNF26 | 16058 |
| zinc finger protein 260 | ZNF260 | 16059 |
| zinc finger protein 263 | ZNF263 | 16060 |
| zinc finger protein 264 | ZNF264 | 16061 |
| zinc finger protein 266 | ZNF266 | 16062 |
| zinc finger protein 267 | ZNF267 | 16063 |
| zinc finger protein 268 | ZNF268 | 16064 |
| zinc finger protein 273 | ZNF273 | 16065 |
| zinc finger protein 274 | ZNF274 | 16066 |
| zinc finger protein 275 | ZNF275 | 16067 |
| zinc finger protein 276 | ZNF276 | 16068 |
| zinc finger protein 277 | ZNF277 | 16069 |
| zinc finger protein 28 | ZNF28 | 16070 |
| zinc finger protein 280A | ZNF280A | 16071 |
| zinc finger protein 280B | ZNF280B | 16072 |
| zinc finger protein 280C | ZNF280C | 16073 |
| zinc finger protein 280D | ZNF280D | 16074 |
| zinc finger protein 281 | ZNF281 | 16075 |
| zinc finger protein 282 | ZNF282 | 16076 |
| zinc finger protein 283 | ZNF283 | 16077 |
| zinc finger protein 284 | ZNF284 | 16078 |
| zinc finger protein 285 | ZNF285 | 16079 |
| zinc finger protein 286A | ZNF286A | 16080 |
| zinc finger protein 286B | ZNF286B | 16081 |
| zinc finger protein 287 | ZNF287 | 16082 |
| zinc finger protein 292 | ZNF292 | 16083 |
| zinc finger protein 296 | ZNF296 | 16084 |
| zinc finger protein 3 | ZNF3 | 16085 |
| zinc finger protein 30 | ZNF30 | 16086 |
| zinc finger protein 300 | ZNF300 | 16087 |
| zinc finger protein 302 | ZNF302 | 16088 |
| zinc finger protein 304 | ZNF304 | 16089 |
| zinc finger protein 311 | ZNF311 | 16090 |
| zinc finger protein 316 | ZNF316 | 16091 |
| zinc finger protein 317 | ZNF317 | 16092 |
| zinc finger protein 318 | ZNF318 | 16093 |
| zinc finger protein 319 | ZNF319 | 16094 |
| zinc finger protein 32 | ZNF32 | 16095 |
| zinc finger protein 320 | ZNF320 | 16096 |
| zinc finger protein 322 | ZNF322 | 16097 |
| zinc finger protein 324 | ZNF324 | 16098 |
| zinc finger protein 324B | ZNF324B | 16099 |
| zinc finger protein 326 | ZNF326 | 16100 |
| zinc finger protein 329 | ZNF329 | 16101 |
| zinc finger protein 331 | ZNF331 | 16102 |
| zinc finger protein 333 | ZNF333 | 16103 |
| zinc finger protein 334 | ZNF334 | 16104 |
| zinc finger protein 335 | ZNF335 | 16105 |
| zinc finger protein 337 | ZNF337 | 16106 |
| zinc finger protein 33A | ZNF33A | 16107 |
| zinc finger protein 33B | ZNF33B | 16108 |
| zinc finger protein 34 | ZNF34 | 16109 |
| zinc finger protein 341 | ZNF341 | 16110 |
| zinc finger protein 343 | ZNF343 | 16111 |
| zinc finger protein 345 | ZNF345 | 16112 |
| zinc finger protein 346 | ZNF346 | 16113 |
| zinc finger protein 347 | ZNF347 | 16114 |
| zinc finger protein 35 | ZNF35 | 16115 |
| zinc finger protein 350 | ZNF350 | 16116 |
| zinc finger protein 354A | ZNF354A | 16117 |
| zinc finger protein 354B | ZNF354B | 16118 |
| zinc finger protein 354C | ZNF354C | 16119 |
| zinc finger protein 355, pseudogene | ZNF355P | 16120 |
| zinc finger protein 358 | ZNF358 | 16121 |
| zinc finger protein 362 | ZNF362 | 16122 |
| zinc finger protein 365 | ZNF365 | 16123-16124 |
| zinc finger protein 366 | ZNF366 | 16125 |
| zinc finger protein 367 | ZNF367 | 16126 |
| zinc finger protein 37A | ZNF37A | 16127 |
| zinc finger protein 382 | ZNF382 | 16128 |
| zinc finger protein 383 | ZNF383 | 16129 |
| zinc finger protein 384 | ZNF384 | 16130 |
| zinc finger protein 385A | ZNF385A | 16131 |
| zinc finger protein 385B | ZNF385B | 16132 |
| zinc finger protein 385C | ZNF385C | 16133 |
| zinc finger protein 385D | ZNF385D | 16134 |
| zinc finger protein 391 | ZNF391 | 16135 |
| zinc finger protein 394 | ZNF394 | 16136 |
| zinc finger protein 395 | ZNF395 | 16137 |
| zinc finger protein 396 | ZNF396 | 16138 |
| zinc finger protein 397 | ZNF397 | 16139 |
| zinc finger protein 398 | ZNF398 | 16140 |
| zinc finger protein 404 | ZNF404 | 16141 |
| zinc finger protein 407 | ZNF407 | 16142 |
| zinc finger protein 408 | ZNF408 | 16143 |
| zinc finger protein 41 | ZNF41 | 16144 |
| zinc finger protein 410 | ZNF410 | 16145 |
| zinc finger protein 414 | ZNF414 | 16146 |
| zinc finger protein 415 | ZNF415 | 16147 |
| zinc finger protein 416 | ZNF416 | 16148 |
| zinc finger protein 417 | ZNF417 | 16149 |
| zinc finger protein 418 | ZNF418 | 16150 |
| zinc finger protein 419 | ZNF419 | 16151 |
| zinc finger protein 420 | ZNF420 | 16152 |
| zinc finger protein 423 | ZNF423 | 16153 |
| zinc finger protein 425 | ZNF425 | 16154 |
| zinc finger protein 426 | ZNF426 | 16155 |
| zinc finger protein 428 | ZNF428 | 16156 |
| zinc finger protein 429 | ZNF429 | 16157 |
| zinc finger protein 43 | ZNF43 | 16158 |
| zinc finger protein 430 | ZNF430 | 16159 |
| zinc finger protein 431 | ZNF431 | 16160 |
| zinc finger protein 432 | ZNF432 | 16161 |
| zinc finger protein 433 | ZNF433 | 16162 |
| zinc finger protein 436 | ZNF436 | 16163 |
| zinc finger protein 438 | ZNF438 | 16164 |
| zinc finger protein 439 | ZNF439 | 16165 |
| zinc finger protein 44 | ZNF44 | 16166 |
| zinc finger protein 440 | ZNF440 | 16167 |
| zinc finger protein 441 | ZNF441 | 16168 |
| zinc finger protein 442 | ZNF442 | 16169 |
| zinc finger protein 443 | ZNF443 | 16170 |
| zinc finger protein 444 | ZNF444 | 16171 |
| zinc finger protein 445 | ZNF445 | 16172 |
| zinc finger protein 446 | ZNF446 | 16173 |
| zinc finger protein 449 | ZNF449 | 16174 |
| zinc finger protein 45 | ZNF45 | 16175 |
| zinc finger protein 451 | ZNF451 | 16176 |
| zinc finger protein 454 | ZNF454 | 16177 |
| zinc finger protein 460 | ZNF460 | 16178 |
| zinc finger protein 461 | ZNF461 | 16179 |
| zinc finger protein 462 | ZNF462 | 16180 |
| zinc finger protein 467 | ZNF467 | 16181 |
| zinc finger protein 468 | ZNF468 | 16182 |
| zinc finger protein 469 | ZNF469 | 16183 |
| zinc finger protein 470 | ZNF470 | 16184 |
| zinc finger protein 471 | ZNF471 | 16185 |
| zinc finger protein 473 | ZNF473 | 16186 |
| zinc finger protein 474 | ZNF474 | 16187-16188 |
| zinc finger protein 479 | ZNF479 | 16189 |
| zinc finger protein 48 | ZNF48 | 16190 |
| zinc finger protein 480 | ZNF480 | 16191 |
| zinc finger protein 483 | ZNF483 | 16192 |
| zinc finger protein 484 | ZNF484 | 16193 |
| zinc finger protein 485 | ZNF485 | 16194 |
| zinc finger protein 486 | ZNF486 | 16195 |
| zinc finger protein 487 | ZNF487 | 16196 |
| zinc finger protein 488 | ZNF488 | 16197 |
| zinc finger protein 490 | ZNF490 | 16198 |
| zinc finger protein 491 | ZNF491 | 16199 |
| zinc finger protein 492 | ZNF492 | 16200 |
| zinc finger protein 493 | ZNF493 | 16201 |
| zinc finger protein 496 | ZNF496 | 16202 |
| zinc finger protein 497 | ZNF497 | 16203 |
| zinc finger protein 500 | ZNF500 | 16204 |
| zinc finger protein 501 | ZNF501 | 16205 |
| zinc finger protein 502 | ZNF502 | 16206 |
| zinc finger protein 503 | ZNF503 | 16207 |
| zinc finger protein 506 | ZNF506 | 16208 |
| zinc finger protein 507 | ZNF507 | 16209 |
| zinc finger protein 510 | ZNF510 | 16210 |
| zinc finger protein 511 | ZNF511 | 16211 |
| zinc finger protein 512 | ZNF512 | 16212 |
| zinc finger protein 512B | ZNF512B | 16213 |
| zinc finger protein 513 | ZNF513 | 16214 |
| zinc finger protein 514 | ZNF514 | 16215 |
| zinc finger protein 516 | ZNF516 | 16216 |
| zinc finger protein 517 | ZNF517 | 16217 |
| zinc finger protein 518A | ZNF518A | 16218 |
| zinc finger protein 518B | ZNF518B | 16219 |
| zinc finger protein 519 | ZNF519 | 16220 |
| zinc finger protein 521 | ZNF521 | 16221 |
| zinc finger protein 524 | ZNF524 | 16222 |
| zinc finger protein 526 | ZNF526 | 16223 |
| zinc finger protein 527 | ZNF527 | 16224 |
| zinc finger protein 528 | ZNF528 | 16225 |
| zinc finger protein 529 | ZNF529 | 16226 |
| zinc finger protein 530 | ZNF530 | 16227 |
| zinc finger protein 532 | ZNF532 | 16228 |
| zinc finger protein 534 | ZNF534 | 16229 |
| zinc finger protein 536 | ZNF536 | 16230 |
| zinc finger protein 540 | ZNF540 | 16231 |
| zinc finger protein 541 | ZNF541 | 16232 |
| zinc finger protein 542, pseudogene | ZNF542P | 16233 |
| zinc finger protein 543 | ZNF543 | 16234 |
| zinc finger protein 544 | ZNF544 | 16235 |
| zinc finger protein 546 | ZNF546 | 16236 |
| zinc finger protein 547 | ZNF547 | 16237 |
| zinc finger protein 548 | ZNF548 | 16238 |
| zinc finger protein 549 | ZNF549 | 16239 |
| zinc finger protein 550 | ZNF550 | 16240 |
| zinc finger protein 552 | ZNF552 | 16241 |
| zinc finger protein 554 | ZNF554 | 16242 |
| zinc finger protein 555 | ZNF555 | 16243 |
| zinc finger protein 556 | ZNF556 | 16244 |
| zinc finger protein 557 | ZNF557 | 16245 |
| zinc finger protein 558 | ZNF558 | 16246 |
| zinc finger protein 559 | ZNF559 | 16247 |
| zinc finger protein 56 | ZNF56 | 16248 |
| zinc finger protein 560 | ZNF560 | 16249 |
| zinc finger protein 561 | ZNF561 | 16250 |
| zinc finger protein 562 | ZNF562 | 16251 |
| zinc finger protein 563 | ZNF563 | 16252 |
| zinc finger protein 564 | ZNF564 | 16253 |
| zinc finger protein 565 | ZNF565 | 16254 |
| zinc finger protein 566 | ZNF566 | 16255 |
| zinc finger protein 567 | ZNF567 | 16256 |
| zinc finger protein 568 | ZNF568 | 16257 |
| zinc finger protein 569 | ZNF569 | 16258 |
| zinc finger protein 57 | ZNF57 | 16259 |
| zinc finger protein 570 | ZNF570 | 16260 |
| zinc finger protein 571 | ZNF571 | 16261 |
| zinc finger protein 572 | ZNF572 | 16262 |
| zinc finger protein 573 | ZNF573 | 16263 |
| zinc finger protein 574 | ZNF574 | 16264 |
| zinc finger protein 575 | ZNF575 | 16265 |
| zinc finger protein 576 | ZNF576 | 16266-16267 |
| zinc finger protein 577 | ZNF577 | 16268 |
| zinc finger protein 578 | ZNF578 | 16269 |
| zinc finger protein 579 | ZNF579 | 16270 |
| zinc finger protein 580 | ZNF580 | 16271 |
| zinc finger protein 581 | ZNF581 | 16272 |
| zinc finger protein 582 | ZNF582 | 16273 |
| zinc finger protein 583 | ZNF583 | 16274 |
| zinc finger protein 584 | ZNF584 | 16275 |
| zinc finger protein 585A | ZNF585A | 16276 |
| zinc finger protein 585B | ZNF585B | 16277 |
| zinc finger protein 586 | ZNF586 | 16278 |
| zinc finger protein 587 | ZNF587 | 16279 |
| zinc finger protein 589 | ZNF589 | 16280 |
| zinc finger protein 592 | ZNF592 | 16281 |
| zinc finger protein 593 | ZNF593 | 16282 |
| zinc finger protein 594 | ZNF594 | 16283 |
| zinc finger protein 595 | ZNF595 | 16284 |
| zinc finger protein 596 | ZNF596 | 16285 |
| zinc finger protein 597 | ZNF597 | 16286 |
| zinc finger protein 598 | ZNF598 | 16287 |
| zinc finger protein 599 | ZNF599 | 16288 |
| zinc finger protein 600 | ZNF600 | 16289 |
| zinc finger protein 605 | ZNF605 | 16290 |
| zinc finger protein 606 | ZNF606 | 16291 |
| zinc finger protein 607 | ZNF607 | 16292 |
| zinc finger protein 608 | ZNF608 | 16293 |
| zinc finger protein 609 | ZNF609 | 16294 |
| zinc finger protein 610 | ZNF610 | 16295 |
| zinc finger protein 611 | ZNF611 | 16296 |
| zinc finger protein 613 | ZNF613 | 16297 |
| zinc finger protein 614 | ZNF614 | 16298 |
| zinc finger protein 615 | ZNF615 | 16299 |
| zinc finger protein 616 | ZNF616 | 16300 |
| zinc finger protein 618 | ZNF618 | 16301 |
| zinc finger protein 619 | ZNF619 | 16302 |
| zinc finger protein 620 | ZNF620 | 16303 |
| zinc finger protein 621 | ZNF621 | 16304 |
| zinc finger protein 622 | ZNF622 | 16305 |
| zinc finger protein 623 | ZNF623 | 16306 |
| zinc finger protein 624 | ZNF624 | 16307 |
| zinc finger protein 625 | ZNF625 | 16308 |
| zinc finger protein 626 | ZNF626 | 16309 |
| zinc finger protein 627 | ZNF627 | 16310 |
| zinc finger protein 628 | ZNF628 | 16311 |
| zinc finger protein 629 | ZNF629 | 16312 |
| zinc finger protein 639 | ZNF639 | 16313 |
| zinc finger protein 641 | ZNF641 | 16314 |
| zinc finger protein 644 | ZNF644 | 16315 |
| zinc finger protein 645 | ZNF645 | 16316 |
| zinc finger protein 646 | ZNF646 | 16317 |
| zinc finger protein 648 | ZNF648 | 16318 |
| zinc finger protein 649 | ZNF649 | 16319 |
| zinc finger protein 652 | ZNF652 | 16320 |
| zinc finger protein 653 | ZNF653 | 16321 |
| zinc finger protein 654 | ZNF654 | 16322 |
| zinc finger protein 655 | ZNF655 | 16323 |
| zinc finger protein 658 | ZNF658 | 16324 |
| zinc finger protein 658B (pseudogene) | ZNF658B | 16325 |
| zinc finger protein 66 | ZNF66 | 16326 |
| zinc finger protein 660 | ZNF660 | 16327 |
| zinc finger protein 662 | ZNF662 | 16328 |
| zinc finger protein 664 | ZNF664 | 16329 |
| zinc finger protein 665 | ZNF665 | 16330 |
| zinc finger protein 667 | ZNF667 | 16331 |
| zinc finger protein 668 | ZNF668 | 16332 |
| zinc finger protein 669 | ZNF669 | 16333 |
| zinc finger protein 670 | ZNF670 | 16334 |
| zinc finger protein 671 | ZNF671 | 16335 |
| zinc finger protein 672 | ZNF672 | 16336 |
| zinc finger protein 674 | ZNF674 | 16337 |
| zinc finger protein 675 | ZNF675 | 16338 |
| zinc finger protein 676 | ZNF676 | 16339 |
| zinc finger protein 677 | ZNF677 | 16340 |
| zinc finger protein 678 | ZNF678 | 16341 |
| zinc finger protein 679 | ZNF679 | 16342 |
| zinc finger protein 680 | ZNF680 | 16343 |
| zinc finger protein 681 | ZNF681 | 16344 |
| zinc finger protein 682 | ZNF682 | 16345 |
| zinc finger protein 683 | ZNF683 | 16346 |
| zinc finger protein 684 | ZNF684 | 16347 |
| zinc finger protein 687 | ZNF687 | 16348 |
| zinc finger protein 688 | ZNF688 | 16349 |
| zinc finger protein 689 | ZNF689 | 16350 |
| zinc finger protein 69 | ZNF69 | 16351 |
| zinc finger protein 691 | ZNF691 | 16352 |
| zinc finger protein 692 | ZNF692 | 16353 |
| zinc finger protein 695 | ZNF695 | 16354 |
| zinc finger protein 696 | ZNF696 | 16355 |
| zinc finger protein 697 | ZNF697 | 16356 |
| zinc finger protein 699 | ZNF699 | 16357 |
| zinc finger protein 7 | ZNF7 | 16358 |
| zinc finger protein 70 | ZNF70 | 16359 |
| zinc finger protein 701 | ZNF701 | 16360 |
| zinc finger protein 702, pseudogene | ZNF702P | 16361 |
| zinc finger protein 703 | ZNF703 | 16362 |
| zinc finger protein 704 | ZNF704 | 16363 |
| zinc finger protein 705A | ZNF705A | 16364 |
| zinc finger protein 705D | ZNF705D | 16365 |
| zinc finger protein 705E | ZNF705E | 16366 |
| zinc finger protein 705G | ZNF705G | 16367 |
| zinc finger protein 706 | ZNF706 | 16368 |
| zinc finger protein 707 | ZNF707 | 16369 |
| zinc finger protein 708 | ZNF708 | 16370 |
| zinc finger protein 709 | ZNF709 | 16371 |
| zinc finger protein 71 | ZNF71 | 16372 |
| zinc finger protein 710 | ZNF710 | 16373 |
| zinc finger protein 711 | ZNF711 | 16374 |
| zinc finger protein 713 | ZNF713 | 16375 |
| zinc finger protein 714 | ZNF714 | 16376 |
| zinc finger protein 716 | ZNF716 | 16377 |
| zinc finger protein 717 | ZNF717 | 16378 |
| zinc finger protein 718 | ZNF718 | 16379 |
| zinc finger protein 720 | ZNF720 | 16380 |
| zinc finger protein 721 | ZNF721 | 16381 |
| zinc finger protein 724, pseudogene | ZNF724P | 16382 |
| zinc finger protein 726 | ZNF726 | 16383 |
| zinc finger protein 727 | ZNF727 | 16384 |
| zinc finger protein 729 | ZNF729 | 16385 |
| zinc finger protein 730 | ZNF730 | 16386 |
| zinc finger protein 732 | ZNF732 | 16387 |
| zinc finger protein 735 | ZNF735 | 16388 |
| zinc finger protein 737 | ZNF737 | 16389 |
| zinc finger protein 74 | ZNF74 | 16390 |
| zinc finger protein 740 | ZNF740 | 16391 |
| zinc finger protein 746 | ZNF746 | 16392 |
| zinc finger protein 747 | ZNF747 | 16393 |
| zinc finger protein 749 | ZNF749 | 16394 |
| zinc finger protein 750 | ZNF750 | 16395 |
| zinc finger protein 75a | ZNF75A | 16396 |
| zinc finger protein 75D | ZNF75D | 16397 |
| zinc finger protein 76 | ZNF76 | 16398 |
| zinc finger protein 761 | ZNF761 | 16399 |
| zinc finger protein 763 | ZNF763 | 16400 |
| zinc finger protein 764 | ZNF764 | 16401 |
| zinc finger protein 765 | ZNF765 | 16402 |
| zinc finger protein 766 | ZNF766 | 16403 |
| zinc finger protein 768 | ZNF768 | 16404 |
| zinc finger protein 77 | ZNF77 | 16405 |
| zinc finger protein 770 | ZNF770 | 16406 |
| zinc finger protein 771 | ZNF771 | 16407 |
| zinc finger protein 772 | ZNF772 | 16408 |
| zinc finger protein 773 | ZNF773 | 16409 |
| zinc finger protein 774 | ZNF774 | 16410 |
| zinc finger protein 775 | ZNF775 | 16411 |
| zinc finger protein 776 | ZNF776 | 16412 |
| zinc finger protein 777 | ZNF777 | 16413 |
| zinc finger protein 778 | ZNF778 | 16414 |
| zinc finger protein 780A | ZNF780A | 16415 |
| zinc finger protein 780B | ZNF780B | 16416 |
| zinc finger protein 781 | ZNF781 | 16417 |
| zinc finger protein 782 | ZNF782 | 16418 |
| zinc finger family member 783 | ZNF783 | 16419 |
| zinc finger protein 784 | ZNF784 | 16420 |
| zinc finger protein 785 | ZNF785 | 16421 |
| zinc finger protein 786 | ZNF786 | 16422 |
| zinc finger protein 787 | ZNF787 | 16423 |
| zinc finger family member 788 | ZNF788 | 16424 |
| zinc finger protein 789 | ZNF789 | 16425 |
| zinc finger protein 79 | ZNF79 | 16426 |
| zinc finger protein 790 | ZNF790 | 16427 |
| zinc finger protein 791 | ZNF791 | 16428 |
| zinc finger protein 792 | ZNF792 | 16429 |
| zinc finger protein 793 | ZNF793 | 16430 |
| zinc finger protein 799 | ZNF799 | 16431 |
| zinc finger protein 8 | ZNF8 | 16432 |
| zinc finger protein 80 | ZNF80 | 16433 |
| zinc finger protein 800 | ZNF800 | 16434 |
| zinc finger protein 804A | ZNF804A | 16435 |
| zinc finger protein 804B | ZNF804B | 16436 |
| zinc finger protein 805 | ZNF805 | 16437 |
| zinc finger protein 806 | ZNF806 | 16438 |
| zinc finger protein 808 | ZNF808 | 16439 |
| zinc finger protein 81 | ZNF81 | 16440 |
| zinc finger protein 813 | ZNF813 | 16441 |
| zinc finger protein 814 | ZNF814 | 16442 |
| zinc finger protein 816 | ZNF816 | 16443 |
| zinc finger protein 821 | ZNF821 | 16444 |
| zinc finger protein 823 | ZNF823 | 16445 |
| zinc finger protein 827 | ZNF827 | 16446 |
| zinc finger protein 829 | ZNF829 | 16447 |
| zinc finger protein 83 | ZNF83 | 16448 |
| zinc finger protein 830 | ZNF830 | 16449 |
| zinc finger protein 831 | ZNF831 | 16450 |
| zinc finger protein 833, pseudogene | ZNF833P | 16451 |
| zinc finger protein 835 | ZNF835 | 16452 |
| zinc finger protein 836 | ZNF836 | 16453 |
| zinc finger protein 837 | ZNF837 | 16454 |
| zinc finger protein 839 | ZNF839 | 16455 |
| zinc finger protein 84 | ZNF84 | 16456 |
| zinc finger protein 840, pseudogene | ZNF840P | 16457 |
| zinc finger protein 841 | ZNF841 | 16458 |
| zinc finger protein 843 | ZNF843 | 16459 |
| zinc finger protein 844 | ZNF844 | 16460 |
| zinc finger protein 845 | ZNF845 | 16461 |
| zinc finger protein 846 | ZNF846 | 16462 |
| zinc finger protein 85 | ZNF85 | 16463 |
| zinc finger protein 853 | ZNF853 | 16464 |
| zinc finger protein 860 | ZNF860 | 16465 |
| zinc finger protein 876, pseudogene | ZNF876P | 16466 |
| zinc finger protein 878 | ZNF878 | 16467 |
| zinc finger protein 879 | ZNF879 | 16468 |
| zinc finger protein 880 | ZNF880 | 16469 |
| zinc finger protein 891 | ZNF891 | 16470 |
| zinc finger protein 90 | ZNF90 | 16471 |
| zinc finger protein 91 | ZNF91 | 16472 |
| zinc finger protein 92 | ZNF92 | 16473 |
| zinc finger protein 93 | ZNF93 | 16474 |
| zinc finger protein 98 | ZNF98 | 16475 |
| zinc finger protein 99 | ZNF99 | 16476 |
| zinc finger, NFX1-type containing 1 | ZNFX1 | 16477 |
| zinc finger and SCAN domain containing 1 | ZSCAN1 | 16478 |
| zinc finger and SCAN domain containing 10 | ZSCAN10 | 16479 |
| zinc finger and SCAN domain containing 12 | ZSCAN12 | 16480 |
| zinc finger and SCAN domain containing 16 | ZSCAN16 | 16481 |
| zinc finger and SCAN domain containing 18 | ZSCAN18 | 16482 |
| zinc finger and SCAN domain containing 2 | ZSCAN2 | 16483 |
| zinc finger and SCAN domain containing 20 | ZSCAN20 | 16484 |
| zinc finger and SCAN domain containing 21 | ZSCAN21 | 16485 |
| zinc finger and SCAN domain containing 22 | ZSCAN22 | 16486 |
| zinc finger and SCAN domain containing 23 | ZSCAN23 | 16487 |
| zinc finger and SCAN domain containing 25 | ZSCAN25 | 16488 |
| zinc finger and SCAN domain containing 26 | ZSCAN26 | 16489 |
| zinc finger and SCAN domain containing 29 | ZSCAN29 | 16490 |
| zinc finger and SCAN domain containing 30 | ZSCAN30 | 16491 |
| zinc finger and SCAN domain containing 31 | ZSCAN31 | 16492 |
| zinc finger and SCAN domain containing 32 | ZSCAN32 | 16493 |
| zinc finger and SCAN domain containing 4 | ZSCAN4 | 16494 |
| zinc finger and SCAN domain containing 5A | ZSCAN5A | 16495 |
| zinc finger and SCAN domain containing 5B | ZSCAN5B | 16496 |
| zinc finger and SCAN domain containing 5C, | ZSCAN5CP | 16497 |
| pseudogene | | |
| zinc finger and SCAN domain containing 9 | ZSCAN9 | 16498 |
| zinc finger with UFM1-specific peptidase domain | ZUFSP | 16499 |
| zinc finger, X-linked, duplicated A | ZXDA | 16500 |
| zinc finger, X-linked, duplicated B | ZXDB | 16501 |
| ZXD family zinc finger C | ZXDC | 16502 |
| zinc finger ZZ-type containing 3 | ZZZ3 | 16503 |

[0844] In some embodiments, a T-cell of the disclosure is modified to silence or reduce expression of one or more gene(s) encoding a cell death or cell apoptosis receptor to produce an armored T-cell of the disclosure. Interaction of a death receptor and its endogenous ligand results in the initiation of apoptosis. Disruption of an expression, an activity, or an interaction of a cell death and/or cell apoptosis receptor and/or ligand render an armored T-cell of the disclosure less receptive to death signals, consequently, making the armored T cell of the disclosure more efficacious in a tumor environment. An exemplary cell death receptor which may be modified in an armored T cell of the disclosure is Fas (CD95). Exemplary cell death and/or cell apoptosis receptors and ligands of the disclosure include, but are not limited to, the exemplary receptors and ligands provided in Table 4.

TABLE 4
Exemplary Cell Death and/or Cell
Apoptosis Receptors and Ligands.

| Full Name | Abbreviation | SEQ ID NO: |
|---|---|---|
| Cluster of Differentiation 120 | CD120a | 16504-16505 |
| Death receptor 3 | DR3 | 16506 |
| Death receptor 6 | DR6 | 16507 |
| first apoptosis signal (Fas) receptor | Fas | 16508-16509 |
| | (CD95/APO-1) | |
| Fas Ligand | FasL | 16510 |
| cellular tumor antigen p53 | p53 | 16511 |
| Tumor necrosis factor receptor 1 | TNF-R1 | 16512 |
| Tumor necrosis factor receptor 2 | TNF-R2 | 16513 |
| Tumor necrosis factor-related apoptosis- | TRAIL-R1 | 16514 |
| inducing ligand receptor 1 | (DR4) | |
| Tumor necrosis factor-related apoptosis- | TRAIL-R2 | 16515 |
| inducing ligand receptor 2 | (DR5) | |
| Fas-associated protein with death domain | FADD | 16516 |
| Tumor necrosis factor receptor type 1- | TRADD | 16517 |
| associated DEATH domain protein | | |
| Bcl-2-associatcd X protein | Bax | 16518 |
| Bcl-2 homologous killer | BAK | 16519 |
| 14-3-3 protein | 14-3-3 | 16520 |
| B-cell lymphoma 2 | Bcl-2 | 16521 |
| Cytochrome C | CytC | 16522 |
| Second mitochondria-derived activator of | Smac/Diablo | 16523 |
| caspase | | |
| High temperature requirement protein A2 | HTRA2/Omi | 16524 |
| Apoptosis inducing factor | AIF | 16525 |
| Endonuclease G | EXOG | 16526 |
| Caspase 9 | Cas9 | 16527 |
| Caspase 2 | Cas2 | 16528 |
| Caspase 8 | Cas8 | 16529 |
| Caspase 10 | Cas10 | 16530 |
| Caspase 3 | Cas3 | 16531 |
| Caspase 6 | Cas6 | 16532 |
| Caspase 7 | Cas7 | 16533 |
| Tumor Necrosis Factor alpha | TNF-alpha | 16534 |
| TNF-related weak inducer of apoptosis | TWEAK | 16535 |
| TNF-related weak inducer of apoptosis | TWEAK-R | 16536 |
| receptor | | |
| Tumor necrosis factor-related apoptosis- | TRAIL | 16537 |
| inducing ligand | | |
| TNF ligand-related molecule 1 | TL1A | 16538 |
| Receptor-interacting serine/threonine- | RIP1 | 16539 |
| protein kinase 1 | | |
| Cellular inhibitor of apoptosis 1 | cIAP-1 | 16540 |
| TNF receptor-associated factor 2 | TRAF-2 | 16541 |

[0845] In some embodiments, a T-cell of the disclosure is modified to silence or reduce expression of one or more gene(s) encoding a metabolic sensing protein to produce an armored T-cell of the disclosure. Disruption to the metabolic sensing of the immunosuppressive tumor microenvironment (characterized by low levels of oxygen, pH, glucose and other molecules) by an armored T-cell of the disclosure leads to extended retention of T-cell function and, consequently, more tumor cells killed per armored T cell. For example, HIF1a and VHL play a role in T-cell function while in a hypoxic environment. An armored T-cell of the disclosure may have silenced or reduced expression of one or more genes encoding HIF1a or VHL. Genes and proteins involved in metabolic sensing include, but are not limited to, the exemplary genes and proteins provided in Table 5.

TABLE 5
Exemplary Metabolic Sensing Genes (and encoded Proteins).

| Full Name | Metabolite | Abbreviation | SEQ ID NO: |
|---|---|---|---|
| hypoxia-inducible factor 1α | Low oxygen | HIF-1α | 16542 |
| von Hippel-Lindau tumor suppressor | Low oxygen | VHL | 16543 |
| Prolyl-hydroxylase domain proteins | High oxygen | PHD proteins | |
| Glucose transporter 1 | glucose | GLUT1 | 16544 |
| Linker of Activated T cells | Amino acid (leucine) | LAT | 16545 |
| CD98 glycoprotein | Amino acid (leucine) | CD98 | 16546 |
| Alanine, serine, cysteine-preferring | Cationic Amino acid | ASCT2/Slc1a5 | 16547 |
| transporter 2 | (glutamine) | | |
| Solute carrier family 7 member 1 | Cationic Amino acids | Slc7a1 | 16548 |
| Solute carrier family 7 member 2 | Cationic Amino acids | Slc7a2 | 16549 |
| Solute carrier family 7 member 3 | Cationic Amino acids | Slc7a3 | 16550 |
| Solute carrier family 7 member 4 | Cationic Amino acids | Slc7a4 | 16551 |
| Solute carrier family 7 member 5 | Glycoprotein | Slc7a5 | 16552 |
| | associated Amino | | |
| | acids | | |
| Solute carrier family 7 member 6 | Glycoprotein | Slc7a6 | 16553 |
| | associated Amino | | |
| | acids | | |
| Solute carrier family 7 member 7 | Glycoprotein | Slc7a7 | 16554 |
| | associated Amino | | |
| | acids | | |
| Solute carrier family 7 member 8 | Glycoprotein | Slc7a8 | 16555 |
| | associated Amino | | |
| | acids | | |
| Solute carrier family 7 member 9 | Glycoprotein | Slc7a9 | 16556 |
| | associated Amino | | |
| | acids | | |
| Solute carrier family 7 member 10 | Glycoprotein | Slc7a10 | 16557 |
| | associated Amino | | |
| | acids | | |
| Solute carrier family 7 member 11 | Glycoprotein | Slc7a11 | 16558 |
| | associated Amino | | |
| | acids | | |
| Solute carrier family 7 member 13 | Glycoprotein | Slc7a13 | 16559 |
| | associated Amino | | |
| | acids | | |
| Solute carrier family 7 member 14 | Cationic Amino acids | Slc7a14 | 16560 |
| Solute carrier family 3 member 2 | Amino acid | Slc3a2 | 16561 |
| Calcium transport protein 2 | Cationic Amino acid | CAT2 | 16562 |
| | (arginine) | | |
| Calcium transport protein 3 | Cationic Amino acid | CAT3 | 16563 |
| | (arginine) | | |
| Calcium transport protein 4 | Cationic Amino acid | CAT4 | 16564 |
| | (arginine) | | |
| Bromodomain adjacent to zinc finger | Amino acid (arginine) | BAZ1B | 16565 |
| domain protein 1B | | | |
| PC4 and SFRS1-interacting protein | Amino acid (arginine) | PSIP1 | 16566 |
| Translin | Amino acid (arginine) | TSN | 16567 |
| G-protein-coupled receptors | Fatty Acid and | GPCRs | |
| | Cholesterol | | |
| T-cell Receptor, subunit alpha | Fatty Acid and | TCR alpha | 16568 |
| | Cholesterol | | |
| T-cell Receptor, subunit beta | Fatty Acid and | TCR beta | 16569 |
| | Cholesterol | | |
| T-cell Receptor, subunit zeta | Fatty Acid and | TCR zeta | 16570 |
| | Cholesterol | | |
| T-cell Receptor, subunit CD3 epsilon | Fatty Acid and | TCR CD3 epsilon | 16571 |
| | Cholesterol | | |
| T-cell Receptor, subunit CD3 | Fatty Acid and | TCR CD3 gamma | 16572 |
| gamma | Cholesterol | | |
| T-cell Receptor, subunit CD3 delta | Fatty Acid and | TCR CD3 delta | 16573 |
| | Cholesterol | | |
| peroxisome proliferator-activated | Fatty Acid and | PPARs | |
| receptors | Cholesterol | | |
| AMP-activated protein kinase | Energy homeostasis | AMPK | 16574-16575 |
| | (intracellular AMP to | | |
| | ATP ratio) | | |
| P2X purinoceptor 7 | Redox homeostasis | P2X7 | 16576 |

[0846] In some embodiments, a T-cell of the disclosure is modified to silence or reduce expression of one or more gene(s) encoding proteins that that confer sensitivity to a cancer therapy, including a monoclonal antibody, to produce an armored T-cell of the disclosure. Thus, an armored T-cell of the disclosure can function and may demonstrate superior function or efficacy whilst in the presence of a cancer therapy (e.g., a chemotherapy, a monoclonal antibody therapy, or another anti-tumor treatment). Proteins involved in conferring sensitivity to a cancer therapy include, but are not limited to, the exemplary proteins provided in Table 6.

TABLE 6
Exemplary Proteins that Confer Sensitivity to a Cancer Therapeutic.

| Full Name | Abbreviation | SEQ ID NO: |
|---|---|---|
| Copper-transporting ATPase 2 | ATP7B | 16577 |
| Breakpoint cluster region protein | BCR | 16578 |
| Abelson tyrosine-protein kinase 1 | ABL | 16579 |
| Breast cancer resistance protein | BCRP | 16580 |
| Breast cancer type 1 susceptibility protein | BRCA1 | 16581 |
| Breast cancer type 2 susceptibility protein | BRCA2 | 16582 |
| CAMPATH-1 antigen | CD52 | 16583 |
| Cytochrome P450 2D6 | CYP2D6 | 16584 |
| Deoxycytidine kinase | dCK | 16585 |
| Dihydrofolate reductase | DHFR | 16586 |
| Dihydropyrimidine dehydrogenase [NADP(+)] | DPYD | 16587 |
| Epidermal growth factor receptor | EGFR | 16588 |
| DNA excision repair protein ERCC-1 | ERCC1 | 16589 |
| Estrogen Receptor | ESR | 16590 |
| Low affinity immunoglobulin gamma Fc region | FCGR3A | 16591 |
| receptor III-A | | |
| Receptor tyrosine-protein kinase erbB-2 | HER2 or ERBB2 | 16592 |
| Insulin-like growth factor 1 receptor | IGF1R | 16593 |
| GTPase KRas | KRAS | 16594 |
| Multidrug resistance protein 1 | MDR1 or ABCB1 | 16595 |
| Methylated-DNA--protein-cysteine methyltransferase | MGMT | 16596 |
| Multidrug resistance-associated protein 1 | MRP1 or ABCC1 | 16597 |
| Progesterone Receptor | PGR | 16598 |
| Regulator of G-protein signaling 10 | RGS10 | 16599 |
| Suppressor of cytokine signaling 3 | SOCS-3 | 16600 |
| Thymidylate synthase | TYMS | 16601 |
| UDP-glucuronosyltransferase 1-1 | UGT1A1 | 16602 |

[0847] In some embodiments, a T-cell of the disclosure is modified to silence or reduce expression of one or more gene(s) encoding a growth advantage factor to produce an armored T-cell. Silencing or reducing expression of an oncogene can confer a growth advantage for an armored T-cell of the disclosure. For example, silencing or reducing expression (e.g., disrupting expression) of a TET2 gene during a CAR-T manufacturing process results in the generation of an armored CAR-T with a significant capacity for expansion and subsequent eradication of a tumor when compared to a non-armored CAR-T lacking this capacity for expansion. This strategy may be coupled to a safety switch (e.g., an iC9 safety switch of the disclosure), which allows for the targeted disruption of an armored CAR-T-cell in the event of an adverse reaction from a subject or uncontrolled growth of the armored CAR-T. Exemplary growth advantage factors include, but are not limited to, the factors provided in Table 7.

TABLE 7
Exemplary Growth Advantage Factors.

| Full Name | Abbreviation | SEQ ID NO: |
|---|---|---|
| Ten Eleven Translocation 2 | TET2 | 16603 |
| DNA (cytosine-5)-methyltransferase 3A | DNMT3A | 16604 |
| Transforming protein RhoA | RHOA | 16605 |
| Proto-oncogene vav | VAV1 | 16606 |
| Rhombotin-2 | LMO2 | 16607 |
| T-cell acute lymphocytic leukemia | TAL1 | 16608 |
| protein 1 | | |
| Suppressor of cytokine signaling 1 | SOCS1 | 16609 |
| herpes virus entry mediator | HVEM | 16610 |
| T cell death-associated gene 8 | TDAG8 | 16611 |
| BCL6 corepressor | BCOR | 16612 |
| B and T cell attenuator | BTLA | 16613 |
| SPARC-like protein 1 | SPARCL1 | 16614 |
| Msh homeobox 1-like protein | MSX1 | 16615 |

### Armored T-Cells “Null or Switch Receptor” Strategy

[0848] In some embodiments, a T-cell of the disclosure is modified to express a modified/chimeric checkpoint receptor to produce an armored T-cell of the disclosure.

[0849] In some embodiments, the modified/chimeric checkpoint receptor comprises a null receptor, decoy receptor or dominant negative receptor. A null receptor, decoy receptor or dominant negative receptor of the disclosure may be modified/chimeric receptor/protein. A null receptor, decoy receptor or dominant negative receptor of the disclosure may be truncated for expression of the intracellular signaling domain. Alternatively, or in addition, a null receptor, decoy receptor or dominant negative receptor of the disclosure may be mutated within an intracellular signaling domain at one or more amino acid positions that are determinative or required for effective signaling. Truncation or mutation of null receptor, decoy receptor or dominant negative receptor of the disclosure may result in loss of the receptor's capacity to convey or transduce a checkpoint signal to the cell or within the cell.

[0850] For example, a dilution or a blockage of an immunosuppressive checkpoint signal from a PD-L1 receptor expressed on the surface of a tumor cell may be achieved by expressing a modified/chimeric PD-1 null receptor on the surface of an armored T-cell of the disclosure, which effectively competes with the endogenous (non-modified) PD-1 receptors also expressed on the surface of the armored T-cell to reduce or inhibit the transduction of the immunosuppressive checkpoint signal through endogenous PD-1 receptors of the armored T cell. In this exemplary embodiment, competition between the two different receptors for binding to PD-L1 expressed on the tumor cell reduces or diminishes a level of effective checkpoint signaling, thereby enhancing a therapeutic potential of the armored T-cell expressing the PD-1 null receptor.

[0851] In some embodiments, the modified/chimeric checkpoint receptor comprises a null receptor, decoy receptor or dominant negative receptor that is a transmembrane receptor.

[0852] In some embodiments, the modified/chimeric checkpoint receptor comprises a null receptor, decoy receptor or dominant negative receptor that is a membrane-associated or membrane-linked receptor/protein.

[0853] In some embodiments, the modified/chimeric checkpoint receptor comprises a null receptor, decoy receptor or dominant negative receptor that is an intracellular receptor/protein.

[0854] In some embodiments, the modified/chimeric checkpoint receptor comprises a null receptor, decoy receptor or dominant negative receptor that is an intracellular receptor/protein. Exemplary null, decoy, or dominant negative intracellular receptors/proteins of the disclosure include, but are not limited to, signaling components downstream of an inhibitory checkpoint signal (as provided, for example, in Tables 1 and 2), a transcription factor (as provided, for example, in Table 3), a cytokine or a cytokine receptor, a chemokine or a chemokine receptor, a cell death or apoptosis receptor/ligand (as provided, for example, in Table 4), a metabolic sensing molecule (as provided, for example, in Table 5), a protein conferring sensitivity to a cancer therapy (as provided, for example, in Table 6), and an oncogene or a tumor suppressor gene (as provided, for example, in Table 7). Exemplary cytokines, cytokine receptors, chemokines and chemokine receptors of the disclosure include, but are not limited to, the cytokines and cytokine receptors as well as chemokines and chemokine receptors provided in Table 8.

TABLE 8
Exemplary Cytokines, Cytokine receptors,
Chemokines and Chemokine Receptors.

| Full Name | Abbreviation | SEQ ID NO: |
|---|---|---|
| 4-1BB Ligand | 4-1BBL | 16616 |
| Tumor necrosis factor receptor | Apo3 or TNFRSF25 | 16617 |
| superfamily member 25 | | |
| Tumor necrosis factor receptor | APRIL or TNFRSF13 | 16618 |
| superfamily member 13 | | |
| Bcl2-associated agonist of cell death | Bcl-xL or BAD | 16619 |
| Tumor necrosis factor receptor | BCMA or TNFRSF17 | 16620 |
| superfamily member 17 | | |
| C-C motif chemokine 1 | CCL1 | 16621 |
| C-C motif chemokine 11 | CCL11 | 16622 |
| C-C motif chemokine 13 | CCL13 | 16623 |
| C-C motif chemokine 14 | CCL14 | 16624 |
| C-C motif chemokine 15 | CCL15 | 16625 |
| C-C motif chemokine 16 | CCL16 | 16626 |
| C-C motif chemokine 17 | CCL17 | 16627 |
| C-C motif chemokine 18 | CCL18 | 16628 |
| C-C motif chemokine 19 | CCL19 | 16629 |
| C-C motif chemokine 2 | CCL2 | 16630 |
| C-C motif chemokine 20 | CCL20 | 16631 |
| C-C motif chemokine 21 | CCL21 | 16632 |
| C-C motif chemokine 22 | CCL22 | 16633 |
| C-C motif chemokine 23 | CCL23 | 16634 |
| C-C motif chemokine 24 | CCL24 | 16635 |
| C-C motif chemokine 25 | CCL25 | 16636 |
| C-C motif chemokine 26 | CCL26 | 16637 |
| C-C motif chemokine 27 | CCL27 | 16638 |
| C-C motif chemokine 28 | CCL28 | 16639 |
| C-C motif chemokine 3 | CCL3 | 16640 |
| C-C motif chemokine 4 | CCL4 | 16641 |
| C-C motif chemokine 5 | CCL5 | 16642 |
| C-C motif chemokine 7 | CCL7 | 16643 |
| C-C motif chemokine 8 | CCL8 | 16644 |
| C-C chemokine receptor type 1 | CCR1 | 16645 |
| C-C chemokine receptor type 10 | CCR10 | 16646 |
| C-C chemokine receptor type 11 | CCR11 | 16647 |
| C-C chemokine receptor type 2 | CCR2 | 16648 |
| C-C chemokine receptor type 3 | CCR3 | 16649 |
| C-C chemokine receptor type 4 | CCR4 | 16650 |
| C-C chemokine receptor type 5 | CCR5 | 16651 |
| C-C chemokine receptor type 6 | CCR6 | 16652 |
| C-C chemokine receptor type 7 | CCR7 | 16653 |
| C-C chemokine receptor type 8 | CCR8 | 16654 |
| C-C chemokine receptor type 9 | CCR9 | 16655 |
| Granulocyte colony-stimulating factor | CD114 or CSF3R | 16656 |
| receptor | | |
| Macrophage colony-stimulating factor 1 | CD115 or CSF1R | 16657 |
| receptor | | |
| Granulocyte-macrophage colony- | CD116 or CSF2RA | 16658 |
| stimulating factor receptor subunit alpha | | |
| Mast/stem cell growth factor receptor | CD117 or KIT | 16659 |
| Kit | | |
| Leukemia inhibitory factor receptor | CD118 or LIFR | 16660 |
| Tumor necrosis factor receptor | CD120a or TNFRSF1A | 16661 |
| superfamily member 1A | | |
| Tumor necrosis factor receptor | CD120b or TNFRSF1B | 16662 |
| superfamily member 1B | | |
| Interleukin-1 receptor type 1 | CD121a or IL1R1 | 16663 |
| Interleukin-2 receptor subunit beta | CD122 or IL2RB | 16664 |
| Interleukin-3 receptor subunit alpha | CD123 or IL3RA | 16665 |
| Interleukin-4 receptor subunit alpha | CD124 or IL4R | 16666 |
| Interleukin-6 receptor subunit alpha | CD126 or IL6R | 16667 |
| Interleukin-7 receptor subunit alpha | CD127 or IL7R | 16668 |
| Interleukin-6 receptor subunit beta | CD130 or IL6ST | 16669 |
| Cytokine receptor common subunit | CD132 or IL2RG | 16670 |
| gamma | | |
| Tumor necrosis factor ligand | CD153 or TNFSF8 | 16671 |
| superfamily member 8 | | |
| CD40 ligand | CD154 or CD40L | 16672 |
| Tumor necrosis factor ligand | CD178 or FASLG | 16673 |
| superfamily member 6 | | |
| Interleukin-12 receptor subunit beta-1 | CD212 or IL12RB1 | 16674 |
| Interleukin-13 receptor subunit alpha-1 | CD213a1 or IL13RA1 | 16675 |
| Interleukin-13 receptor subunit alpha-2 | CD213a2 or IL13RA2 | 16676 |
| Interleukin-2 receptor subunit alpha | CD25 or IL2RA | 16677 |
| CD27 antigen | CD27 | 16678 |
| Tumor necrosis factor receptor | CD30 or TNFRSF8 | 16679 |
| superfamily member 8 | | |
| T-cell surface glycoprotein CD4 | CD4 | 16680 |
| Tumor necrosis factor receptor | CD40 or TNFRSF5 | 16681 |
| superfamily member 5 | | |
| CD70 antigen | CD70 | 16682 |
| Tumor necrosis factor receptor | CD95 or FAS or | 16683 |
| superfamily member 6 | FNFRSF6 | |
| Granulocyte-macrophage colony- | CDw116 or CSF2RA | 16684 |
| stimulating factor receptor subunit alpha | | |
| Interferon gamma receptor 1 | CDw119 or IFNGR1 | 16685 |
| Interleukin-1 receptor type 2 | CDw121b or IL1R2 | 16686 |
| Interleukin-5 receptor subunit alpha | CDw125 or IL5RA | 16687 |
| Cytokine receptor common subunit beta | CDw131 or CSF2RB | 16688 |
| Tumor necrosis factor receptor | CDw137 or TNFRSF9 | 16689 |
| superfamily member 9 | | |
| Interleukin-10 receptor | CDw210 or IL10R | 16690 |
| Interleukin-17 receptor A | CDw217 or IL17RA | 16691 |
| C-X3-C motif chemokine 1 | CX3CL1 | 16692 |
| CX3C chemokine receptor 1 | CX3CR1 | 16693 |
| C-X-C motif chemokine 1 | CXCL1 | 16694 |
| C-X-C motif chemokine 10 | CXCL10 | 16695 |
| C-X-C motif chemokine 11 | CXCL11 | 16696 |
| C-X-C motif chemokine 12 | CXCL12 | 16697 |
| C-X-C motif chemokine 13 | CXCL13 | 16698 |
| C-X-C motif chemokine 14 | CXCL14 | 16699 |
| C-X-C motif chemokine 16 | CXCL16 | 16700 |
| C-X-C motif chemokine 2 | CXCL2 | 16701 |
| C-X-C motif chemokine 3 | CXCL3 | 16702 |
| C-X-C motif chemokine 4 | CXCL4 | 16703 |
| C-X-C motif chemokine 5 | CXCL5 | 16704 |
| C-X-C motif chemokine 6 | CXCL6 | 16705 |
| C-X-C motif chemokine 7 | CXCL7 | 16706 |
| C-X-C motif chemokine 8 | CXCL8 | 16707 |
| C-X-C motif chemokine 9 | CXCL9 | 16708 |
| C-X-C chemokine receptor type 1 | CXCR1 | 16709 |
| C-X-C chemokine receptor type 2 | CXCR2 | 16710 |
| C-X-C chemokine receptor type 3 | CXCR3 | 16711 |
| C-X-C chemokine receptor type 4 | CXCR4 | 16712 |
| C-X-C chemokine receptor type 5 | CXCR5 | 16713 |
| C-X-C chemokine receptor type 6 | CXCR6 | 16714 |
| C-X-C chemokine receptor type 7 | CXCR7 | 16715 |
| Atypical chemokine receptor 1 | DARC or ACKR1 | 16716 |
| Erythropoietin | Epo | 16717 |
| Erythropoietin receptor | EpoR | 16718 |
| Receptor-type tyrosine-protein kinase | Flt-3 | 16719 |
| FLT3 | | |
| FLT3 Ligand | Flt-3L | 16720 |
| Granulocyte colony-stimulating factor | G-CSF or GSF3R | 16721 |
| receptor | | |
| Tumor necrosis factor receptor | GITR or TNFRSF18 | 16722 |
| superfamily member 18 | | |
| GITR Ligand | GITRL | 16723 |
| Cytokine receptor common subunit beta | GM-CSF or CSF2RB | 16724 |
| Interleukin-6 receptor subunit beta | gp130 or IL6ST | 16725 |
| Tumor necrosis factor receptor | HVEM or TNFRSF14 | 16726 |
| superfamily member 14 | | |
| Interferon gamma | IENγ | 16727 |
| Interferon gamma receptor 2 | IFNGR2 | 16728 |
| Interferon-alpha | IFN-α | 16729 |
| Interferon-beta | IFN-β | 16730 |
| Interleukin-1 alpha | IL1 | 16731 |
| Interleukin-10 | IL10 | 16732 |
| Interleukin-10 receptor | IL10R | 16733 |
| Interleukin-11 | IL-11 | 16734 |
| Interleukin-11 receptor alpha | IL-11Ra | 16735 |
| Interleukin-12 | IL12 | 16736 |
| Interleukin-13 | IL13 | 16737 |
| Interleukin-13 receptor | IL13R | 16738 |
| Interleukin-14 | IL-14 | 16739 |
| Interleukin-15 | IL15 | 16740 |
| Interleukin-15 receptor alpha | IL-15Ra | 16741 |
| Interleukin-16 | IL-16 | 16742 |
| Interleukin-17 | IL17 | 16743 |
| Interleukin-17 receptor | IL17R | 16744 |
| Interleukin-18 | IL18 | 16745 |
| Interleukin-1 receptor alpha | IL-1RA | 16746 |
| Interleukin-1 alpha | IL-1α | 16747 |
| Interleukin-1beta | IL-1β | 16748 |
| Interleukin-2 | IL2 | 16749 |
| Interleukin-20 | IL-20 | 16750 |
| Interleukin-20 receptor alpha | IL-20Rα | 16751 |
| Interleukin-20 receptor beta | IL-20Rβ | 16752 |
| Interleukin-21 | IL21 | 16753 |
| Interleukin-3 | IL-3 | 16754 |
| Interleukin-35 | IL35 | 16755 |
| Interleukin-4 | IL4 | 16756 |
| Interleukin-4 receptor | IL4R | 16757 |
| Interleukin-5 | IL5 | 16758 |
| Interleukin-5 receptor | IL5R | 16759 |
| Interleukin-6 | IL6 | 16760 |
| Interleukin-6 receptor | IL6R | 16761 |
| Interleukin-7 | IL7 | 16762 |
| Interleukin-9 receptor | IL-9R | 16763 |
| Leukemia inhibitory factor | LIF | 16764 |
| Leukemia inhibitory factor receptor | LIFR | 16765 |
| tumor necrosis factor superfamily | LIGHT or TNFSF14 | 16766 |
| member 14 | | |
| Tumor necrosis factor receptor | LTβR or TNFRSF3 | 16767 |
| superfamily member 3 | | |
| Lymphotoxin-beta | LT-β | 16768 |
| Macrophage colony-stimulating factor 1 | M-CSF | 16769 |
| Tumor necrosis factor receptor | OPG or TNFRSF11B | 16770 |
| superfamily member 11B | | |
| Oncostatin-M | OSM | 16771 |
| Oncostatin-M receptor | OSMR | 16772 |
| Tumor necrosis factor receptor | OX40 or TNFRSF4 | 16773 |
| superfamily member 4 | | |
| Tumor necrosis factor ligand | OX40L or TNFSF4 | 16774 |
| superfamily member 4 | | |
| Tumor necrosis factor receptor | RANK or TNFRSF11A | 16775 |
| superfamily member 11A | | |
| Kit Ligand | SCF or KITLG | 16776 |
| Tumor necrosis factor receptor | TACI or TNFRSF13B | 16777 |
| superfamily member 13B | | |
| Tumor necrosis factor ligand | TALL-1 or TNFSF13B | 16778 |
| superfamily member 13B | | |
| TGF-beta receptor type-1 | TGF-βR1 | 16779 |
| TGF-beta receptor type-2 | TGF-βR2 | 16780 |
| TGF-beta receptor type-3 | TGF-βR3 | 16781 |
| Transforming growth factor beta-1 | TGF-β1 | 16782 |
| Transforming growth factor beta-2 | TGF-β2 | 16783 |
| Transforming growth factor beta-3 | TGF-β3 | 16784 |
| Tumor necrosis factor alpha | TNF or TNF-α | 16785 |
| Tumor necrosis factor beta | TNF-β | 16786 |
| Thyroid peroxidase | Tpo | 16787 |
| Thyroid peroxidase receptor | TpoR | 16788 |
| Tumor necrosis factor ligand | TRAIL or TNFSF10 | 16789 |
| superfamily member 10 | | |
| Tumor necrosis factor receptor | TRAILR1 or | 16790 |
| superfamily member 10A | TNFRSF10A | |
| Tumor necrosis factor receptor | TRAILR2 or | 16791 |
| superfamily member 10B | TNFRSF10B | |
| Tumor necrosis factor ligand | TRANCE or TNFSF11 | 16792 |
| superfamily member 11 | | |
| Tumor necrosis factor ligand | TWEAK or TNFSF11 | 16793 |
| superfamily member 12 | | |
| Lymphotactin | XCL1 | 16794 |
| Cytokine SCM-1 beta | XCL2 | 16795 |

[0855] In some embodiments, the modified/chimeric checkpoint receptor comprises a switch receptor. Exemplary switch receptors may comprise a modified/chimeric receptor/protein of the disclosure wherein a native or wild type intracellular signaling domain is switched or replaced with a different intracellular signaling domain that is either non-native to the protein and/or not a wild-type domain. For example, replacement of an inhibitory signaling domain with a stimulatory signaling domain would switch an immunosuppressive signal into an immunostimulatory signal. Alternatively, replacement of an inhibitory signaling domain with a different inhibitory domain can reduce or enhance the level of inhibitory signaling. Expression or overexpression, of a switch receptor can result in the dilution and/or blockage of a cognate checkpoint signal via competition with an endogenous wildtype checkpoint receptor (not a switch receptor) for binding to the cognate checkpoint receptor expressed within the immunosuppressive tumor microenvironment. Armored T cells of the disclosure may comprise a sequence encoding switch receptors of the disclosure, leading to the expression of one or more switch receptors of the disclosure, and consequently, altering an activity of an armored T-cell of the disclosure. Armored T cells of the disclosure may express a switch receptor of the disclosure that targets an intracellularly expressed protein downstream of a checkpoint receptor, a transcription factor, a cytokine receptor, a death receptor, a metabolic sensing molecule, a cancer therapy, an oncogene, and/or a tumor suppressor protein or gene of the disclosure.

[0856] Exemplary switch receptors of the disclosure may comprise or may be derived from a protein including, but are not limited to, the signaling components downstream of an inhibitory checkpoint signal (as provided, for example, in Tables 1 and 2), a transcription factor (as provided, for example, in Table 3), a cytokine or a cytokine receptor, a chemokine or a chemokine receptor, a cell death or apoptosis receptor/ligand (as provided, for example, in Table 4), a metabolic sensing molecule (as provided, for example, in Table 5), a protein conferring sensitivity to a cancer therapy (as provided, for example, in Table 6), and an oncogene or a tumor suppressor gene (as provided, for example, in Table 7). Exemplary cytokines, cytokine receptors, chemokines and chemokine receptors of the disclosure include, but are not limited to, the cytokines and cytokine receptors as well as chemokines and chemokine receptors provided in Table 8.

### Armored T-Cells—Conditional Gene Expression System

[0857] In some embodiments, a T-cell of the disclosure is modified to express chimeric ligand receptor (CLR) or a chimeric antigen receptor (CAR) that mediates conditional gene expression to produce an armored T-cell of the disclosure. The combination of the CLR/CAR and the conditional gene expression system in the nucleus of the armored T cell constitutes a synthetic gene expression system that is conditionally activated upon binding of cognate ligand(s) with CLR or cognate antigen(s) with CAR. This system may help to ‘armor’ or enhance therapeutic potential of modified T cells by reducing or limiting synthetic gene expression at the site of ligand or antigen binding, at or within the tumor environment for example.

### Exogenous Receptors

[0858] In some embodiments, the armored T-cell comprises a composition comprising (a) an inducible transgene construct, comprising a sequence encoding an inducible promoter and a sequence encoding a transgene, and (b) a receptor construct, comprising a sequence encoding a constitutive promoter and a sequence encoding an exogenous receptor, such as a CLR or CAR, wherein, upon integration of the construct of (a) and the construct of (b) into a genomic sequence of a cell, the exogenous receptor is expressed, and wherein the exogenous receptor, upon binding a ligand or antigen, transduces an intracellular signal that targets directly or indirectly the inducible promoter regulating the expression of the inducible transgene (a) to modify gene expression.

[0859] In some embodiments of a synthetic gene expression system of the disclosure, the composition modifies gene expression by decreasing gene expression. In some embodiments, the composition modifies gene expression by transiently modifying gene expression (e.g., for the duration of binding of the ligand to the exogenous receptor). In some embodiments, the composition modifies gene expression acutely (e.g., the ligand reversibly binds to the exogenous receptor). In some embodiments, the composition modifies gene expression chronically (e.g., the ligand irreversibly binds to the exogenous receptor).

[0860] In some embodiments of the compositions of the disclosure, the exogenous receptor of (b) comprises an endogenous receptor with respect to the genomic sequence of the cell. Exemplary receptors include, but are not limited to, intracellular receptors, cell-surface receptors, transmembrane receptors, ligand-gated ion channels, and G-protein coupled receptors.

[0861] In some embodiments of the compositions of the disclosure, the exogenous receptor of (b) comprises a non-naturally occurring receptor. In some embodiments, the non-naturally occurring receptor is a synthetic, modified, recombinant, mutant or chimeric receptor. In some embodiments, the non-naturally occurring receptor comprises one or more sequences isolated or derived from a T-cell receptor (TCR). In some embodiments, the non-naturally occurring receptor comprises one or more sequences isolated or derived from a scaffold protein. In some embodiments, including those wherein the non-naturally occurring receptor does not comprise a transmembrane domain, the non-naturally occurring receptor interacts with a second transmembrane, membrane-bound and/or an intracellular receptor that, following contact with the non-naturally occurring receptor, transduces an intracellular signal.

[0862] In some embodiments of the compositions of the disclosure, the exogenous receptor of (b) comprises a non-naturally occurring receptor. In some embodiments, the non-naturally occurring receptor is a synthetic, modified, recombinant, mutant or chimeric receptor. In some embodiments, the non-naturally occurring receptor comprises one or more sequences isolated or derived from a T-cell receptor (TCR). In some embodiments, the non-naturally occurring receptor comprises one or more sequences isolated or derived from a scaffold protein. In some embodiments, the non-naturally occurring receptor comprises a transmembrane domain. In some embodiments, the non-naturally occurring receptor interacts with an intracellular receptor that transduces an intracellular signal. In some embodiments, the non-naturally occurring receptor comprises an intracellular signaling domain. In some embodiments, the non-naturally occurring receptor is a chimeric ligand receptor (CLR). In some embodiments, the CLR is a chimeric antigen receptor (CAR).

[0863] In some embodiments of the compositions of the disclosure, the exogenous receptor of (b) comprises a non-naturally occurring receptor. In some embodiments, the CLR is a chimeric antigen receptor (CAR). In some embodiments, the chimeric ligand receptor comprises (a) an ectodomain comprising a ligand recognition region, wherein the ligand recognition region comprises at least scaffold protein; (b) a transmembrane domain, and (c) an endodomain comprising at least one costimulatory domain. In some embodiments, the ectodomain of (a) further comprises a signal peptide. In some embodiments, the ectodomain of (a) further comprises a hinge between the ligand recognition region and the transmembrane domain.

[0864] In some embodiments of the CLR/CARs of the disclosure, the signal peptide comprises a sequence encoding a human CD2, CD3δ, CD3δ, CD3γ, CD3ξ, CD4, CD8u, CD19, CD28, 4-1BB or GM-CSFR signal peptide. In some embodiments, the signal peptide comprises a sequence encoding a human CD8u signal peptide. In some embodiments, the signal peptide comprises an amino acid sequence comprising MALPVTALLLPLALLLHAARP (SEQ ID NO: 17503). In some embodiments, the signal peptide is encoded by a nucleic acid sequence comprising atggcactgccagtcaccgccctgctgctgcctctggctctgctgctgcacgcagctagacca (SEQ ID NO: 17504).

[0865] In some embodiments of the CLR/CARs of the disclosure, the transmembrane domain comprises a sequence encoding a human CD2, CD3δ, CD3δ, CD3γ, CD3ξ, CD4, CD8u, CD19, CD28, 4-1BB or GM-CSFR transmembrane domain. In some embodiments, the transmembrane domain comprises a sequence encoding a human CD8u transmembrane domain. In some embodiments, the transmembrane domain comprises an amino acid sequence comprising IYIWAPLAGTCGVLLLSLVITLYC (SEQ ID NO: 17505). In some embodiments, the transmembrane domain is encoded by a nucleic acid sequence comprising atctacatttgggcaccactggccgggacctgtggagtgctgctgctgagcctggtcatcacactgtactgc (SEQ ID NO: 17506).

[0866] In some embodiments of the CLR/CARs of the disclosure, the endodomain comprises a human CD3ξ endodomain. In some embodiments, the at least one costimulatory domain comprises a human 4-1BB, CD28, CD3ξ, CD40, ICOS, MyD88, OX-40 intracellular segment, or any combination thereof. In some embodiments, the at least one costimulatory domain comprises a human CD3ξ and/or a 4-1BB costimulatory domain. In some embodiments, the CD3ξ costimulatory domain comprises an amino acid sequence comprising RVKFSRSADAPAYKQGQNQLYNELNLGRREEYDVLDKRRGRDPEMGGKPRRKNPQ EGLYNELQKDKMAEAYSEIGMKGERRRGKGHDGLYQGLSTATKDTYDALHMQALP PR (SEQ ID NO: 17507). In some embodiments, the CD3ξ costimulatory domain is encoded by a nucleic acid sequence comprising cgcgtgaagtttagtcgatcagcagatgccccagcttacaaacagggacagaaccagctgtataacgagctgaatctgggccgccga gaggaatatgacgtgctggataagcggagaggacgcgaccccgaaatgggaggcaagcccaggcgcaaaaaccctcaggaagg cctgtataacgagctgcagaaggacaaaatggcagaagcctattctgagatcggcatgaagggggagcgacggagaggcaaagg gcacgatgggctgtaccagggactgagcaccgccacaaaggacacctatgatgctctgcatatgcaggcactgcctccaagg (SEQ ID NO: 17508). In some embodiments, the 4-1BB costimulatory domain comprises an amino acid sequence comprising KRGRKKLLYIFKQPFMRPVQTTQEEDGCSCRFPEEEEGGCEL (SEQ ID NO:17509). In some embodiments, the 4-1BB costimulatory domain is encoded by a nucleic acid sequence comprising aagagaggcaggaagaaactgctgtatattttcaaacagcccttcatgcgccccgtgcagactacccaggaggaagacgggtgctcc tgtcgattccctgaggaagaggaaggcgggtgtgagctg (SEQ ID NO: 17510). In some embodiments, the 4-1BB costimulatory domain is located between the transmembrane domain and the CD3ξ costimulatory domain. In some embodiments of the CLR/CARs of the disclosure, the hinge comprises a sequence derived from a human CD8u, IgG4, and/or CD4 sequence. In some embodiments, the hinge comprises a sequence derived from a human CD8u sequence. In some embodiments, the hinge comprises an amino acid sequence comprising

(SEQ ID NO: 17511)
TTTPAPRPPTPAPTIASQPLSLRPEACRPAAGGAVHTRGLDFACD.

In some embodiments, the hinge is encoded by a nucleic acid sequence comprising actaccacaccagcacctagaccaccaactccagctccaaccatcgcgagtcagcccctgagtctgagacctgaggcctgcaggcc agctgcaggaggagctgtgcacaccaggggcctggacttcgcctgcgac (SEQ ID NO: 17512). In some embodiments, the hinge is encoded by

(SEQ ID NO: 17513)
ACCACAACCCCTGCCCCCAGACCTCCCACACCCGCCCCTACCATCGCGAG
TCAGCCCCTGAGTCTGAGACCTGAGGCCTGCAGGCCAGCTGCAGGAGGAG
CTGTGCACACCAGGGGCCTGGACTTCGCCTGCGAC.

[0867] In some embodiments, the at least one protein scaffold specifically binds the ligand.

[0868] In some embodiments of the compositions of the disclosure, the exogenous receptor of (b) comprises a non-naturally occurring receptor. In some embodiments, the CLR is a chimeric antigen receptor (CAR). In some embodiments, the chimeric ligand receptor comprises (a) an ectodomain comprising a ligand recognition region, wherein the ligand recognition region comprises at least scaffold protein; (b) a transmembrane domain, and (c) an endodomain comprising at least one costimulatory domain. In some embodiments, the at least one protein scaffold comprises an antibody, an antibody fragment, a single domain antibody, a single chain antibody, an antibody mimetic, or a Centyrin (referred to herein as a CARTyrin). In some embodiments, the ligand recognition region comprises one or more of an antibody, an antibody fragment, a single domain antibody, a single chain antibody, an antibody mimetic, and a Centyrin. In some embodiments, the single domain antibody comprises or consists of a VHH or a VH (referred to herein as a VCAR). In some embodiments, the single domain antibody comprises or consists of a VHH or a VH comprising human complementarity determining regions (CDRs). In some embodiments, the VH is a recombinant or chimeric protein. In some embodiments, the VH is a recombinant or chimeric human protein. In some embodiments, the antibody mimetic comprises or consists of an affibody, an afflilin, an affimer, an affitin, an alphabody, an anticalin, an avimer, a DARPin, a Fynomer, a Kunitz domain peptide or a monobody. In some embodiments, the Centyrin comprises or consists of a consensus sequence of at least one fibronectin type III (FN3) domain.

[0869] In some embodiments of the compositions of the disclosure, the exogenous receptor of (b) comprises a non-naturally occurring receptor. In some embodiments, the CLR is a chimeric antigen receptor (CAR). In some embodiments, the chimeric ligand receptor comprises (a) an ectodomain comprising a ligand recognition region, wherein the ligand recognition region comprises at least scaffold protein; (b) a transmembrane domain, and (c) an endodomain comprising at least one costimulatory domain. In some embodiments, the Centyrin comprises or consists of a consensus sequence of at least one fibronectin type III (FN3) domain. In some embodiments, the at least one fibronectin type III (FN3) domain is derived from a human protein. In some embodiments, the human protein is Tenascin-C. In some embodiments, the consensus sequence comprises LPAPKNLVVSEVTEDSLRLSWTAPDAAFDSFLIQYQESEKVGEAINLTVPGSERSYDL TGLKPGTEYTVSIYGVKGGHRSNPLSAEFTT (SEQ ID NO: 17514). In some embodiments, the consensus sequence comprises MLPAPKNLVVSEVTEDSLRLSWTAPDAAFDSFLIQYQESEKVGEAINLTVPGSERSYD LTGLKPGTEYTVSIYGVKGGHRSNPLSAEFTT (SEQ ID NO: 17515). In some embodiments, the consensus sequence is modified at one or more positions within (a) a A-B loop comprising or consisting of the amino acid residues TEDS (SEQ ID NO: 17516) at positions 13-16 of the consensus sequence; (b) a B-C loop comprising or consisting of the amino acid residues TAPDAAF (SEQ ID NO: 17517) at positions 22-28 of the consensus sequence; (c) a C-D loop comprising or consisting of the amino acid residues SEKVGE (SEQ ID NO: 17518) at positions 38-43 of the consensus sequence; (d) a D-E loop comprising or consisting of the amino acid residues GSER (SEQ ID NO: 17519) at positions 51-54 of the consensus sequence; (e) a E-F loop comprising or consisting of the amino acid residues GLKPG (SEQ ID NO: 17520) at positions 60-64 of the consensus sequence; (f) a F-G loop comprising or consisting of the amino acid residues KGGHRSN (SEQ ID NO: 17521) at positions 75-81 of the consensus sequence; or (g) any combination of (a)-(f). In some embodiments, the Centyrin comprises a consensus sequence of at least 5 fibronectin type III (FN3) domains. In some embodiments, the Centyrin comprises a consensus sequence of at least 10 fibronectin type III (FN3) domains. In some embodiments, the Centyrin comprises a consensus sequence of at least 15 fibronectin type III (FN3) domains. In some embodiments, the scaffold binds an antigen with at least one affinity selected from a K_{D} of less than or equal to 10⁻⁹M, less than or equal to 10⁻⁰M, less than or equal to 10⁻¹¹M, less than or equal to 10⁻¹²M, less than or equal to 10⁻¹³M, less than or equal to 10⁻¹⁴M, and less than or equal to 10⁻¹⁵M. In some embodiments, the K_{D} is determined by surface plasmon resonance.

### Inducible Promoters

[0870] In some embodiments of the compositions of the disclosure, the sequence encoding the inducible promoter of (a) comprises a sequence encoding an NFKB promoter. In some embodiments of the compositions of the disclosure, the sequence encoding the inducible promoter of (a) comprises a sequence encoding an interferon (IFN) promoter or a sequence encoding an interleukin-2 promoter. In some embodiments, the interferon (IFN) promoter is an IFNγpromoter. In some embodiments of the compositions of the disclosure, the inducible promoter is isolated or derived from the promoter of a cytokine or a chemokine. In some embodiments, the cytokine or chemokine comprises IL2, IL3, IL4, IL5, IL6, IL10, IL12, IL13, IL17A/F, IL21, IL22, IL23, transforming growth factor beta (TGFβ), colony stimulating factor 2 (GM-CSF), interferon gamma (IFNγ), Tumor necrosis factor (TNFα), LTu, perforin, Granzyme C (Gzmc), Granzyme B (Gzmb), C-C motif chemokine ligand 5 (CCL5), C-C motif chemokine ligand 4 (Cc14), C-C motif chemokine ligand 3 (Ccl3), X-C motif chemokine ligand 1 (Xcll) and LIF interleukin 6 family cytokine (Lif).

[0871] In some embodiments of the compositions of the disclosure, the inducible promoter is isolated or derived from the promoter of a gene comprising a surface protein involved in cell differentiation, activation, exhaustion and function. In some embodiments, the gene comprises CD69, CD71, CTLA4, PD-1, TIGIT, LAG3, TIM-3, GITR, MHCII, COX-2, FASL and 4-1BB.

[0872] In some embodiments of the compositions of the disclosure, the inducible promoter is isolated or derived from the promoter of a gene involved in CD metabolism and differentiation. In some embodiments of the compositions of the disclosure, the inducible promoter is isolated or derived from the promoter of Nr4a1, Nr4a3, Tnfrsf9 (4-1BB), Sema7a, Zfp3612, Gadd45b, Dusp5, Dusp6 and Neto2.

### Inducible Transgene

[0873] In some embodiments, the inducible transgene construct comprises or drives expression of a signaling component downstream of an inhibitory checkpoint signal (as provided, for example, in Tables 1 and 2), a transcription factor (as provided, for example, in Table 3), a cytokine or a cytokine receptor, a chemokine or a chemokine receptor, a cell death or apoptosis receptor/ligand (as provided, for example, in Table 4), a metabolic sensing molecule (as provided, for example, in Table 5), a protein conferring sensitivity to a cancer therapy (as provided, for example, in Table 6 or 9), and an oncogene or a tumor suppressor gene (as provided, for example, in Table 7). Exemplary cytokines, cytokine receptors, chemokines and chemokine receptors of the disclosure include, but are not limited to, the cytokines and cytokine receptors as well as chemokines and chemokine receptors provided in Table 8.

TABLE 9
Exemplary therapeutic proteins (and proteins to enhance CAR-T efficacy).

| Gene Name | Gene Description | Protein SEQ ID NO |
|---|---|---|
| A1BG | Alpha-1-B glycoprotein | SEQ ID NOS: 1-2 |
| A2M | Alpha-2-macroglobulin | SEQ ID NOS: 3-6 |
| A2ML1 | Alpha-2-macroglobulin-like 1 | SEQ ID NOS: 7-12 |
| A4GNT | Alpha-1,4-N-acetylglucosaminyltransferase | SEQ ID NO: 13 |
| AADACL2 | Arylacetamide deacetylase-like 2 | SEQ ID NOS: 14-15 |
| AANAT | Aralkylamine N-acetyltransferase | SEQ ID NOS: 16-19 |
| ABCG1 | ATP-binding cassette, sub-family G | SEQ ID NOS: 20-26 |
| | (WHITE), member 1 | |
| ABHD1 | Abhydrolase domain containing 1 | SEQ ID NOS: 27-31 |
| ABHD10 | Abhydrolase domain containing 10 | SEQ ID NOS: 32-35 |
| ABHD14A | Abhydrolase domain containing 14A | SEQ ID NOS: 36-40 |
| ABHD15 | Abhydrolase domain containing 15 | SEQ ID NO: 41 |
| ABI3BP | ABI family, member 3 (NESH) binding | SEQ ID NOS: 42-63 |
| | protein | |
| AC008641.1 | | SEQ ID NO: 73 |
| AC009133.22 | | SEQ ID NO: 76 |
| AC009491.2 | | SEQ ID NO: 77 |
| AC011513.3 | | SEQ ID NOS: 92-93 |
| AC136352.5 | | SEQ ID NO: 88 |
| AC145212.4 | MaFF-interacting protein | SEQ ID NO: 90 |
| AC233755.1 | | SEQ ID NO: 91 |
| ACACB | Acetyl-CoA carboxylase beta | SEQ ID NOS: 94-100 |
| ACAN | Aggrecan | SEQ ID NOS: 101-108 |
| ACE | Angiotensin I converting enzyme | SEQ ID NOS: 109-121 |
| ACHE | Acetylcholinesterase (Yt blood group) | SEQ ID NOS: 122-134 |
| ACP2 | Acid phosphatase 2, lysosomal | SEQ ID NOS: 135-142 |
| ACP5 | Acid phosphatase 5, tartrate resistant | SEQ ID NOS: 143-151 |
| ACP6 | Acid phosphatase 6, lysophosphatidic | SEQ ID NOS: 152-158 |
| ACPP | Acid phosphatase, prostate | SEQ ID NOS: 163-167 |
| ACR | Acrosin | SEQ ID NOS: 168-169 |
| ACRBP | Acrosin binding protein | SEQ ID NOS: 170-174 |
| ACRV1 | Acrosomal vesicle protein 1 | SEQ ID NOS: 175-178 |
| ACSF2 | Acyl-CoA synthetase family member 2 | SEQ ID NOS: 179-187 |
| ACTL10 | Actin-like 10 | SEQ ID NO: 188 |
| ACVR1 | Activin A receptor, type I | SEQ ID NOS: 189-197 |
| ACVR1C | Activin A receptor, type IC | SEQ ID NOS: 198-201 |
| ACVRL1 | Activin A receptor type II-like 1 | SEQ ID NOS: 202-207 |
| ACYP1 | Acylphosphatase 1, erythrocyte (common) | SEQ ID NOS: 208-213 |
| | type | |
| ACYP2 | Acylphosphatase 2, muscle type | SEQ ID NOS: 214-221 |
| ADAM10 | ADAM metallopeptidase domain 10 | SEQ ID NOS: 230-237 |
| ADAM12 | ADAM metallopeptidase domain 12 | SEQ ID NOS: 238-240 |
| ADAM15 | ADAM metallopeptidase domain 15 | SEQ ID NOS: 241-252 |
| ADAM17 | ADAM metallopeptidase domain 17 | SEQ ID NOS: 253-255 |
| ADAM18 | ADAM metallopeptidase domain 18 | SEQ ID NOS: 256-260 |
| ADAM22 | ADAM metallopeptidase domain 22 | SEQ ID NOS: 261-269 |
| ADAM28 | ADAM metallopeptidase domain 28 | SEQ ID NOS: 270-275 |
| ADAM29 | ADAM metallopeptidase domain 29 | SEQ ID NOS: 276-284 |
| ADAM32 | ADAM metallopeptidase domain 32 | SEQ ID NOS: 285-291 |
| ADAM33 | ADAM metallopeptidase domain 33 | SEQ ID NOS: 292-296 |
| ADAM7 | ADAM metallopeptidase domain 7 | SEQ ID NOS: 297-300 |
| ADAM8 | ADAM metallopeptidase domain 8 | SEQ ID NOS: 301-305 |
| ADAM9 | ADAM metallopeptidase domain 9 | SEQ ID NOS: 306-311 |
| ADAMDEC1 | ADAM-like, decysin 1 | SEQ ID NOS: 312-314 |
| ADAMTS1 | ADAM metallopeptidase with | SEQ ID NOS: 315-318 |
| | thrombospondin type 1 motif, 1 | |
| ADAMTS10 | ADAM metallopeptidase with | SEQ ID NOS: 319-324 |
| | thrombospondin type 1 motif, 10 | |
| ADAMTS12 | ADAM metallopeptidase with | SEQ ID NOS: 325-327 |
| | thrombospondin type 1 motif, 12 | |
| ADAMTS13 | ADAM metallopeptidase with | SEQ ID NOS: 328-335 |
| | thrombospondin type 1 motif, 13 | |
| ADAMTS14 | ADAM metallopeptidase with | SEQ ID NOS: 336-337 |
| | thrombospondin type 1 motif, 14 | |
| ADAMTS15 | ADAM metallopeptidase with | SEQ ID NO: 338 |
| | thrombospondin type 1 motif, 15 | |
| ADAMTS16 | ADAM metallopeptidase with | SEQ ID NOS: 339-340 |
| | thrombospondin type 1 motif, 16 | |
| ADAMTS17 | ADAM metallopeptidase with | SEQ ID NOS: 341-344 |
| | thrombospondin type 1 motif, 17 | |
| ADAMTS18 | ADAM metallopeptidase with | SEQ ID NOS: 345-348 |
| | thrombospondin type 1 motif, 18 | |
| ADAMTS19 | ADAM metallopeptidase with | SEQ ID NOS: 349-352 |
| | thrombospondin type 1 motif, 19 | |
| ADAMTS2 | ADAM metallopeptidase with | SEQ ID NOS: 353-355 |
| | thrombospondin type 1 motif, 2 | |
| ADAMTS20 | ADAM metallopeptidase with | SEQ ID NOS: 356-359 |
| | thrombospondin type 1 motif, 20 | |
| ADAMTS3 | ADAM metallopeptidase with | SEQ ID NOS: 360-361 |
| | thrombospondin type 1 motif, 3 | |
| ADAMTS5 | ADAM metallopeptidase with | SEQ ID NO: 362 |
| | thrombospondin type 1 motif, 5 | |
| ADAMTS6 | ADAM metallopeptidase with | SEQ ID NOS: 363-364 |
| | thrombospondin type 1 motif, 6 | |
| ADAMTS7 | ADAM metallopeptidase with | SEQ ID NO: 365 |
| | thrombospondin type 1 motif, 7 | |
| ADAMTS8 | ADAM metallopeptidase with | SEQ ID NO: 366 |
| | thrombospondin type 1 motif, 8 | |
| ADAMTS9 | ADAM metallopeptidase with | SEQ ID NOS: 367-371 |
| | thrombospondin type 1 motif, 9 | |
| ADAMTSL1 | ADAMTS-like 1 | SEQ ID NOS: 372-382 |
| ADAMTSL2 | ADAMTS-like 2 | SEQ ID NOS: 383-385 |
| ADAMTSL3 | ADAMTS-like 3 | SEQ ID NOS: 386-387 |
| ADAMTSL4 | ADAMTS-like 4 | SEQ ID NOS: 388-391 |
| ADAMTSL5 | ADAMTS-like 5 | SEQ ID NOS: 392-397 |
| ADCK1 | AarF domain containing kinase 1 | SEQ ID NOS: 398-402 |
| ADCYAP1 | Adenylate cyclase activating polypeptide 1 | SEQ ID NOS: 403-404 |
| | (pituitary) | |
| ADCYAP1R1 | Adenylate cyclase activating polypeptide 1 | SEQ ID NOS: 405-411 |
| | (pituitary) receptor type I | |
| ADGRA3 | Adhesion G protein-coupled receptor A3 | SEQ ID NOS: 412-416 |
| ADGRB2 | Adhesion G protein-coupled receptor B2 | SEQ ID NOS: 417-425 |
| ADGRD1 | Adhesion G protein-coupled receptor D1 | SEQ ID NOS: 426-431 |
| ADGRE3 | Adhesion G protein-coupled receptor E3 | SEQ ID NOS: 432-436 |
| ADGRE5 | Adhesion G protein-coupled receptor E5 | SEQ ID NOS: 437-442 |
| ADGRF1 | Adhesion G protein-coupled receptor F1 | SEQ ID NOS: 443-447 |
| ADGRG1 | Adhesion G protein-coupled receptor G1 | SEQ ID NOS: 448-512 |
| ADGRG5 | Adhesion G protein-coupled receptor G5 | SEQ ID NOS: 513-515 |
| ADGRG6 | Adhesion G protein-coupled receptor G6 | SEQ ID NOS: 516-523 |
| ADGRV1 | Adhesion G protein-coupled receptor V1 | SEQ ID NOS: 524-540 |
| ADI1 | Acireductone dioxygenase 1 | SEQ ID NOS: 541-543 |
| ADIG | Adipogenin | SEQ ID NOS: 544-547 |
| ADIPOQ | Adiponectin, C1Q and collagen domain | SEQ ID NOS: 548-549 |
| | containing | |
| ADM | Adrenomedullin | SEQ ID NOS: 550-557 |
| ADM2 | Adrenomedullin 2 | SEQ ID NOS: 558-559 |
| ADM5 | Adrenomedullin 5 (putative) | SEQ ID NO: 560 |
| ADPGK | ADP-dependent glucokinase | SEQ ID NOS: 561-570 |
| ADPRHL2 | ADP-ribosylhydrolase like 2 | SEQ ID NO: 571 |
| AEBP1 | AE binding protein 1 | SEQ ID NOS: 572-579 |
| AFM | Afamin | SEQ ID NO: 584 |
| AFP | Alpha-fetoprotein | SEQ ID NOS: 585-586 |
| AGA | Aspartylglucosaminidase | SEQ ID NOS: 587-589 |
| AGER | Advanced glycosylation end product- | SEQ ID NOS: 590-600 |
| | specific receptor | |
| AGK | Acylglycerol kinase | SEQ ID NOS: 601-606 |
| AGPS | Alkylglycerone phosphate synthase | SEQ ID NOS: 607-610 |
| AGR2 | Anterior gradient 2, protein disulphide | SEQ ID NOS: 611-614 |
| | isomerase family member | |
| AGR3 | Anterior gradient 3, protein disulphide | SEQ ID NOS: 615-617 |
| | isomerase family member | |
| AGRN | Agrin | SEQ ID NOS: 618-621 |
| AGRP | Agouti related neuropeptide | SEQ ID NO: 622 |
| AGT | Angiotensinogen (serpin peptidase inhibitor, | SEQ ID NO: 623 |
| | clade A, member 8) | |
| AGTPBP1 | ATP/GTP binding protein 1 | SEQ ID NOS: 624-627 |
| AGTRAP | Angiotensin II receptor-associated protein | SEQ ID NOS: 628-635 |
| AHCYL2 | Adenosylhomocysteinase-like 2 | SEQ ID NOS: 636-642 |
| AHSG | Alpha-2-HS-glycoprotein | SEQ ID NOS: 643-644 |
| AIG1 | Androgen-induced 1 | SEQ ID NOS: 645-653 |
| AK4 | Adenylate kinase 4 | SEQ ID NOS: 654-657 |
| AKAP10 | A kinase (PRKA) anchor protein 10 | SEQ ID NOS: 658-666 |
| AKR1C1 | Aldo-keto reductase family 1, member C1 | SEQ ID NOS: 667-669 |
| AL356289.1 | | SEQ ID NO: 677 |
| AL589743.1 | | SEQ ID NO: 678 |
| ALAS2 | 5′-aminolevulinate synthase 2 | SEQ ID NOS: 684-691 |
| ALB | Albumin | SEQ ID NOS: 692-701 |
| ALDH9A1 | Aldehyde dehydrogenase 9 family, member | SEQ ID NO: 702 |
| | A1 | |
| ALDOA | Aldolase A, fructose-bisphosphate | SEQ ID NOS: 703-717 |
| ALG1 | ALG1, chitobiosyldiphosphodolichol beta- | SEQ ID NOS: 718-723 |
| | mannosyltransferase | |
| ALG5 | ALG5, dolichyl-phosphate beta- | SEQ ID NOS: 724-725 |
| | glucosyltransferase | |
| ALG9 | ALG9, alpha-1,2-mannosyltransferase | SEQ ID NOS: 726-736 |
| ALKBH1 | AlkB homolog 1, histone H2A dioxygenase | SEQ ID NOS: 746-748 |
| ALKBH5 | AlkB homolog 5, RNA demethylase | SEQ ID NOS: 749-750 |
| ALPI | Alkaline phosphatase, intestinal | SEQ ID NOS: 751-752 |
| ALPL | Alkaline phosphatase, liver/bone/kidney | SEQ ID NOS: 753-757 |
| ALPP | Alkaline phosphatase, placental | SEQ ID NO: 758 |
| ALPPL2 | Alkaline phosphatase, placental-like 2 | SEQ ID NO: 759 |
| AMBN | Ameloblastin (enamel matrix protein) | SEQ ID NOS: 760-762 |
| AMBP | Alpha-1-microglobulin/bikunin precursor | SEQ ID NOS: 763-765 |
| AMELX | Amelogenin, X-linked | SEQ ID NOS: 766-768 |
| AMELY | Amelogenin, Y-linked | SEQ ID NOS: 769-770 |
| AMH | Anti-Mullerian hormone | SEQ ID NO: 771 |
| AMICA1 | Adhesion molecule, interacts with CXADR | SEQ ID NOS: 7348- |
| | antigen 1 | 7356 |
| AMPD1 | Adenosine monophosphate deaminase 1 | SEQ ID NOS: 772-774 |
| AMTN | Amelotin | SEQ ID NOS: 775-776 |
| AMY1A | Amylase, alpha 1A (salivary) | SEQ ID NOS: 777-779 |
| AMY1B | Amylase, alpha 1B (salivary) | SEQ ID NOS: 780-783 |
| AMY1C | Amylase, alpha 1C (salivary) | SEQ ID NO: 784 |
| AMY2A | Amylase, alpha 2A (pancreatic) | SEQ ID NOS: 785-787 |
| AMY2B | Amylase, alpha 2B (pancreatic) | SEQ ID NOS: 788-792 |
| ANG | Angiogenin, ribonuclease, RNase A family, | SEQ ID NOS: 793-794 |
| | 5 | |
| ANGEL1 | Angel homolog 1 (Drosophila) | SEQ ID NOS: 795-798 |
| ANGPT1 | Angiopoietin 1 | SEQ ID NOS: 799-803 |
| ANGPT2 | Angiopoietin 2 | SEQ ID NOS: 804-807 |
| ANGPT4 | Angiopoietin 4 | SEQ ID NO: 808 |
| ANGPTL1 | Angiopoietin-like 1 | SEQ ID NOS: 809-811 |
| ANGPTL2 | Angiopoietin-like 2 | SEQ ID NOS: 812-813 |
| ANGPTL3 | Angiopoietin-like 3 | SEQ ID NO: 814 |
| ANGPTL4 | Angiopoietin-like 4 | SEQ ID NOS: 815-822 |
| ANGPTL5 | Angiopoietin-like 5 | SEQ ID NOS: 823-824 |
| ANGPTL6 | Angiopoietin-like 6 | SEQ ID NOS: 825-827 |
| ANGPTL7 | Angiopoietin-like 7 | SEQ ID NO: 828 |
| ANK1 | Ankyrin 1, erythrocytic | SEQ ID NOS: 833-843 |
| ANKDD1A | Ankyrin repeat and death domain containing | SEQ ID NOS: 844-850 |
| | 1A | |
| ANKRD54 | Ankyrin repeat domain 54 | SEQ ID NOS: 851-859 |
| ANKRD60 | Ankyrin repeat domain 60 | SEQ ID NO: 860 |
| ANO7 | Anoctamin 7 | SEQ ID NOS: 861-864 |
| ANO1 | #N/A | SEQ ID NO: 865 |
| ANTXR1 | Anthrax toxin receptor 1 | SEQ ID NOS: 866-869 |
| AOAH | Acyloxyacyl hydrolase (neutrophil) | SEQ ID NOS: 870-874 |
| AOC1 | Amine oxidase, copper containing 1 | SEQ ID NOS: 875-880 |
| AOC2 | Amine oxidase, copper containing 2 (retina- | SEQ ID NOS: 881-882 |
| | specific) | |
| AOC3 | Amine oxidase, copper containing 3 | SEQ ID NOS: 883-889 |
| AP000721.4 | | SEQ ID NO: 890 |
| APBB1 | Amyloid beta (A4) precursor protein- | SEQ ID NOS: 891-907 |
| | binding, family B, member 1 (Fe65) | |
| APCDD1 | Adenomatosis polyposis coli down- | SEQ ID NOS: 908-913 |
| | regulated 1 | |
| APCS | Amyloid P component, serum | SEQ ID NO: 914 |
| APELA | Apelin receptor early endogenous ligand | SEQ ID NOS: 915-917 |
| APLN | Apelin | SEQ ID NO: 918 |
| APLP2 | Amyloid beta (A4) precursor-like protein 2 | SEQ ID NOS: 919-928 |
| APOA1 | Apolipoprotein A-I | SEQ ID NOS: 929-933 |
| APOA1BP | Apolipoprotein A-I binding protein | SEQ ID NOS: 9177- |
| | | 9179 |
| APOA2 | Apolipoprotein A-II | SEQ ID NOS: 934-942 |
| APOA4 | Apolipoprotein A-IV | SEQ ID NO: 943 |
| APOA5 | Apolipoprotein A-V | SEQ ID NOS: 944-946 |
| APOB | Apolipoprotein B | SEQ ID NOS: 947-948 |
| APOC1 | Apolipoprotein C-I | SEQ ID NOS: 949-957 |
| APOC2 | Apolipoprotein C-II | SEQ ID NOS: 958-962 |
| APOC3 | Apolipoprotein C-III | SEQ ID NOS: 963-966 |
| APOC4 | Apolipoprotein C-IV | SEQ ID NOS: 967-968 |
| APOC4- | APOC4-APOC2 readthrough (NMD | SEQ ID NOS: 969-970 |
| APOC2 | candidate) | |
| APOD | Apolipoprotein D | SEQ ID NOS: 971-974 |
| APOE | Apolipoprotein E | SEQ ID NOS: 975-978 |
| APOF | Apolipoprotein F | SEQ ID NO: 979 |
| APOH | Apolipoprotein H (beta-2-glycoprotein I) | SEQ ID NOS: 980-983 |
| APOL1 | Apolipoprotein L, 1 | SEQ ID NOS: 984-994 |
| APOL3 | Apolipoprotein L, 3 | SEQ ID NOS: 995-1009 |
| APOM | Apolipoprotein M | SEQ ID NOS: 1010- |
| | | 1012 |
| APOOL | Apolipoprotein O-like | SEQ ID NOS: 1013- |
| | | 1015 |
| ARCN1 | Archain 1 | SEQ ID NOS: 1016- |
| | | 1020 |
| ARFIP2 | ADP-ribosylation factor interacting protein | SEQ ID NOS: 1021- |
| | 2 | 1027 |
| ARHGAP36 | Rho GTPase activating protein 36 | SEQ ID NOS: 1028- |
| | | 1033 |
| ARHGAP6 | Rho GTPase activating protein 6 | SEQ ID NOS: 1043- |
| | | 1048 |
| ARHGEF4 | Rho guanine nucleotide exchange factor | SEQ ID NOS: 1049- |
| | (GEF) 4 | 1059 |
| ARL16 | ADP-ribosylation factor-like 16 | SEQ ID NOS: 1060- |
| | | 1068 |
| ARMC5 | Armadillo repeat containing 5 | SEQ ID NOS: 1069- |
| | | 1075 |
| ARNTL | Aryl hydrocarbon receptor nuclear | SEQ ID NOS: 1076- |
| | translocator-like | 1090 |
| ARSA | Arylsulfatase A | SEQ ID NOS: 1091- |
| | | 1096 |
| ARSB | Arylsulfatase B | SEQ ID NOS: 1097- |
| | | 1100 |
| ARSE | Arylsulfatase E (chondrodysplasia punctata | SEQ ID NOS: 1101- |
| | 1) | 1104 |
| ARSG | Arylsulfatase G | SEQ ID NOS: 1105- |
| | | 1108 |
| ARSI | Arylsulfatase family, member I | SEQ ID NOS: 1109- |
| | | 1111 |
| ARSK | Arylsulfatase family, member K | SEQ ID NOS: 1112- |
| | | 1116 |
| ART3 | ADP-ribosyltransferase 3 | SEQ ID NOS: 1117- |
| | | 1124 |
| ART4 | ADP-ribosyltransferase 4 (Dombrock blood | SEQ ID NOS: 1125- |
| | group) | 1128 |
| ART5 | ADP-ribosyltransferase 5 | SEQ ID NOS: 1129- |
| | | 1133 |
| ARTN | Artemin | SEQ ID NOS: 1134- |
| | | 1144 |
| ASAH1 | N-acylsphingosine amidohydrolase (acid | SEQ ID NOS: 1145- |
| | ceramidase) 1 | 1195 |
| ASAH2 | N-acylsphingosine amidohydrolase (non- | SEQ ID NOS: 1196- |
| | lysosomal ceramidase) 2 | 1201 |
| ASCL1 | Achaete-scute family bHLH transcription | SEQ ID NO: 1202 |
| | factor 1 | |
| ASIP | Agouti signaling protein | SEQ ID NOS: 1203- |
| | | 1204 |
| ASPN | Asporin | SEQ ID NOS: 1205- |
| | | 1206 |
| ASTL | Astacin-like metallo-endopeptidase (M12 | SEQ ID NO: 1207 |
| | family) | |
| ATAD5 | ATPase family, AAA domain containing 5 | SEQ ID NOS: 1208- |
| | | 1209 |
| ATAT1 | Alpha tubulin acetyltransferase 1 | SEQ ID NOS: 1210- |
| | | 1215 |
| ATG2A | Autophagy related 2A | SEQ ID NOS: 1216- |
| | | 1218 |
| ATG5 | Autophagy related 5 | SEQ ID NOS: 1219- |
| | | 1227 |
| ATMIN | ATM interactor | SEQ ID NOS: 1228- |
| | | 1231 |
| ATP13A1 | ATPase type 13A1 | SEQ ID NOS: 1232- |
| | | 1234 |
| ATP5F1 | ATP synthase, H+ transporting, | SEQ ID NOS: 1235- |
| | mitochondrial Fo complex, subunit B1 | 1236 |
| ATP6AP1 | ATPase, H+ transporting, lysosomal | SEQ ID NOS: 1237- |
| | accessory protein 1 | 1244 |
| ATP6AP2 | ATPase, H+ transporting, lysosomal | SEQ ID NOS: 1245- |
| | accessory protein 2 | 1267 |
| ATPAF1 | ATP synthase mitochondrial F1 complex | SEQ ID NOS: 1268- |
| | assembly factor 1 | 1278 |
| AUH | AU RNA binding protein/enoyl-CoA | SEQ ID NOS: 1279- |
| | hydratase | 1280 |
| AVP | Arginine vasopressin | SEQ ID NO: 1281 |
| AXIN2 | Axin 2 | SEQ ID NOS: 1282- |
| | | 1289 |
| AZGP1 | Alpha-2-glycoprotein 1, zinc-binding | SEQ ID NOS: 1290- |
| | | 1292 |
| AZU1 | Azurocidin 1 | SEQ ID NOS: 1293- |
| | | 1294 |
| B2M | Beta-2-microglobulin | SEQ ID NOS: 1295- |
| | | 1301 |
| B3GALNT1 | Beta-1,3-N-acetylgalactosaminyltransferase | SEQ ID NOS: 1302- |
| | 1 (globoside blood group) | 1314 |
| B3GALNT2 | Beta-1,3-N-acetylgalactosaminyltransferase | SEQ ID NOS: 1315- |
| | 2 | 1317 |
| B3GALT1 | UDP-Gal:betaGlcNAc beta 1,3- | SEQ ID NO: 1318 |
| | galactosyltransferase, polypeptide 1 | |
| B3GALT4 | UDP-Gal:betaGlcNAc beta 1,3- | SEQ ID NO: 1319 |
| | galactosyltransferase, polypeptide 4 | |
| B3GALT5 | UDP-Gal:betaGlcNAc beta 1,3- | SEQ ID NOS: 1320- |
| | galactosyltransferase, polypeptide 5 | 1324 |
| B3GALT6 | UDP-Gal:betaGal beta 1,3- | SEQ ID NO: 1325 |
| | galactosyltransferase polypeptide 6 | |
| B3GAT3 | Beta-1,3-glucuronyltransferase 3 | SEQ ID NOS: 1326- |
| | | 1330 |
| B3GLCT | Beta 3-glucosyltransferase | SEQ ID NO: 1331 |
| B3GNT3 | UDP-GlcNAc:betaGal beta-1,3-N- | SEQ ID NOS: 1332- |
| | acetylglucosaminyltransferase 3 | 1335 |
| B3GNT4 | UDP-GlcNAc:betaGal beta-1,3-N- | SEQ ID NOS: 1336- |
| | acetylglucosaminyltransferase 4 | 1339 |
| B3GNT6 | UDP-GlcNAc:betaGal beta-1,3-N- | SEQ ID NOS: 1340- |
| | acetylglucosaminyltransferase 6 | 1341 |
| B3GNT7 | UDP-GlcNAc:betaGal beta-1,3-N- | SEQ ID NO: 1342 |
| | acetylglucosaminyltransferase 7 | |
| B3GNT8 | UDP-GlcNAc:betaGal beta-1,3-N- | SEQ ID NO: 1343 |
| | acetylglucosaminyltransferase 8 | |
| B3GNT9 | UDP-GlcNAc:betaGal beta-1,3-N- | SEQ ID NO: 1344 |
| | acetylglucosaminyltransferase 9 | |
| B4GALNT1 | Beta-1,4-N-acetyl-galactosaminyl | SEQ ID NOS: 1345- |
| | transferase 1 | 1356 |
| B4GALNT3 | Beta-1,4-N-acetyl-galactosaminyl | SEQ ID NOS: 1357- |
| | transferase 3 | 1358 |
| B4GALNT4 | Beta-1,4-N-acetyl-galactosaminyl | SEQ ID NOS: 1359- |
| | transferase 4 | 1361 |
| B4GALT4 | UDP-Gal:betaGlcNAc beta 1,4- | SEQ ID NOS: 1362- |
| | galactosyltransferase, polypeptide 4 | 1374 |
| B4GALT5 | UDP-Gal:betaGlcNAc beta 1,4- | SEQ ID NO: 1375 |
| | galactosyltransferase, polypeptide 5 | |
| B4GALT6 | UDP-Gal:betaGlcNAc beta 1,4- | SEQ ID NOS: 1376- |
| | galactosyltransferase, polypeptide 6 | 1379 |
| B4GAT1 | Beta-1,4-glucuronyltransferase 1 | SEQ ID NO: 1380 |
| B9D1 | B9 protein domain 1 | SEQ ID NOS: 1381- |
| | | 1397 |
| BACE2 | Beta-site APP-cleaving enzyme 2 | SEQ ID NOS: 1398- |
| | | 1400 |
| BAGE5 | B melanoma antigen family, member 5 | SEQ ID NO: 1401 |
| BCAM | Basal cell adhesion molecule (Lutheran | SEQ ID NOS: 1402- |
| | blood group) | 1405 |
| BCAN | Brevican | SEQ ID NOS: 1406- |
| | | 1412 |
| BCAP29 | B-cell receptor-associated protein 29 | SEQ ID NOS: 1413- |
| | | 1425 |
| BCAR1 | Breast cancer anti-estrogen resistance 1 | SEQ ID NOS: 1426- |
| | | 1443 |
| BCHE | Butyrylcholinesterase | SEQ ID NOS: 1444- |
| | | 1448 |
| BCKDHB | Branched chain keto acid dehydrogenase | SEQ ID NOS: 1449- |
| | E1, beta polypeptide | 1451 |
| BDNF | Brain-derived neurotrophic factor | SEQ ID NOS: 1452- |
| | | 1469 |
| BGLAP | Bone gamma-carboxyglutamate (gla) | SEQ ID NO: 1470 |
| | protein | |
| BGN | Biglycan | SEQ ID NOS: 1471- |
| | | 1472 |
| BLVRB | Biliverdin reductase B | SEQ ID NOS: 1473- |
| | | 1477 |
| BMP1 | Bone morphogenetic protein 1 | SEQ ID NOS: 1478- |
| | | 1489 |
| BMP10 | Bone morphogenetic protein 10 | SEQ ID NO: 1490 |
| BMP15 | Bone morphogenetic protein 15 | SEQ ID NO: 1491 |
| BMP2 | Bone morphogenetic protein 2 | SEQ ID NO: 1492 |
| BMP3 | Bone morphogenetic protein 3 | SEQ ID NO: 1493 |
| BMP4 | Bone morphogenetic protein 4 | SEQ ID NOS: 1494- |
| | | 1501 |
| BMP6 | Bone morphogenetic protein 6 | SEQ ID NO: 1502 |
| BMP7 | Bone morphogenetic protein 7 | SEQ ID NOS: 1503- |
| | | 1506 |
| BMP8A | Bone morphogenetic protein 8a | SEQ ID NO: 1507 |
| BMP8B | Bone morphogenetic protein 8b | SEQ ID NO: 1508 |
| BMPER | BMP binding endothelial regulator | SEQ ID NOS: 1509- |
| | | 1512 |
| BNC1 | Basonuclin 1 | SEQ ID NOS: 1513- |
| | | 1514 |
| BOC | BOC cell adhesion associated, oncogene | SEQ ID NOS: 1515- |
| | regulated | 1525 |
| BOD1 | Biorientation of chromosomes in cell | SEQ ID NOS: 1526- |
| | division 1 | 1530 |
| BOLA1 | BolA family member 1 | SEQ ID NOS: 1531- |
| | | 1533 |
| BPI | Bactericidal/permeability-increasing protein | SEQ ID NOS: 1534- |
| | | 1537 |
| BPIFA1 | BPI fold containing family A, member 1 | SEQ ID NOS: 1538- |
| | | 1541 |
| BPIFA2 | BPI fold containing family A, member 2 | SEQ ID NOS: 1542- |
| | | 1543 |
| BPIFA3 | BPI fold containing family A, member 3 | SEQ ID NOS: 1544- |
| | | 1545 |
| BPIFB1 | BPI fold containing family B, member 1 | SEQ ID NOS: 1546- |
| | | 1547 |
| BPIFB2 | BPI fold containing family B, member 2 | SEQ ID NO: 1548 |
| BPIFB3 | BPI fold containing family B, member 3 | SEQ ID NO: 1549 |
| BPIFB4 | BPI fold containing family B, member 4 | SEQ ID NOS: 1550- |
| | | 1551 |
| BPIFB6 | BPI fold containing family B, member 6 | SEQ ID NOS: 1552- |
| | | 1553 |
| BPIFC | BPI fold containing family C | SEQ ID NOS: 1554- |
| | | 1557 |
| BRF1 | BRF1, RNA polymerase III transcription | SEQ ID NOS: 1558- |
| | initiation factor 90 kDa subunit | 1573 |
| BRINP1 | Bone morphogenetic protein/retinoic acid | SEQ ID NOS: 1574- |
| | inducible neural-specific 1 | 1575 |
| BRINP2 | Bone morphogenetic protein/retinoic acid | SEQ ID NO: 1576 |
| | inducible neural-specific 2 | |
| BRINP3 | Bone morphogenetic protein/retinoic acid | SEQ ID NOS: 1577- |
| | inducible neural-specific 3 | 1579 |
| BSG | Basigin (Ok blood group) | SEQ ID NOS: 1580- |
| | | 1590 |
| BSPH1 | Binder of sperm protein homolog 1 | SEQ ID NO: 1591 |
| BST1 | Bone marrow stromal cell antigen 1 | SEQ ID NOS: 1592- |
| | | 1596 |
| BTBD17 | BTB (POZ) domain containing 17 | SEQ ID NO: 1597 |
| BTD | Biotinidase | SEQ ID NOS: 1598- |
| | | 1607 |
| BTN2A2 | Butyrophilin, subfamily 2, member A2 | SEQ ID NOS: 1608- |
| | | 1621 |
| BTN3A1 | Butyrophilin, subfamily 3, member A1 | SEQ ID NOS: 1622- |
| | | 1628 |
| BTN3A2 | Butyrophilin, subfamily 3, member A2 | SEQ ID NOS: 1629- |
| | | 1639 |
| BTN3A3 | Butyrophilin, subfamily 3, member A3 | SEQ ID NOS: 1640- |
| | | 1648 |
| C10orf10 | Chromosome 10 open reading frame 10 | SEQ ID NOS: 4169- |
| | | 4170 |
| C10orf99 | Chromosome 10 open reading frame 99 | SEQ ID NO: 1650 |
| C11orf1 | Chromosome 11 open reading frame 1 | SEQ ID NOS: 1651- |
| | | 1655 |
| C11orf24 | Chromosome 11 open reading frame 24 | SEQ ID NOS: 1656- |
| | | 1658 |
| C11orf45 | Chromosome 11 open reading frame 45 | SEQ ID NOS: 1659- |
| | | 1660 |
| C11orf94 | Chromosome 11 open reading frame 94 | SEQ ID NO: 1661 |
| C12orf10 | Chromosome 12 open reading frame 10 | SEQ ID NOS: 1662- |
| | | 1665 |
| C12orf49 | Chromosome 12 open reading frame 49 | SEQ ID NOS: 1666- |
| | | 1669 |
| C12orf73 | Chromosome 12 open reading frame 73 | SEQ ID NOS: 1670- |
| | | 1679 |
| C12orf76 | Chromosome 12 open reading frame 76 | SEQ ID NOS: 1680- |
| | | 1687 |
| C14orf80 | Chromosome 14 open reading frame 80 | SEQ ID NOS: 13083- |
| | | 13096 |
| C14orf93 | Chromosome 14 open reading frame 93 | SEQ ID NOS: 1688- |
| | | 1703 |
| C16orf89 | Chromosome 16 open reading frame 89 | SEQ ID NOS: 1704- |
| | | 1706 |
| C16orf90 | Chromosome 16 open reading frame 90 | SEQ ID NOS: 1707- |
| | | 1708 |
| C17orf67 | Chromosome 17 open reading frame 67 | SEQ ID NO: 1709 |
| C17orf75 | Chromosome 17 open reading frame 75 | SEQ ID NOS: 1710- |
| | | 1718 |
| C17orf99 | Chromosome 17 open reading frame 99 | SEQ ID NOS: 1719- |
| | | 1721 |
| C18orf54 | Chromosome 18 open reading frame 54 | SEQ ID NOS: 1722- |
| | | 1726 |
| C19orf47 | Chromosome 19 open reading frame 47 | SEQ ID NOS: 1727- |
| | | 1734 |
| C19orf70 | Chromosome 19 open reading frame 70 | SEQ ID NOS: 1735- |
| | | 1738 |
| C19orf80 | Chromosome 19 open reading frame 80 | SEQ ID NOS: 829-832 |
| C1GALT1 | Core 1 synthase, glycoprotein-N- | SEQ ID NOS: 1739- |
| | acetylgalactosamine 3-beta- | 1743 |
| | galactosyltransferase 1 | |
| C1orf127 | Chromosome 1 open reading frame 127 | SEQ ID NOS: 1744- |
| | | 1747 |
| C1orf159 | Chromosome 1 open reading frame 159 | SEQ ID NOS: 1748- |
| | | 1760 |
| C1orf198 | Chromosome 1 open reading frame 198 | SEQ ID NOS: 1761- |
| | | 1765 |
| C1orf234 | Chromosome 1 open reading frame 234 | SEQ ID NOS: 13118- |
| | | 13120 |
| C1orf54 | Chromosome 1 open reading frame 54 | SEQ ID NOS: 1766- |
| | | 1768 |
| C1orf56 | Chromosome 1 open reading frame 56 | SEQ ID NO: 1769 |
| C1QA | Complement component 1, q | SEQ ID NOS: 1770- |
| | subcomponent, A chain | 1772 |
| C1QB | Complement component 1, q | SEQ ID NOS: 1773- |
| | subcomponent, B chain | 1776 |
| C1QC | Complement component 1, q | SEQ ID NOS: 1777- |
| | subcomponent, C chain | 1779 |
| C1QL1 | Complement component 1, q | SEQ ID NO: 1780 |
| | subcomponent-like 1 | |
| C1QL2 | Complement component 1, q | SEQ ID NO: 1781 |
| | subcomponent-like 2 | |
| C1QL3 | Complement component 1, q | SEQ ID NOS: 1782- |
| | subcomponent-like 3 | 1783 |
| C1QL4 | Complement component 1, q | SEQ ID NO: 1784 |
| | subcomponent-like 4 | |
| C1QTNF1 | C1q and tumor necrosis factor related | SEQ ID NOS: 1785- |
| | protein 1 | 1794 |
| C1QTNF2 | C1q and tumor necrosis factor related | SEQ ID NO: 1796 |
| | protein 2 | |
| C1QTNF3 | C1q and tumor necrosis factor related | SEQ ID NOS: 1797- |
| | protein 3 | 1798 |
| C1QTNF4 | C1q and tumor necrosis factor related | SEQ ID NOS: 1799- |
| | protein 4 | 1800 |
| C1QTNF5 | C1q and tumor necrosis factor related | SEQ ID NOS: 1801- |
| | protein 5 | 1803 |
| C1QTNF7 | C1q and tumor necrosis factor related | SEQ ID NOS: 1804- |
| | protein 7 | 1808 |
| C1QTNF8 | C1q and tumor necrosis factor related | SEQ ID NOS: 1809- |
| | protein 8 | 1810 |
| C1QTNF9 | C1q and tumor necrosis factor related | SEQ ID NOS: 1811- |
| | protein 9 | 1812 |
| C1QTNF9B | C1q and tumor necrosis factor related | SEQ ID NOS: 1813- |
| | protein 9B | 1815 |
| C1R | Complement component 1, r subcomponent | SEQ ID NOS: 1816- |
| | | 1824 |
| C1RL | Complement component 1, r subcomponent- | SEQ ID NOS: 1825- |
| | like | 1833 |
| C1S | Complement component 1, s subcomponent | SEQ ID NOS: 1834- |
| | | 1843 |
| C2 | Complement component 2 | SEQ ID NOS: 1844- |
| | | 1858 |
| C21orf33 | Chromosome 21 open reading frame 33 | SEQ ID NOS: 1859- |
| | | 1867 |
| C21orf62 | Chromosome 21 open reading frame 62 | SEQ ID NOS: 1868- |
| | | 1871 |
| C22orf15 | Chromosome 22 open reading frame 15 | SEQ ID NOS: 1872- |
| | | 1874 |
| C22orf46 | Chromosome 22 open reading frame 46 | SEQ ID NO: 1875 |
| C2CD2 | C2 calcium-dependent domain containing 2 | SEQ ID NOS: 1876- |
| | | 1878 |
| C2orf40 | Chromosome 2 open reading frame 40 | SEQ ID NOS: 1879- |
| | | 1881 |
| C2orf66 | Chromosome 2 open reading frame 66 | SEQ ID NO: 1882 |
| C2orf69 | Chromosome 2 open reading frame 69 | SEQ ID NO: 1883 |
| C2orf78 | Chromosome 2 open reading frame 78 | SEQ ID NO: 1884 |
| C3 | Complement component 3 | SEQ ID NOS: 1885- |
| | | 1889 |
| C3orf33 | Chromosome 3 open reading frame 33 | SEQ ID NOS: 1890- |
| | | 1894 |
| C3orf58 | Chromosome 3 open reading frame 58 | SEQ ID NOS: 1895- |
| | | 1898 |
| C4A | Complement component 4A (Rodgers blood | SEQ ID NOS: 1899- |
| | group) | 1900 |
| C4B | Complement component 4B (Chido blood | SEQ ID NOS: 1901- |
| | group) | 1902 |
| C4BPA | Complement component 4 binding protein, | SEQ ID NOS: 1903- |
| | alpha | 1905 |
| C4BPB | Complement component 4 binding protein, | SEQ ID NOS: 1906- |
| | beta | 1910 |
| C4orf26 | Chromosome 4 open reading frame 26 | SEQ ID NOS: 9751- |
| | | 9754 |
| C4orf48 | Chromosome 4 open reading frame 48 | SEQ ID NOS: 1911- |
| | | 1912 |
| C5 | Complement component 5 | SEQ ID NO: 1913 |
| C5orf46 | Chromosome 5 open reading frame 46 | SEQ ID NOS: 1914- |
| | | 1915 |
| C6 | Complement component 6 | SEQ ID NOS: 1916- |
| | | 1919 |
| C6orf120 | Chromosome 6 open reading frame 120 | SEQ ID NO: 1920 |
| C6orf15 | Chromosome 6 open reading frame 15 | SEQ ID NO: 1921 |
| C6orf25 | Chromosome 6 open reading frame 25 | SEQ ID NOS: 8832- |
| | | 8839 |
| C6orf58 | Chromosome 6 open reading frame 58 | SEQ ID NO: 1922 |
| C7 | Complement component 7 | SEQ ID NO: 1923 |
| C7orf57 | Chromosome 7 open reading frame 57 | SEQ ID NOS: 1924- |
| | | 1928 |
| C7orf73 | Chromosome 7 open reading frame 73 | SEQ ID NOS: 12924- |
| | | 12925 |
| C8A | Complement component 8, alpha | SEQ ID NO: 1929 |
| | polypeptide | |
| C8B | Complement component 8, beta polypeptide | SEQ ID NOS: 1930- |
| | | 1932 |
| C8G | Complement component 8, gamma | SEQ ID NOS: 1933- |
| | polypeptide | 1934 |
| C9 | Complement component 9 | SEQ ID NO: 1935 |
| C9orf47 | Chromosome 9 open reading frame 47 | SEQ ID NOS: 1936- |
| | | 1938 |
| CA10 | Carbonic anhydrase X | SEQ ID NOS: 1939- |
| | | 1945 |
| CA11 | Carbonic anhydrase XI | SEQ ID NOS: 1946- |
| | | 1947 |
| CA6 | Carbonic anhydrase VI | SEQ ID NOS: 1948- |
| | | 1952 |
| CA9 | Carbonic anhydrase IX | SEQ ID NOS: 1953- |
| | | 1954 |
| CABLES1 | Cdk5 and Abl enzyme substrate 1 | SEQ ID NOS: 1955- |
| | | 1960 |
| CABP1 | Calcium binding protein 1 | SEQ ID NOS: 1961- |
| | | 1964 |
| CACNA2D1 | Calcium channel, voltage-dependent, alpha | SEQ ID NOS: 1965- |
| | 2/delta subunit 1 | 1968 |
| CACNA2D4 | Calcium channel, voltage-dependent, alpha | SEQ ID NOS: 1969- |
| | 2/delta subunit 4 | 1982 |
| CADM3 | Cell adhesion molecule 3 | SEQ ID NOS: 1983- |
| | | 1985 |
| CALCA | Calcitonin-related polypeptide alpha | SEQ ID NOS: 1986- |
| | | 1990 |
| CALCB | Calcitonin-related polypeptide beta | SEQ ID NOS: 1991- |
| | | 1993 |
| CALCR | Calcitonin receptor | SEQ ID NOS: 1994- |
| | | 2000 |
| CALCRL | Calcitonin receptor-like | SEQ ID NOS: 2001- |
| | | 2005 |
| CALR | Calreticulin | SEQ ID NOS: 2011- |
| | | 2014 |
| CCDC88B | Coiled-coil domain containing 88B | SEQ ID NOS: 2112- |
| | | 2114 |
| CCER2 | Coiled-coil glutamate-rich protein 2 | SEQ ID NOS: 2115- |
| | | 2116 |
| CCK | Cholecystokinin | SEQ ID NOS: 2117- |
| | | 2119 |
| CCL1 | Chemokine (C-C motif) ligand 1 | SEQ ID NO: 2120 |
| CCL11 | Chemokine (C-C motif) ligand 11 | SEQ ID NO: 2121 |
| CCL13 | Chemokine (C-C motif) ligand 13 | SEQ ID NOS: 2122- |
| | | 2123 |
| CCL14 | Chemokine (C-C motif) ligand 14 | SEQ ID NOS: 2124- |
| | | 2127 |
| CCL15 | Chemokine (C-C motif) ligand 15 | SEQ ID NOS: 2128- |
| | | 2129 |
| CCL16 | Chemokine (C-C motif) ligand 16 | SEQ ID NOS: 2130- |
| | | 2132 |
| CCL17 | Chemokine (C-C motif) ligand 17 | SEQ ID NOS: 2133- |
| | | 2134 |
| CCL18 | Chemokine (C-C motif) ligand 18 | SEQ ID NO: 2135 |
| | (pulmonary and activation-regulated) | |
| CCL19 | Chemokine (C-C motif) ligand 19 | SEQ ID NOS: 2136- |
| | | 2137 |
| CCL2 | Chemokine (C-C motif) ligand 2 | SEQ ID NOS: 2138- |
| | | 2139 |
| CCL20 | Chemokine (C-C motif) ligand 20 | SEQ ID NOS: 2140- |
| | | 2142 |
| CCL21 | Chemokine (C-C motif) ligand 21 | SEQ ID NOS: 2143- |
| | | 2144 |
| CCL22 | Chemokine (C-C motif) ligand 22 | SEQ ID NO: 2145 |
| CCL23 | Chemokine (C-C motif) ligand 23 | SEQ ID NOS: 2146- |
| | | 2148 |
| CCL24 | Chemokine (C-C motif) ligand 24 | SEQ ID NOS: 2149- |
| | | 2150 |
| CCL25 | Chemokine (C-C motif) ligand 25 | SEQ ID NOS: 2151- |
| | | 2154 |
| CCL26 | Chemokine (C-C motif) ligand 26 | SEQ ID NOS: 2155- |
| | | 2156 |
| CCL27 | Chemokine (C-C motif) ligand 27 | SEQ ID NO: 2157 |
| CCL28 | Chemokine (C-C motif) ligand 28 | SEQ ID NOS: 2158- |
| | | 2160 |
| CCL3 | Chemokine (C-C motif) ligand 3 | SEQ ID NO: 2161 |
| CCL3L3 | Chemokine (C-C motif) ligand 3-like 3 | SEQ ID NO: 2162 |
| CCL4 | Chemokine (C-C motif) ligand 4 | SEQ ID NOS: 2163- |
| | | 2164 |
| CCL4L2 | Chemokine (C-C motif) ligand 4-like 2 | SEQ ID NOS: 2165- |
| | | 2174 |
| CCL5 | Chemokine (C-C motif) ligand 5 | SEQ ID NOS: 2175- |
| | | 2177 |
| CCL7 | Chemokine (C-C motif) ligand 7 | SEQ ID NOS: 2178- |
| | | 2180 |
| CCL8 | Chemokine (C-C motif) ligand 8 | SEQ ID NO: 2181 |
| CCNB1IP1 | Cyclin B1 interacting protein 1, E3 | SEQ ID NOS: 2182- |
| | ubiquitin protein ligase | 2193 |
| CCNL1 | Cyclin L1 | SEQ ID NOS: 2194- |
| | | 2202 |
| CCNL2 | Cyclin L2 | SEQ ID NOS: 2203- |
| | | 2210 |
| CD14 | CD14 molecule | SEQ ID NOS: 2211- |
| | | 2215 |
| CD160 | CD160 molecule | SEQ ID NOS: 2216- |
| | | 2220 |
| CD164 | CD164 molecule, sialomucin | SEQ ID NOS: 2221- |
| | | 2226 |
| CD177 | CD177 molecule | SEQ ID NOS: 2227- |
| | | 2229 |
| CD1E | CD1e molecule | SEQ ID NOS: 2230- |
| | | 2243 |
| CD2 | CD2 molecule | SEQ ID NOS: 2244- |
| | | 2245 |
| CD200 | CD200 molecule | SEQ ID NOS: 2246- |
| | | 2252 |
| CD200R1 | CD200 receptor 1 | SEQ ID NOS: 2253- |
| | | 2257 |
| CD22 | CD22 molecule | SEQ ID NOS: 2258- |
| | | 2275 |
| CD226 | CD226 molecule | SEQ ID NOS: 2276- |
| | | 2283 |
| CD24 | CD24 molecule | SEQ ID NOS: 2284- |
| | | 2290 |
| CD276 | CD276 molecule | SEQ ID NOS: 2291- |
| | | 2306 |
| CD300A | CD300a molecule | SEQ ID NOS: 2307- |
| | | 2311 |
| CD300LB | CD300 molecule-like family member b | SEQ ID NOS: 2312- |
| | | 2313 |
| CD300LF | CD300 molecule-like family member f | SEQ ID NOS: 2314- |
| | | 2322 |
| CD300LG | CD300 molecule-like family member g | SEQ ID NOS: 2323- |
| | | 2328 |
| CD3D | CD3d molecule, delta (CD3-TCR complex) | SEQ ID NOS: 2329- |
| | | 2332 |
| CD4 | CD4 molecule | SEQ ID NOS: 2333- |
| | | 2335 |
| CD40 | CD40 molecule, TNF receptor superfamily | SEQ ID NOS: 2336- |
| | member 5 | 2339 |
| CD44 | CD44 molecule (Indian blood group) | SEQ ID NOS: 2340- |
| | | 2366 |
| CD48 | CD48 molecule | SEQ ID NOS: 2367- |
| | | 2369 |
| CD5 | CD5 molecule | SEQ ID NOS: 2370- |
| | | 2371 |
| CD55 | CD55 molecule, decay accelerating factor | SEQ ID NOS: 2372- |
| | for complement (Cromer blood group) | 2382 |
| CD59 | CD59 molecule, complement regulatory | SEQ ID NOS: 2383- |
| | protein | 2393 |
| CD5L | CD5 molecule-like | SEQ ID NO: 2394 |
| CD6 | CD6 molecule | SEQ ID NOS: 2395- |
| | | 2402 |
| CD68 | CD68 molecule | SEQ ID NOS: 2403- |
| | | 2406 |
| CD7 | CD7 molecule | SEQ ID NOS: 2407- |
| | | 2412 |
| CD79A | CD79a molecule, immunoglobulin- | SEQ ID NOS: 2413- |
| | associated alpha | 2415 |
| CD80 | CD80 molecule | SEQ ID NOS: 2416- |
| | | 2418 |
| CD86 | CD86 molecule | SEQ ID NOS: 2419- |
| | | 2425 |
| CD8A | CD8a molecule | SEQ ID NOS: 2426- |
| | | 2429 |
| CD8B | CD8b molecule | SEQ ID NOS: 2430- |
| | | 2435 |
| CD99 | CD99 molecule | SEQ ID NOS: 2436- |
| | | 2444 |
| CDC23 | Cell division cycle 23 | SEQ ID NOS: 2445- |
| | | 2449 |
| CDC40 | Cell division cycle 40 | SEQ ID NOS: 2450- |
| | | 2452 |
| CDC45 | Cell division cycle 45 | SEQ ID NOS: 2453- |
| | | 2459 |
| CDCP1 | CUB domain containing protein 1 | SEQ ID NOS: 2460- |
| | | 2461 |
| CDCP2 | CUB domain containing protein 2 | SEQ ID NOS: 2462- |
| | | 2463 |
| CDH1 | Cadherin 1, type 1 | SEQ ID NOS: 2464- |
| | | 2471 |
| CDH11 | Cadherin 11, type 2, OB-cadherin | SEQ ID NOS: 2472- |
| | (osteoblast) | 2481 |
| CDH13 | Cadherin 13 | SEQ ID NOS: 2482- |
| | | 2491 |
| CDH17 | Cadherin 17, LI cadherin (liver-intestine) | SEQ ID NOS: 2492- |
| | | 2496 |
| CDH18 | Cadherin 18, type 2 | SEQ ID NOS: 2497- |
| | | 2503 |
| CDH19 | Cadherin 19, type 2 | SEQ ID NOS: 2504- |
| | | 2508 |
| CDH23 | Cadherin-related 23 | SEQ ID NOS: 2509- |
| | | 2524 |
| CDH5 | Cadherin 5, type 2 (vascular endothelium) | SEQ ID NOS: 2525- |
| | | 2532 |
| CDHR1 | Cadherin-related family member 1 | SEQ ID NOS: 2533- |
| | | 2538 |
| CDHR4 | Cadherin-related family member 4 | SEQ ID NOS: 2539- |
| | | 2543 |
| CDHR5 | Cadherin-related family member 5 | SEQ ID NOS: 2544- |
| | | 2550 |
| CDKN2A | Cyclin-dependent kinase inhibitor 2A | SEQ ID NOS: 2551- |
| | | 2561 |
| CDNF | Cerebral dopamine neurotrophic factor | SEQ ID NOS: 2562- |
| | | 2563 |
| CDON | Cell adhesion associated, oncogene | SEQ ID NOS: 2564- |
| | regulated | 2571 |
| CDSN | Corneodesmosin | SEQ ID NO: 2572 |
| CEACAM16 | Carcinoembryonic antigen-related cell | SEQ ID NOS: 2573- |
| | adhesion molecule 16 | 2574 |
| CEACAM18 | Carcinoembryonic antigen-related cell | SEQ ID NO: 2575 |
| | adhesion molecule 18 | |
| CEACAM19 | Carcinoembryonic antigen-related cell | SEQ ID NOS: 2576- |
| | adhesion molecule 19 | 2582 |
| CEACAM5 | Carcinoembryonic antigen-related cell | SEQ ID NOS: 2583- |
| | adhesion molecule 5 | 2590 |
| CEACAM7 | Carcinoembryonic antigen-related cell | SEQ ID NOS: 2591- |
| | adhesion molecule 7 | 2593 |
| CEACAM8 | Carcinoembryonic antigen-related cell | SEQ ID NOS: 2594- |
| | adhesion molecule 8 | 2595 |
| CECR1 | Cat eye syndrome chromosome region, | SEQ ID NOS: 222-229 |
| | candidate 1 | |
| CECR5 | Cat eye syndrome chromosome region, | SEQ ID NOS: 6411- |
| | candidate 5 | 6413 |
| CEL | Carboxyl ester lipase | SEQ ID NO: 2596 |
| CELA2A | Chymotrypsin-like elastase family, member | SEQ ID NO: 2597 |
| | 2A | |
| CELA2B | Chymotrypsin-like elastase family, member | SEQ ID NOS: 2598- |
| | 2B | 2599 |
| CELA3A | Chymotrypsin-like elastase family, member | SEQ ID NOS: 2600- |
| | 3A | 2602 |
| CELA3B | Chymotrypsin-like elastase family, member | SEQ ID NOS: 2603- |
| | 3B | 2605 |
| CEMIP | Cell migration inducing protein, hyaluronan | SEQ ID NOS: 2606- |
| | binding | 2610 |
| CEP89 | Centrosomal protein 89 kDa | SEQ ID NOS: 2611- |
| | | 2616 |
| CER1 | Cerberus 1, DAN family BMP antagonist | SEQ ID NO: 2617 |
| CERCAM | Cerebral endothelial cell adhesion molecule | SEQ ID NOS: 2618- |
| | | 2625 |
| CERS1 | Ceramide synthase 1 | SEQ ID NOS: 2626- |
| | | 2630 |
| CES1 | Carboxylesterase 1 | SEQ ID NOS: 2631- |
| | | 2636 |
| CES3 | Carboxylesterase 3 | SEQ ID NOS: 2637- |
| | | 2641 |
| CES4A | Carboxylesterase 4A | SEQ ID NOS: 2642- |
| | | 2647 |
| CES5A | Carboxylesterase 5A | SEQ ID NOS: 2648- |
| | | 2655 |
| CETP | Cholesteryl ester transfer protein, plasma | SEQ ID NOS: 2656- |
| | | 2658 |
| CFB | Complement factor B | SEQ ID NOS: 2669- |
| | | 2673 |
| CFC1 | Cripto, FRL-1, cryptic family 1 | SEQ ID NOS: 2674- |
| | | 2676 |
| CFC1B | Cripto, FRL-1, cryptic family 1B | SEQ ID NOS: 2677- |
| | | 2679 |
| CFD | Complement factor D (adipsin) | SEQ ID NOS: 2680- |
| | | 2681 |
| CFDP1 | Craniofacial development protein 1 | SEQ ID NOS: 2682- |
| | | 2685 |
| CFH | Complement factor H | SEQ ID NOS: 2686- |
| | | 2688 |
| CFHR1 | Complement factor H-related 1 | SEQ ID NOS: 2689- |
| | | 2690 |
| CFHR2 | Complement factor H-related 2 | SEQ ID NOS: 2691- |
| | | 2692 |
| CFHR3 | Complement factor H-related 3 | SEQ ID NOS: 2693- |
| | | 2697 |
| CFHR4 | Complement factor H-related 4 | SEQ ID NOS: 2698- |
| | | 2701 |
| CFHR5 | Complement factor H-related 5 | SEQ ID NO: 2702 |
| CFI | Complement factor I | SEQ ID NOS: 2703- |
| | | 2707 |
| CFP | Complement factor properdin | SEQ ID NOS: 2708- |
| | | 2711 |
| CGA | Glycoprotein hormones, alpha polypeptide | SEQ ID NOS: 2712- |
| | | 2716 |
| CGB | Chorionic gonadotropin, beta polypeptide | SEQ ID NO: 2721 |
| CGB1 | Chorionic gonadotropin, beta polypeptide 1 | SEQ ID NOS: 2717- |
| | | 2718 |
| CGB2 | Chorionic gonadotropin, beta polypeptide 2 | SEQ ID NOS: 2719- |
| | | 2720 |
| CGB5 | Chorionic gonadotropin, beta polypeptide 5 | SEQ ID NO: 2722 |
| CGB7 | Chorionic gonadotropin, beta polypeptide 7 | SEQ ID NOS: 2723- |
| | | 2725 |
| CGB8 | Chorionic gonadotropin, beta polypeptide 8 | SEQ ID NO: 2726 |
| CGREF1 | Cell growth regulator with EF-hand domain | SEQ ID NOS: 2727- |
| | 1 | 2734 |
| CH507-9B2.3 | | SEQ ID NOS: 5532- |
| | | 5538 |
| CHAD | Chondroadherin | SEQ ID NOS: 2735- |
| | | 2737 |
| CHADL | Chondroadherin-like | SEQ ID NOS: 2738- |
| | | 2740 |
| CHEK2 | Checkpoint kinase 2 | SEQ ID NOS: 2741- |
| | | 2762 |
| CHGA | Chromogranin A | SEQ ID NOS: 2763- |
| | | 2765 |
| CHGB | Chromogranin B | SEQ ID NOS: 2766- |
| | | 2767 |
| CHI3L1 | Chitinase 3-like 1 (cartilage glycoprotein- | SEQ ID NOS: 2768- |
| | 39) | 2769 |
| CHI3L2 | Chitinase 3-like 2 | SEQ ID NOS: 2770- |
| | | 2783 |
| CHIA | Chitinase, acidic | SEQ ID NOS: 2784- |
| | | 2792 |
| CHID1 | Chitinase domain containing 1 | SEQ ID NOS: 2793- |
| | | 2811 |
| CHIT1 | Chitinase 1 (chitotriosidase) | SEQ ID NOS: 2812- |
| | | 2815 |
| CHL1 | Cell adhesion molecule L1-like | SEQ ID NOS: 2816- |
| | | 2824 |
| CHN1 | Chimerin 1 | SEQ ID NOS: 2825- |
| | | 2835 |
| CHPF | Chondroitin polymerizing factor | SEQ ID NOS: 2836- |
| | | 2838 |
| CHPF2 | Chondroitin polymerizing factor 2 | SEQ ID NOS: 2839- |
| | | 2842 |
| CHRD | Chordin | SEQ ID NOS: 2843- |
| | | 2848 |
| CHRDL1 | Chordin-like 1 | SEQ ID NOS: 2849- |
| | | 2853 |
| CHRDL2 | Chordin-like 2 | SEQ ID NOS: 2854- |
| | | 2862 |
| CHRNA2 | Cholinergic receptor, nicotinic, alpha 2 | SEQ ID NOS: 2863- |
| | (neuronal) | 2871 |
| CHRNA5 | Cholinergic receptor, nicotinic, alpha 5 | SEQ ID NOS: 2872- |
| | (neuronal) | 2875 |
| CHRNB1 | Cholinergic receptor, nicotinic, beta 1 | SEQ ID NOS: 2876- |
| | (muscle) | 2881 |
| CHRND | Cholinergic receptor, nicotinic, delta | SEQ ID NOS: 2882- |
| | (muscle) | 2887 |
| CHST1 | Carbohydrate (keratan sulfate Gal-6) | SEQ ID NO: 2888 |
| | sulfotransferase 1 | |
| CHST10 | Carbohydrate sulfotransferase 10 | SEQ ID NOS: 2889- |
| | | 2896 |
| CHST11 | Carbohydrate (chondroitin 4) | SEQ ID NOS: 2897- |
| | sulfotransferase 11 | 2901 |
| CHST13 | Carbohydrate (chondroitin 4) | SEQ ID NOS: 2902- |
| | sulfotransferase 13 | 2903 |
| CHST4 | Carbohydrate (N-acetylglucosamine 6-O) | SEQ ID NOS: 2904- |
| | sulfotransferase 4 | 2905 |
| CHST5 | Carbohydrate (N-acetylglucosamine 6-O) | SEQ ID NOS: 2906- |
| | sulfotransferase 5 | 2907 |
| CHST6 | Carbohydrate (N-acetylglucosamine 6-O) | SEQ ID NOS: 2908- |
| | sulfotransferase 6 | 2909 |
| CHST7 | Carbohydrate (N-acetylglucosamine 6-O) | SEQ ID NO: 2910 |
| | sulfotransferase 7 | |
| CHST8 | Carbohydrate (N-acetylgalactosamine 4-0) | SEQ ID NOS: 2911- |
| | sulfotransferase 8 | 2914 |
| CHSY1 | Chondroitin sulfate synthase 1 | SEQ ID NOS: 2915- |
| | | 2916 |
| CHSY3 | Chondroitin sulfate synthase 3 | SEQ ID NO: 2917 |
| CHTF8 | Chromosome transmission fidelity factor 8 | SEQ ID NOS: 2918- |
| | | 2928 |
| CILP | Cartilage intermediate layer protein, | SEQ ID NO: 2929 |
| | nucleotide pyrophosphohydrolase | |
| CILP2 | Cartilage intermediate layer protein 2 | SEQ ID NOS: 2930- |
| | | 2931 |
| CIRH1A | Cirrhosis, autosomal recessive 1A (cirhin) | SEQ ID NOS: 13974- |
| | | 13983 |
| CKLF | Chemokine-like factor | SEQ ID NOS: 2932- |
| | | 2937 |
| CKMT1A | Creatine kinase, mitochondrial 1A | SEQ ID NOS: 2938- |
| | | 2943 |
| CKMT1B | Creatine kinase, mitochondrial 1B | SEQ ID NOS: 2944- |
| | | 2953 |
| CLCA1 | Chloride channel accessory 1 | SEQ ID NOS: 2954- |
| | | 2955 |
| CLCF1 | Cardiotrophin-like cytokine factor 1 | SEQ ID NOS: 2956- |
| | | 2957 |
| CLDN15 | Claudin 15 | SEQ ID NOS: 2958- |
| | | 2963 |
| CLDN7 | Claudin 7 | SEQ ID NOS: 2964- |
| | | 2970 |
| CLDND1 | Claudin domain containing 1 | SEQ ID NOS: 2971- |
| | | 2996 |
| CLEC11A | C-type lectin domain family 11, member A | SEQ ID NOS: 2997- |
| | | 2999 |
| CLEC16A | C-type lectin domain family 16, member A | SEQ ID NOS: 3000- |
| | | 3005 |
| CLEC18A | C-type lectin domain family 18, member A | SEQ ID NOS: 3006- |
| | | 3011 |
| CLEC18B | C-type lectin domain family 18, member B | SEQ ID NOS: 3012- |
| | | 3015 |
| CLEC18C | C-type lectin domain family 18, member C | SEQ ID NOS: 3016- |
| | | 3022 |
| CLEC19A | C-type lectin domain family 19, member A | SEQ ID NOS: 3023- |
| | | 3026 |
| CLEC2B | C-type lectin domain family 2, member B | SEQ ID NOS: 3027- |
| | | 3028 |
| CLEC3A | C-type lectin domain family 3, member A | SEQ ID NOS: 3029- |
| | | 3030 |
| CLEC3B | C-type lectin domain family 3, member B | SEQ ID NOS: 3031- |
| | | 3032 |
| CLGN | Calmegin | SEQ ID NOS: 3033- |
| | | 3035 |
| CLN5 | Ceroid-lipofuscinosis, neuronal 5 | SEQ ID NOS: 3036- |
| | | 3047 |
| CLPS | Colipase, pancreatic | SEQ ID NOS: 3048- |
| | | 3050 |
| CLPSL1 | Colipase-like 1 | SEQ ID NOS: 3051- |
| | | 3052 |
| CLPSL2 | Colipase-like 2 | SEQ ID NOS: 3053- |
| | | 3054 |
| CLPX | Caseinolytic mitochondrial matrix peptidase | SEQ ID NOS: 3055- |
| | chaperone subunit | 3057 |
| CLSTN3 | Calsyntenin 3 | SEQ ID NOS: 3058- |
| | | 3064 |
| CLU | Clusterin | SEQ ID NOS: 3065- |
| | | 3078 |
| CLUL1 | Clusterin-like 1 (retinal) | SEQ ID NOS: 3079- |
| | | 3086 |
| CMA1 | Chymase 1, mast cell | SEQ ID NOS: 3087- |
| | | 3088 |
| CMPK1 | Cytidine monophosphate (UMP-CMP) | SEQ ID NOS: 3089- |
| | kinase 1, cytosolic | 3092 |
| CNBD1 | Cyclic nucleotide binding domain | SEQ ID NOS: 3093- |
| | containing 1 | 3096 |
| CNDP1 | Carnosine dipeptidase 1 (metallopeptidase | SEQ ID NOS: 3097- |
| | M20 family) | 3099 |
| CNPY2 | Canopy FGF signaling regulator 2 | SEQ ID NOS: 3107- |
| | | 3111 |
| CNPY3 | Canopy FGF signaling regulator 3 | SEQ ID NOS: 3112- |
| | | 3113 |
| CNPY4 | Canopy FGF signaling regulator 4 | SEQ ID NOS: 3114- |
| | | 3116 |
| CNTFR | Ciliary neurotrophic factor receptor | SEQ ID NOS: 3117- |
| | | 3120 |
| CNTN1 | Contactin 1 | SEQ ID NOS: 3121- |
| | | 3130 |
| CNTN2 | Contactin 2 (axonal) | SEQ ID NOS: 3131- |
| | | 3142 |
| CNTN3 | Contactin 3 (plasmacytoma associated) | SEQ ID NO: 3143 |
| CNTN4 | Contactin 4 | SEQ ID NOS: 3144- |
| | | 3152 |
| CNTN5 | Contactin 5 | SEQ ID NOS: 3153- |
| | | 3158 |
| CNTNAP2 | Contactin associated protein-like 2 | SEQ ID NOS: 3159- |
| | | 3162 |
| CNTNAP3 | Contactin associated protein-like 3 | SEQ ID NOS: 3163- |
| | | 3167 |
| CNTNAP3B | Contactin associated protein-like 3B | SEQ ID NOS: 3168- |
| | | 3176 |
| COASY | CoA synthase | SEQ ID NOS: 3177- |
| | | 3186 |
| COCH | Cochlin | SEQ ID NOS: 3187- |
| | | 3198 |
| COG3 | Component of oligomeric golgi complex 3 | SEQ ID NOS: 3199- |
| | | 3202 |
| COL10A1 | Collagen, type X, alpha 1 | SEQ ID NOS: 3203- |
| | | 3206 |
| COL11A1 | Collagen, type XI, alpha 1 | SEQ ID NOS: 3207- |
| | | 3217 |
| COL11A2 | Collagen, type XI, alpha 2 | SEQ ID NOS: 3218- |
| | | 3222 |
| COL12A1 | Collagen, type XII, alpha 1 | SEQ ID NOS: 3223- |
| | | 3230 |
| COL14A1 | Collagen, type XIV, alpha 1 | SEQ ID NOS: 3231- |
| | | 3238 |
| COL15A1 | Collagen, type XV, alpha 1 | SEQ ID NOS: 3239- |
| | | 3240 |
| COL16A1 | Collagen, type XVI, alpha 1 | SEQ ID NOS: 3241- |
| | | 3245 |
| COL18A1 | Collagen, type XVIII, alpha 1 | SEQ ID NOS: 3246- |
| | | 3250 |
| COL19A1 | Collagen, type XIX, alpha 1 | SEQ ID NOS: 3251- |
| | | 3253 |
| COL1A1 | Collagen, type I, alpha 1 | SEQ ID NOS: 3254- |
| | | 3255 |
| COL1A2 | Collagen, type I, alpha 2 | SEQ ID NOS: 3256- |
| | | 3257 |
| COL20A1 | Collagen, type XX, alpha 1 | SEQ ID NOS: 3258- |
| | | 3261 |
| COL21A1 | Collagen, type XXI, alpha 1 | SEQ ID NOS: 3262- |
| | | 3267 |
| COL22A1 | Collagen, type XXII, alpha 1 | SEQ ID NOS: 3268- |
| | | 3270 |
| COL24A1 | Collagen, type XXIV, alpha 1 | SEQ ID NOS: 3271- |
| | | 3274 |
| COL26A1 | Collagen, type XXVI, alpha 1 | SEQ ID NOS: 3275- |
| | | 3276 |
| COL27A1 | Collagen, type XXVII, alpha 1 | SEQ ID NOS: 3277- |
| | | 3279 |
| COL28A1 | Collagen, type XXVIII, alpha 1 | SEQ ID NOS: 3280- |
| | | 3284 |
| COL2A1 | Collagen, type II, alpha 1 | SEQ ID NOS: 3285- |
| | | 3286 |
| COL3A1 | Collagen, type III, alpha 1 | SEQ ID NOS: 3287- |
| | | 3289 |
| COL4A1 | Collagen, type IV, alpha 1 | SEQ ID NOS: 3290- |
| | | 3292 |
| COL4A2 | Collagen, type IV, alpha 2 | SEQ ID NOS: 3293- |
| | | 3295 |
| COL4A3 | Collagen, type IV, alpha 3 (Goodpasture | SEQ ID NOS: 3296- |
| | antigen) | 3299 |
| COL4A4 | Collagen, type IV, alpha 4 | SEQ ID NOS: 3300- |
| | | 3301 |
| COL4A5 | Collagen, type IV, alpha 5 | SEQ ID NOS: 3302- |
| | | 3308 |
| COL4A6 | Collagen, type IV, alpha 6 | SEQ ID NOS: 3309- |
| | | 3314 |
| COL5A1 | Collagen, type V, alpha 1 | SEQ ID NOS: 3315- |
| | | 3317 |
| COL5A2 | Collagen, type V, alpha 2 | SEQ ID NOS: 3318- |
| | | 3319 |
| COL5A3 | Collagen, type V, alpha 3 | SEQ ID NO: 3320 |
| COL6A1 | Collagen, type VI, alpha 1 | SEQ ID NOS: 3321- |
| | | 3322 |
| COL6A2 | Collagen, type VI, alpha 2 | SEQ ID NOS: 3323- |
| | | 3328 |
| COL6A3 | Collagen, type VI, alpha 3 | SEQ ID NOS: 3329- |
| | | 3337 |
| COL6A5 | Collagen, type VI, alpha 5 | SEQ ID NOS: 3338- |
| | | 3342 |
| COL6A6 | Collagen, type VI, alpha 6 | SEQ ID NOS: 3343- |
| | | 3345 |
| COL7A1 | Collagen, type VII, alpha 1 | SEQ ID NOS: 3346- |
| | | 3347 |
| COL8A1 | Collagen, type VIII, alpha 1 | SEQ ID NOS: 3348- |
| | | 3351 |
| COL8A2 | Collagen, type VIII, alpha 2 | SEQ ID NOS: 3352- |
| | | 3354 |
| COL9A1 | Collagen, type IX, alpha 1 | SEQ ID NOS: 3355- |
| | | 3358 |
| COL9A2 | Collagen, type IX, alpha 2 | SEQ ID NOS: 3359- |
| | | 3362 |
| COL9A3 | Collagen, type IX, alpha 3 | SEQ ID NOS: 3363- |
| | | 3364 |
| COLEC10 | Collectin sub-family member 10 (C-type | SEQ ID NO: 3365 |
| | lectin) | |
| COLEC11 | Collectin sub-family member 11 | SEQ ID NOS: 3366- |
| | | 3375 |
| COLGALT1 | Collagen beta(1-O)galactosyltransferase 1 | SEQ ID NOS: 3376- |
| | | 3378 |
| COLGALT2 | Collagen beta(1-O)galactosyltransferase 2 | SEQ ID NOS: 3379- |
| | | 3381 |
| COLQ | Collagen-like tail subunit (single strand of | SEQ ID NOS: 3382- |
| | homotrimer) of asymmetric | 3386 |
| | acetylcholinesterase | |
| COMP | Cartilage oligomeric matrix protein | SEQ ID NOS: 3387- |
| | | 3389 |
| COPS6 | COP9 signalosome subunit 6 | SEQ ID NOS: 3390- |
| | | 3393 |
| COQ6 | Coenzyme Q6 monooxygenase | SEQ ID NOS: 3394- |
| | | 3401 |
| CORT | Cortistatin | SEQ ID NO: 3402 |
| CP | Ceruloplasmin (ferroxidase) | SEQ ID NOS: 3403- |
| | | 3407 |
| CPA1 | Carboxypeptidase A1 (pancreatic) | SEQ ID NOS: 3408- |
| | | 3412 |
| CPA2 | Carboxypeptidase A2 (pancreatic) | SEQ ID NOS: 3413- |
| | | 3414 |
| CPA3 | Carboxypeptidase A3 (mast cell) | SEQ ID NO: 3415 |
| CPA4 | Carboxypeptidase A4 | SEQ ID NOS: 3416- |
| | | 3421 |
| CPA6 | Carboxypeptidase A6 | SEQ ID NOS: 3422- |
| | | 3424 |
| CPAMD8 | C3 and PZP-like, alpha-2-macroglobulin | SEQ ID NOS: 3425- |
| | domain containing 8 | 3430 |
| CPB1 | Carboxypeptidase B1 (tissue) | SEQ ID NOS: 3431- |
| | | 3435 |
| CPB2 | Carboxypeptidase B2 (plasma) | SEQ ID NOS: 3436- |
| | | 3438 |
| CPE | Carboxypeptidase E | SEQ ID NOS: 3439- |
| | | 3443 |
| CPM | Carboxypeptidase M | SEQ ID NOS: 3444- |
| | | 3453 |
| CPN1 | Carboxypeptidase N, polypeptide 1 | SEQ ID NOS: 3454- |
| | | 3455 |
| CPN2 | Carboxypeptidase N, polypeptide 2 | SEQ ID NOS: 3456- |
| | | 3457 |
| CPO | Carboxypeptidase O | SEQ ID NO: 3458 |
| CPQ | Carboxvpeptidase Q | SEQ ID NOS: 3459- |
| | | 3464 |
| CPVL | Carboxypeptidase, vitellogenic-like | SEQ ID NOS: 3465- |
| | | 3475 |
| CPXM1 | Carboxypeptidase X (M14 family), member | SEQ ID NO: 3476 |
| | 1 | |
| CPXM2 | Carboxypeptidase X (M14 family), member | SEQ ID NOS: 3477- |
| | 2 | 3478 |
| CPZ | Carboxypeptidase Z | SEQ ID NOS: 3479- |
| | | 3482 |
| CR1L | Complement component (3b/4b) receptor 1- | SEQ ID NOS: 3483- |
| | like | 3484 |
| CRB2 | Crumbs family member 2 | SEQ ID NOS: 3485- |
| | | 3487 |
| CREG1 | Cellular repressor of E1A-stimulated genes | SEQ ID NO: 3488 |
| | 1 | |
| CREG2 | Cellular repressor of E1A-stimulated genes | SEQ ID NO: 3489 |
| | 2 | |
| CRELD1 | Cysteine-rich with EGF-like domains 1 | SEQ ID NOS: 3490- |
| | | 3495 |
| CRELD2 | Cysteine-rich with EGF-like domains 2 | SEQ ID NOS: 3496- |
| | | 3500 |
| CRH | Corticotropin releasing hormone | SEQ ID NO: 3501 |
| CRHBP | Corticotropin releasing hormone binding | SEQ ID NOS: 3502- |
| | protein | 3503 |
| CRHR1 | Corticotropin releasing hormone receptor 1 | SEQ ID NOS: 3504- |
| | | 3515 |
| CRHR2 | Corticotropin releasing hormone receptor 2 | SEQ ID NOS: 3516- |
| | | 3522 |
| CRISP1 | Cysteine-rich secretory protein 1 | SEQ ID NOS: 3523- |
| | | 3526 |
| CRISP2 | Cysteine-rich secretory protein 2 | SEQ ID NOS: 3527- |
| | | 3529 |
| CRISP3 | Cysteine-rich secretory protein 3 | SEQ ID NOS: 3530- |
| | | 3533 |
| CRISPLD2 | Cysteine-rich secretory protein LCCL | SEQ ID NOS: 3534- |
| | domain containing 2 | 3541 |
| CRLF1 | Cytokine receptor-like factor 1 | SEQ ID NOS: 3542- |
| | | 3543 |
| CRP | C-reactive protein, pentraxin-related | SEQ ID NOS: 3544- |
| | | 3548 |
| CRTAC1 | Cartilage acidic protein 1 | SEQ ID NOS: 3549- |
| | | 3553 |
| CRTAP | Cartilage associated protein | SEQ ID NOS: 3554- |
| | | 3555 |
| CRY2 | Cryptochrome circadian clock 2 | SEQ ID NOS: 3556- |
| | | 3559 |
| CSAD | Cysteine sulfinic acid decarboxylase | SEQ ID NOS: 3560- |
| | | 3572 |
| CSF1 | Colony stimulating factor 1 (macrophage) | SEQ ID NOS: 3573- |
| | | 3580 |
| CSF1R | Colony stimulating factor 1 receptor | SEQ ID NOS: 3581- |
| | | 3585 |
| CSF2 | Colony stimulating factor 2 (granulocyte- | SEQ ID NO: 3586 |
| | macrophage) | |
| CSF2RA | Colony stimulating factor 2 receptor, alpha, | SEQ ID NOS: 3587- |
| | low-affinity (granulocyte-macrophage) | 3598 |
| CSF3 | Colony stimulating factor 3 (granulocyte) | SEQ ID NOS: 3599- |
| | | 3605 |
| CSGALNACT1 | Chondroitin sulfate N- | SEQ ID NOS: 3606- |
| | acetylgalactosaminyltransferase 1 | 3614 |
| CSH1 | Chorionic somatomammotropin hormone 1 | SEQ ID NOS: 3615- |
| | (placental lactogen) | 3618 |
| CSH2 | Chorionic somatomammotropin hormone 2 | SEQ ID NOS: 3619- |
| | | 3623 |
| CSHL1 | Chorionic somatomammotropin hormone- | SEQ ID NOS: 3624- |
| | like 1 | 3630 |
| CSN1S1 | Casein alpha s1 | SEQ ID NOS: 3631- |
| | | 3636 |
| CSN2 | Casein beta | SEQ ID NO: 3637 |
| CSN3 | Casein kappa | SEQ ID NO: 3638 |
| CST1 | Cystatin SN | SEQ ID NOS: 3639- |
| | | 3640 |
| CST11 | Cystatin 11 | SEQ ID NOS: 3641- |
| | | 3642 |
| CST2 | Cystatin SA | SEQ ID NO: 3643 |
| CST3 | Cystatin C | SEQ ID NOS: 3644- |
| | | 3646 |
| CST4 | Cystatin S | SEQ ID NO: 3647 |
| CST5 | Cystatin D | SEQ ID NO: 3648 |
| CST6 | Cystatin E/M | SEQ ID NO: 3649 |
| CST7 | Cystatin F (leukocystatin) | SEQ ID NO: 3650 |
| CST8 | Cystatin 8 (cystatin-related epididymal | SEQ ID NOS: 3651- |
| | specific) | 3652 |
| CST9 | Cystatin 9 (testatin) | SEQ ID NO: 3653 |
| CST9L | Cystatin 9-like | SEQ ID NO: 3654 |
| CSTL1 | Cy statin-like 1 | SEQ ID NOS: 3655- |
| | | 3657 |
| CT55 | Cancer/testis antigen 55 | SEQ ID NOS: 3658- |
| | | 3659 |
| CTB-60B18.6 | | SEQ ID NOS: 74-75 |
| CTBS | Chitobiase, di-N-acetyl- | SEQ ID NOS: 3660- |
| | | 3662 |
| CTD- | | SEQ ID NO: 4160 |
| 2313N18.7 | | |
| CTD- | | SEQ ID NOS: 81-84 |
| 2370N5.3 | | |
| CTGF | Connective tissue growth factor | SEQ ID NO: 3663 |
| CTHRC1 | Collagen triple helix repeat containing 1 | SEQ ID NOS: 3664- |
| | | 3667 |
| CTLA4 | Cytotoxic T-lymphocyte-associated protein | SEQ ID NOS: 3668- |
| | 4 | 3671 |
| CTNS | Cystinosin, lysosomal cystine transporter | SEQ ID NOS: 3672- |
| | | 3679 |
| CTRB1 | Chymotrypsinogen B1 | SEQ ID NOS: 3680- |
| | | 3682 |
| CTRB2 | Chymotrypsinogen B2 | SEQ ID NOS: 3683- |
| | | 3686 |
| CTRC | Chymotrypsin C (caldecrin) | SEQ ID NOS: 3687- |
| | | 3688 |
| CTRL | Chymotrypsin-like | SEQ ID NOS: 3689- |
| | | 3691 |
| CTSA | Cathepsin A | SEQ ID NOS: 3692- |
| | | 3700 |
| CTSB | Cathepsin B | SEQ ID NOS: 3701- |
| | | 3725 |
| CTSC | Cathepsin C | SEQ ID NOS: 3726- |
| | | 3730 |
| CTSD | Cathepsin D | SEQ ID NOS: 3731- |
| | | 3741 |
| CTSE | Cathepsin E | SEQ ID NOS: 3742- |
| | | 3743 |
| CTSF | Cathepsin F | SEQ ID NOS: 3744- |
| | | 3747 |
| CTSG | Cathepsin G | SEQ ID NO: 3748 |
| CTSH | Cathepsin H | SEQ ID NOS: 3749- |
| | | 3754 |
| CTSK | Cathepsin K | SEQ ID NOS: 3755- |
| | | 3756 |
| CTSL | Cathepsin L | SEQ ID NOS: 3757- |
| | | 3759 |
| CTSO | Cathepsin O | SEQ ID NO: 3760 |
| CTSS | Cathepsin S | SEQ ID NOS: 3761- |
| | | 3765 |
| CTSV | Cathepsin V | SEQ ID NOS: 3766- |
| | | 3767 |
| CTSW | Cathepsin W | SEQ ID NOS: 3768- |
| | | 3770 |
| CTSZ | Cathepsin Z | SEQ ID NO: 3771 |
| CUBN | Cubilin (intrinsic factor-cobalamin receptor) | SEQ ID NOS: 3772- |
| | | 3775 |
| CUTA | CutA divalent cation tolerance homolog | SEQ ID NOS: 3776- |
| | (E. coli) | 3785 |
| CX3CL1 | Chemokine (C-X3-C motif) ligand 1 | SEQ ID NOS: 3786- |
| | | 3789 |
| CXADR | Coxsackie virus and adenovirus receptor | SEQ ID NOS: 3790- |
| | | 3794 |
| CXCL1 | Chemokine (C-X-C motif) ligand 1 | SEQ ID NO: 3795 |
| | (melanoma growth stimulating activity, | |
| | alpha) | |
| CXCL10 | Chemokine (C-X-C motif) ligand 10 | SEQ ID NO: 3796 |
| CXCL11 | Chemokine (C-X-C motif) ligand 11 | SEQ ID NOS: 3797- |
| | | 3798 |
| CXCL12 | Chemokine (C-X-C motif) ligand 12 | SEQ ID NOS: 3799- |
| | | 3804 |
| CXCL13 | Chemokine (C-X-C motif) ligand 13 | SEQ ID NO: 3805 |
| CXCL14 | Chemokine (C-X-C motif) ligand 14 | SEQ ID NOS: 3806- |
| | | 3807 |
| CXCL17 | Chemokine (C-X-C motif) ligand 17 | SEQ ID NOS: 3808- |
| | | 3809 |
| CXCL2 | Chemokine (C-X-C motif) ligand 2 | SEQ ID NO: 3810 |
| CXCL3 | Chemokine (C-X-C motif) ligand 3 | SEQ ID NO: 3811 |
| CXCL5 | Chemokine (C-X-C motif) ligand 5 | SEQ ID NO: 3812 |
| CXCL6 | Chemokine (C-X-C motif) ligand 6 | SEQ ID NOS: 3813- |
| | | 3814 |
| CXCL8 | Chemokine (C-X-C motif) ligand 8 | SEQ ID NOS: 3815- |
| | | 3816 |
| CXCL9 | Chemokine (C-X-C motif) ligand 9 | SEQ ID NO: 3817 |
| CXorf36 | Chromosome X open reading frame 36 | SEQ ID NOS: 3818- |
| | | 3819 |
| CYB5D2 | Cytochrome b5 domain containing 2 | SEQ ID NOS: 3820- |
| | | 3823 |
| CYHR1 | Cysteine/histidine-rich 1 | SEQ ID NOS: 3824- |
| | | 3831 |
| CYP17A1 | Cytochrome P450, family 17, subfamily A, | SEQ ID NOS: 3832- |
| | polypeptide 1 | 3836 |
| CYP20A1 | Cytochrome P450, family 20, subfamily A, | SEQ ID NOS: 3837- |
| | polypeptide 1 | 3843 |
| CYP21A2 | Cytochrome P450, family 21, subfamily A, | SEQ ID NOS: 3844- |
| | polypeptide 2 | 3851 |
| CYP26B1 | Cytochrome P450, family 26, subfamily B, | SEQ ID NOS: 3852- |
| | polypeptide 1 | 3856 |
| CYP2A6 | Cytochrome P450, family 2, subfamily A, | SEQ ID NOS: 3857- |
| | polypeptide 6 | 3858 |
| CYP2A7 | Cytochrome P450, family 2, subfamily A, | SEQ ID NOS: 3859- |
| | polypeptide 7 | 3861 |
| CYP2B6 | Cytochrome P450, family 2, subfamily B, | SEQ ID NOS: 3862- |
| | polypeptide 6 | 3865 |
| CYP2C18 | Cytochrome P450, family 2, subfamily C, | SEQ ID NOS: 3866- |
| | polypeptide 18 | 3867 |
| CYP2C19 | Cytochrome P450, family 2, subfamily C, | SEQ ID NOS: 3868- |
| | polypeptide 19 | 3869 |
| CYP2C8 | Cytochrome P450, family 2, subfamily C, | SEQ ID NOS: 3870- |
| | polypeptide 8 | 3877 |
| CYP2C9 | Cytochrome P450, family 2, subfamily C, | SEQ ID NOS: 3878- |
| | polypeptide 9 | 3880 |
| CYP2E1 | Cytochrome P450, family 2, subfamily E, | SEQ ID NOS: 3881- |
| | polypeptide 1 | 3886 |
| CYP2F1 | Cytochrome P450, family 2, subfamily F, | SEQ ID NOS: 3887- |
| | polypeptide 1 | 3890 |
| CYP2J2 | Cytochrome P450, family 2, subfamily J, | SEQ ID NO: 3891 |
| | polypeptide 2 | |
| CYP2R1 | Cytochrome P450, family 2, subfamily R, | SEQ ID NOS: 3892- |
| | polypeptide 1 | 3897 |
| CYP2S1 | Cytochrome P450, family 2, subfamily S, | SEQ ID NOS: 3898- |
| | polypeptide 1 | 3903 |
| CYP2W1 | Cytochrome P450, family 2, subfamily W, | SEQ ID NOS: 3904- |
| | polypeptide 1 | 3906 |
| CYP46A1 | Cytochrome P450, family 46, subfamily A, | SEQ ID NOS: 3907- |
| | polypeptide 1 | 3911 |
| CYP4F11 | Cytochrome P450, family 4, subfamily F, | SEQ ID NOS: 3912- |
| | polypeptide 11 | 3916 |
| CYP4F2 | Cytochrome P450, family 4, subfamily F, | SEQ ID NOS: 3917- |
| | polypeptide 2 | 3921 |
| CYR61 | Cysteine-rich, angiogenic inducer, 61 | SEQ ID NO: 3922 |
| CYTL1 | Cytokine-like 1 | SEQ ID NOS: 3923- |
| | | 3925 |
| D2HGDH | D-2-hydroxyglutarate dehydrogenase | SEQ ID NOS: 3926- |
| | | 3934 |
| DAG1 | Dystroglycan 1 (dystrophin-associated | SEQ ID NOS: 3935- |
| | glycoprotein 1) | 3949 |
| DAND5 | DAN domain family member 5, BMP | SEQ ID NOS: 3950- |
| | antagonist | 3951 |
| DAO | D-amino-acid oxidase | SEQ ID NOS: 3952- |
| | | 3957 |
| DAZAP2 | DAZ associated protein 2 | SEQ ID NOS: 3958- |
| | | 3966 |
| DBH | Dopamine beta-hydroxylase (dopamine | SEQ ID NOS: 3967- |
| | beta-monooxygenase) | 3968 |
| DBNL | Drebrin-like | SEQ ID NOS: 3969- |
| | | 3986 |
| DCD | Dermcidin | SEQ ID NOS: 3987- |
| | | 3989 |
| DCN | Decorin | SEQ ID NOS: 3990- |
| | | 4008 |
| DDIAS | DNA damage-induced apoptosis suppressor | SEQ ID NOS: 4009- |
| | | 4018 |
| DDOST | Dolichyl-diphosphooligosaccharide--protein | SEQ ID NOS: 4019- |
| | glycosyltransferase subunit (non-catalytic) | 4022 |
| DDR1 | Discoidin domain receptor tyrosine kinase 1 | SEQ ID NOS: 4023- |
| | | 4068 |
| DDR2 | Discoidin domain receptor tyrosine kinase 2 | SEQ ID NOS: 4069- |
| | | 4074 |
| DDT | D-dopachrome tautomerase | SEQ ID NOS: 4075- |
| | | 4080 |
| DDX17 | DEAD (Asp-Glu-Ala-Asp) box helicase 17 | SEQ ID NOS: 4081- |
| | | 4085 |
| DDX20 | DEAD (Asp-Glu-Ala-Asp) box polypeptide | SEQ ID NOS: 4086- |
| | 20 | 4088 |
| DDX25 | DEAD (Asp-Glu-Ala-Asp) box helicase 25 | SEQ ID NOS: 4089- |
| | | 4095 |
| DDX28 | DEAD (Asp-Glu-Ala-Asp) box polypeptide | SEQ ID NO: 4096 |
| | 28 | |
| DEAF1 | DEAF1 transcription factor | SEQ ID NOS: 4097- |
| | | 4099 |
| DEF8 | Differentially expressed in FDCP 8 | SEQ ID NOS: 4100- |
| | homolog (mouse) | 4119 |
| DEFA1 | Defensin, alpha 1 | SEQ ID NOS: 4120- |
| | | 4121 |
| DEFA1B | Defensin, alpha 1B | SEQ ID NO: 4122 |
| DEFA3 | Defensin, alpha 3, neutrophil-specific | SEQ ID NO: 4123 |
| DEFA4 | Defensin, alpha 4, corticostatin | SEQ ID NO: 4124 |
| DEFA5 | Defensin, alpha 5, Paneth cell-specific | SEQ ID NO: 4125 |
| DEFA6 | Defensin, alpha 6, Paneth cell-specific | SEQ ID NO: 4126 |
| DEFB1 | Defensin, beta 1 | SEQ ID NO: 4127 |
| DEFB103A | Defensin, beta 103A | SEQ ID NO: 4128 |
| DEFB103B | Defensin, beta 103B | SEQ ID NO: 4129 |
| DEFB104A | Defensin, beta 104A | SEQ ID NO: 4130 |
| DEFB104B | Defensin, beta 104B | SEQ ID NO: 4131 |
| DEFB105A | Defensin, beta 105A | SEQ ID NO: 4132 |
| DEFB105B | Defensin, beta 105B | SEQ ID NO: 4133 |
| DEFB106A | Defensin, beta 106A | SEQ ID NO: 4134 |
| DEFB106B | Defensin, beta 106B | SEQ ID NO: 4135 |
| DEFB107A | Defensin, beta 107A | SEQ ID NO: 4136 |
| DEFB107B | Defensin, beta 107B | SEQ ID NO: 4137 |
| DEFB108B | Defensin, beta 108B | SEQ ID NO: 4138 |
| DEFB110 | Defensin, beta 110 | SEQ ID NOS: 4139- |
| | | 4140 |
| DEFB113 | Defensin, beta 113 | SEQ ID NO: 4141 |
| DEFB114 | Defensin, beta 114 | SEQ ID NO: 4142 |
| DEFB115 | Defensin, beta 115 | SEQ ID NO: 4143 |
| DEFB116 | Defensin, beta 116 | SEQ ID NO: 4144 |
| DEFB118 | Defensin, beta 118 | SEQ ID NO: 4145 |
| DEFB119 | Defensin, beta 119 | SEQ ID NOS: 4146- |
| | | 4148 |
| DEFB121 | Defensin, beta 121 | SEQ ID NO: 4149 |
| DEFB123 | Defensin, beta 123 | SEQ ID NO: 4150 |
| DEFB124 | Defensin, beta 124 | SEQ ID NO: 4151 |
| DEFB125 | Defensin, beta 125 | SEQ ID NO: 4152 |
| DEFB126 | Defensin, beta 126 | SEQ ID NO: 4153 |
| DEFB127 | Defensin, beta 127 | SEQ ID NO: 4154 |
| DEFB128 | Defensin, beta 128 | SEQ ID NO: 4155 |
| DEFB129 | Defensin, beta 129 | SEQ ID NO: 4156 |
| DEFB130 | Defensin, beta 130 | SEQ ID NO: 4157 |
| DEFB131 | Defensin, beta 131 | SEQ ID NO: 4159 |
| DEFB132 | Defensin, beta 132 | SEQ ID NO: 4161 |
| DEFB133 | Defensin, beta 133 | SEQ ID NO: 4162 |
| DEFB134 | Defensin, beta 134 | SEQ ID NOS: 4163- |
| | | 4164 |
| DEFB135 | Defensin, beta 135 | SEQ ID NO: 4165 |
| DEFB136 | Defensin, beta 136 | SEQ ID NO: 4166 |
| DEFB4A | Defensin, beta 4A | SEQ ID NO: 4167 |
| DEFB4B | Defensin, beta 4B | SEQ ID NO: 4168 |
| DFNA5 | Deafness, autosomal dominant 5 | SEQ ID NOS: 6271- |
| | | 6279 |
| DFNB31 | Deafness, autosomal recessive 31 | SEQ ID NOS: 14251- |
| | | 14254 |
| DGCR2 | DiGeorge syndrome critical region gene 2 | SEQ ID NOS: 4171- |
| | | 4174 |
| DHH | Desert hedgehog | SEQ ID NO: 4175 |
| DHRS4 | Dehydrogenase/reductase (SDR family) | SEQ ID NOS: 4176- |
| | member 4 | 4183 |
| DHRS4L2 | Dehydrogenase/reductase (SDR family) | SEQ ID NOS: 4184- |
| | member 4 like 2 | 4193 |
| DHRS7 | Dehydrogenase/reductase (SDR family) | SEQ ID NOS: 4194- |
| | member 7 | 4201 |
| DHRS7C | Dehydrogenase/reductase (SDR family) | SEQ ID NOS: 4202- |
| | member 7C | 4204 |
| DHRS9 | Dehydrogenase/reductase (SDR family) | SEQ ID NOS: 4205- |
| | member 9 | 4212 |
| DHRSX | Dehydrogenase/reductase (SDR family) X- | SEQ ID NOS: 4213- |
| | linked | 4217 |
| DHX29 | DEAH (Asp-Glu-Ala-His) box polypeptide | SEQ ID NOS: 4218- |
| | 29 | 4220 |
| DHX30 | DEAH (Asp-Glu-Ala-His) box helicase 30 | SEQ ID NOS: 4221- |
| | | 4228 |
| DHX8 | DEAH (Asp-Glu-Ala-His) box polypeptide | SEQ ID NOS: 4229- |
| | 8 | 4233 |
| DIO2 | Deiodinase, iodothyronine, type II | SEQ ID NOS: 4234- |
| | | 4243 |
| DIXDC1 | DIX domain containing 1 | SEQ ID NOS: 4244- |
| | | 4247 |
| DKK1 | Dickkopf WNT signaling pathway inhibitor | SEQ ID NO: 4248 |
| | 1 | |
| DKK2 | Dickkopf WNT signaling pathway inhibitor | SEQ ID NOS: 4249- |
| | 2 | 4251 |
| DKK3 | Dickkopf WNT signaling pathway inhibitor | SEQ ID NOS: 4252- |
| | 3 | 4257 |
| DKK4 | Dickkopf WNT signaling pathway inhibitor | SEQ ID NO: 4258 |
| | 4 | |
| DKKL1 | Dickkopf-like 1 | SEQ ID NOS: 4259- |
| | | 4264 |
| DLG4 | Discs, large homolog 4 (Drosophila) | SEQ ID NOS: 4265- |
| | | 4273 |
| DLK1 | Delta-like 1 homolog (Drosophila) | SEQ ID NOS: 4274- |
| | | 4277 |
| DLL1 | Delta-like 1 (Drosophila) | SEQ ID NOS: 4278- |
| | | 4279 |
| DLL3 | Delta-like 3 (Drosophila) | SEQ ID NOS: 4280- |
| | | 4282 |
| DMBT1 | Deleted in malignant brain tumors 1 | SEQ ID NOS: 4283- |
| | | 4289 |
| DMKN | Dermokine | SEQ ID NOS: 4290- |
| | | 4336 |
| DMP1 | Dentin matrix acidic phosphoprotein 1 | SEQ ID NOS: 4337- |
| | | 4338 |
| DMRTA2 | DMRT-like family A2 | SEQ ID NOS: 4339- |
| | | 4340 |
| DNAAF5 | Dynein, axonemal, assembly factor 5 | SEQ ID NOS: 4341- |
| | | 4344 |
| DNAH14 | Dynein, axonemal, heavy chain 14 | SEQ ID NOS: 4345- |
| | | 4359 |
| DNAJB11 | DnaJ (Hsp40) homolog, subfamily B, | SEQ ID NOS: 4360- |
| | member 11 | 4361 |
| DNAJB9 | DnaJ (Hsp40) homolog, subfamily B, | SEQ ID NO: 4362 |
| | member 9 | |
| DNAJC25- | DNAJC25-GNG10 readthrough | SEQ ID NO: 4363 |
| GNG10 | | |
| DNAJC3 | DnaJ (Hsp40) homolog, subfamily C, | SEQ ID NOS: 4364- |
| | member 3 | 4365 |
| DNASE1 | Deoxyribonuclease I | SEQ ID NOS: 4366- |
| | | 4376 |
| DNASE1L1 | Deoxyribonuclease I-like 1 | SEQ ID NOS: 4377- |
| | | 4387 |
| DNASE1L2 | Deoxyribonuclease I-like 2 | SEQ ID NOS: 4388- |
| | | 4393 |
| DNASE1L3 | Deoxyribonuclease I-like 3 | SEQ ID NOS: 4394- |
| | | 4399 |
| DNASE2 | Deoxyribonuclease II, lysosomal | SEQ ID NOS: 4400- |
| | | 4401 |
| DNASE2B | Deoxyribonuclease II beta | SEQ ID NOS: 4402- |
| | | 4403 |
| DPEP1 | Dipeptidase 1 (renal) | SEQ ID NOS: 4404- |
| | | 4408 |
| DPEP2 | Dipeptidase 2 | SEQ ID NOS: 4409- |
| | | 4415 |
| DPEP3 | Dipeptidase 3 | SEQ ID NO: 4416 |
| DPF3 | D4, zinc and double PHD fingers, family 3 | SEQ ID NOS: 4417- |
| | | 4423 |
| DPP4 | Dipeptidyl-peptidase 4 | SEQ ID NOS: 4424- |
| | | 4428 |
| DPP7 | Dipeptidyl-peptidase 7 | SEQ ID NOS: 4429- |
| | | 4434 |
| DPT | Dermatopontin | SEQ ID NO: 4435 |
| DRAXIN | Dorsal inhibitory axon guidance protein | SEQ ID NO: 4436 |
| DSE | Dermatan sulfate epimerase | SEQ ID NOS: 4437- |
| | | 4445 |
| DSG2 | Desmoglein 2 | SEQ ID NOS: 4446- |
| | | 4447 |
| DSPP | Dentin sialophosphoprotein | SEQ ID NOS: 4448- |
| | | 4449 |
| DST | Dystonin | SEQ ID NOS: 4450- |
| | | 4468 |
| DUOX1 | Dual oxidase 1 | SEQ ID NOS: 4469- |
| | | 4473 |
| DYNLT3 | Dynein, light chain, Tctex-type 3 | SEQ ID NOS: 4474- |
| | | 4476 |
| E2F5 | E2F transcription factor 5, p130-binding | SEQ ID NOS: 4477- |
| | | 4483 |
| EBAG9 | Estrogen receptor binding site associated, | SEQ ID NOS: 4484- |
| | antigen, 9 | 4492 |
| EBI3 | Epstein-Barr virus induced 3 | SEQ ID NO: 4493 |
| ECHDC1 | Ethylmalonyl-CoA decarboxylase 1 | SEQ ID NOS: 4494- |
| | | 4512 |
| ECM1 | Extracellular matrix protein 1 | SEQ ID NOS: 4513- |
| | | 4515 |
| ECM2 | Extracellular matrix protein 2, female organ | SEQ ID NOS: 4516- |
| | and adipocyte specific | 4519 |
| ECSIT | ECSIT signalling integrator | SEQ ID NOS: 4520- |
| | | 4531 |
| EDDM3A | Epididymal protein 3A | SEQ ID NO: 4532 |
| EDDM3B | Epididymal protein 3B | SEQ ID NO: 4533 |
| EDEM2 | ER degradation enhancer, mannosidase | SEQ ID NOS: 4534- |
| | alpha-like 2 | 4535 |
| EDEM3 | ER degradation enhancer, mannosidase | SEQ ID NOS: 4536- |
| | alpha-like 3 | 4538 |
| EDIL3 | EGF-like repeats and discoidin I-like | SEQ ID NOS: 4539- |
| | domains 3 | 4540 |
| EDN1 | Endothelin 1 | SEQ ID NO: 4541 |
| EDN2 | Endothelin 2 | SEQ ID NO: 4542 |
| EDN3 | Endothelin 3 | SEQ ID NOS: 4543- |
| | | 4548 |
| EDNRB | Endothelin receptor type B | SEQ ID NOS: 4549- |
| | | 4557 |
| EFEMP1 | EGF containing fibulin-like extracellular | SEQ ID NOS: 4558- |
| | matrix protein 1 | 4568 |
| EFEMP2 | EGF containing fibulin-like extracellular | SEQ ID NOS: 4569- |
| | matrix protein 2 | 4580 |
| EFNA1 | Ephrin-A1 | SEQ ID NOS: 4581- |
| | | 4582 |
| EFNA2 | Ephrin-A2 | SEQ ID NO: 4583 |
| EFNA4 | Ephrin-A4 | SEQ ID NOS: 4584- |
| | | 4586 |
| EGFL6 | EGF-like-domain, multiple 6 | SEQ ID NOS: 4587- |
| | | 4588 |
| EGFL7 | EGF-like-domain, multiple 7 | SEQ ID NOS: 4589- |
| | | 4593 |
| EGFL8 | EGF-like-domain, multiple 8 | SEQ ID NOS: 4594- |
| | | 4596 |
| EGFLAM | EGF-like, fibronectin type III and laminin G | SEQ ID NOS: 4597- |
| | domains | 4605 |
| EGFR | Epidermal growth factor receptor | SEQ ID NOS: 4606- |
| | | 4613 |
| EHBP1 | EH domain binding protein 1 | SEQ ID NOS: 4614- |
| | | 4625 |
| EHF | Ets homologous factor | SEQ ID NOS: 4626- |
| | | 4635 |
| EHMT1 | Euchromatic histone-lysine N- | SEQ ID NOS: 4636- |
| | methyltransferase 1 | 4661 |
| EHMT2 | Euchromatic histone-lysine N- | SEQ ID NOS: 4662- |
| | methyltransferase 2 | 4666 |
| EIF2AK1 | Eukaryotic translation initiation factor 2- | SEQ ID NOS: 4667- |
| | alpha kinase 1 | 4670 |
| ELANE | Elastase, neutrophil expressed | SEQ ID NOS: 4671- |
| | | 4672 |
| ELN | Elastin | SEQ ID NOS: 4673- |
| | | 4695 |
| ELP2 | Elongator acetyltransferase complex subunit | SEQ ID NOS: 4696- |
| | 2 | 4708 |
| ELSPBP1 | Epididymal sperm binding protein 1 | SEQ ID NOS: 4709- |
| | | 4714 |
| EMC1 | ER membrane protein complex subunit 1 | SEQ ID NOS: 4715- |
| | | 4721 |
| EMC10 | ER membrane protein complex subunit 10 | SEQ ID NOS: 4722- |
| | | 4728 |
| EMC9 | ER membrane protein complex subunit 9 | SEQ ID NOS: 4729- |
| | | 4732 |
| EMCN | Endomucin | SEQ ID NOS: 4733- |
| | | 4737 |
| EMID1 | EMI domain containing 1 | SEQ ID NOS: 4738- |
| | | 4744 |
| EMILIN1 | Elastin microfibril interfacer 1 | SEQ ID NOS: 4745- |
| | | 4746 |
| EMILIN2 | Elastin microfibril interfacer 2 | SEQ ID NO: 4747 |
| EMILIN3 | Elastin microfibril interfacer 3 | SEQ ID NO: 4748 |
| ENAM | Enamelin | SEQ ID NO: 4749 |
| ENDOG | Endonuclease G | SEQ ID NO: 4750 |
| ENDOU | Endonuclease, polyU-specific | SEQ ID NOS: 4751- |
| | | 4753 |
| ENHO | Energy homeostasis associated | SEQ ID NO: 4754 |
| ENO4 | Enolase family member 4 | SEQ ID NOS: 4755- |
| | | 4759 |
| ENPP6 | Ectonucleotide | SEQ ID NOS: 4760- |
| | pyrophosphatase/phosphodiesterase 6 | 4761 |
| ENPP7 | Ectonucleotide | SEQ ID NOS: 4762- |
| | pyrophosphatase/phosphodiesterase 7 | 4763 |
| ENTPD5 | Ectonucleoside triphosphate | SEQ ID NOS: 4764- |
| | diphosphohydrolase 5 | 4768 |
| ENTPD8 | Ectonucleoside triphosphate | SEQ ID NOS: 4769- |
| | diphosphohydrolase 8 | 4772 |
| EOGT | EGF domain-specific O-linked N- | SEQ ID NOS: 4773- |
| | acetylglucosamine (GlcNAc) transferase | 4780 |
| EPCAM | Epithelial cell adhesion molecule | SEQ ID NOS: 4781- |
| | | 4784 |
| EPDR1 | Ependymin related 1 | SEQ ID NOS: 4785- |
| | | 4788 |
| EPGN | Epithelial mitogen | SEQ ID NOS: 4789- |
| | | 4797 |
| EPHA10 | EPH receptor A10 | SEQ ID NOS: 4798- |
| | | 4805 |
| EPHA3 | EPH receptor A3 | SEQ ID NOS: 4806- |
| | | 4808 |
| EPHA4 | EPH receptor A4 | SEQ ID NOS: 4809- |
| | | 4818 |
| EPHA7 | EPH receptor A7 | SEQ ID NOS: 4819- |
| | | 4820 |
| EPHA8 | EPH receptor A8 | SEQ ID NOS: 4821- |
| | | 4822 |
| EPHB2 | EPH receptor B2 | SEQ ID NOS: 4823- |
| | | 4827 |
| EPHB4 | EPH receptor B4 | SEQ ID NOS: 4828- |
| | | 4830 |
| EPHX3 | Epoxide hydrolase 3 | SEQ ID NOS: 4831- |
| | | 4834 |
| EPO | Erythropoietin | SEQ ID NO: 4835 |
| EPPIN | Epididymal peptidase inhibitor | SEQ ID NOS: 4836- |
| | | 4838 |
| EPPIN- | EPPIN-WFDC6 readthrough | SEQ ID NO: 4839 |
| WFDC6 | | |
| EPS15 | Epidermal growth factor receptor pathway | SEQ ID NOS: 4840- |
| | substrate 15 | 4842 |
| EPS8L1 | EPS8-like 1 | SEQ ID NOS: 4843- |
| | | 4848 |
| EPX | Eosinophil peroxidase | SEQ ID NO: 4849 |
| EPYC | Epiphycan | SEQ ID NOS: 4850- |
| | | 4851 |
| EQTN | Equatorin, sperm acrosome associated | SEQ ID NOS: 4852- |
| | | 4854 |
| ERAP1 | Endoplasmic reticulum aminopeptidase 1 | SEQ ID NOS: 4855- |
| | | 4859 |
| ERAP2 | Endoplasmic reticulum aminopeptidase 2 | SEQ ID NOS: 4860- |
| | | 4867 |
| ERBB3 | Erb-b2 receptor tyrosine kinase 3 | SEQ ID NOS: 4868- |
| | | 4881 |
| ERLIN1 | ER lipid raft associated 1 | SEQ ID NOS: 4885- |
| | | 4887 |
| ERLIN2 | ER lipid raft associated 2 | SEQ ID NOS: 4888- |
| | | 4896 |
| ERN1 | Endoplasmic reticulum to nucleus signaling | SEQ ID NOS: 4897- |
| | 1 | 4898 |
| ERN2 | Endoplasmic reticulum to nucleus signaling | SEQ ID NOS: 4899- |
| | 2 | 4903 |
| ERO1A | Endoplasmic reticulum oxidoreductase | SEQ ID NOS: 4904- |
| | alpha | 4910 |
| ERO1B | Endoplasmic reticulum oxidoreductase beta | SEQ ID NOS: 4911- |
| | | 4913 |
| ERP27 | Endoplasmic reticulum protein 27 | SEQ ID NOS: 4914- |
| | | 4915 |
| ERP29 | Endoplasmic reticulum protein 29 | SEQ ID NOS: 4916- |
| | | 4919 |
| ERP44 | Endoplasmic reticulum protein 44 | SEQ ID NO: 4920 |
| ERV3-1 | Endogenous retrovirus group 3, member 1 | SEQ ID NO: 4921 |
| ESM1 | Endothelial cell-specific molecule 1 | SEQ ID NOS: 4922- |
| | | 4924 |
| ESRP1 | Epithelial splicing regulatory protein 1 | SEQ ID NOS: 4925- |
| | | 4933 |
| EXOG | Endo/exonuclease (5′-3′), endonuclease G- | SEQ ID NOS: 4934- |
| | like | 4947 |
| EXTL1 | Exostosin-like glycosyltransferase 1 | SEQ ID NO: 4948 |
| EXTL2 | Exostosin-like glycosyltransferase 2 | SEQ ID NOS: 4949- |
| | | 4953 |
| F10 | Coagulation factor X | SEQ ID NOS: 4954- |
| | | 4957 |
| F11 | Coagulation factor XI | SEQ ID NOS: 4958- |
| | | 4962 |
| F12 | Coagulation factor XII (Hageman factor) | SEQ ID NO: 4963 |
| F13B | Coagulation factor XIII, B polypeptide | SEQ ID NO: 4964 |
| F2 | Coagulation factor II (thrombin) | SEQ ID NOS: 4965- |
| | | 4967 |
| F2R | Coagulation factor II (thrombin) receptor | SEQ ID NOS: 4968- |
| | | 4969 |
| F2RL3 | Coagulation factor II (thrombin) receptor- | SEQ ID NOS: 4970- |
| | like 3 | 4971 |
| F5 | Coagulation factor V (proaccelerin, labile | SEQ ID NOS: 4972- |
| | factor) | 4973 |
| F7 | Coagulation factor VII (serum prothrombin | SEQ ID NOS: 4974- |
| | conversion accelerator) | 4977 |
| F8 | Coagulation factor VIII, procoagulant | SEQ ID NOS: 4978- |
| | component | 4983 |
| F9 | Coagulation factor IX | SEQ ID NOS: 4984- |
| | | 4985 |
| FABP6 | Fatty acid binding protein 6, ileal | SEQ ID NOS: 4986- |
| | | 4988 |
| FAM107B | Family with sequence similarity 107, | SEQ ID NOS: 4989- |
| | member B | 5010 |
| FAM131A | Family with sequence similarity 131, | SEQ ID NOS: 5011- |
| | member A | 5019 |
| FAM132A | Family with sequence similarity 132, | SEQ ID NO: 1795 |
| | member A | |
| FAM132B | Family with sequence similarity 132, | SEQ ID NOS: 4882- |
| | member B | 4884 |
| FAM150A | Family with sequence similarity 150, | SEQ ID NOS: 737-738 |
| | member A | |
| FAM150B | Family with sequence similarity 150, | SEQ ID NOS: 739-745 |
| | member B | |
| FAM171A1 | Family with sequence similarity 171, | SEQ ID NOS: 5020- |
| | member A1 | 5021 |
| FAM171B | Family with sequence similarity 171, | SEQ ID NOS: 5022- |
| | member B | 5023 |
| FAM172A | Family with sequence similarity 172, | SEQ ID NOS: 5024- |
| | member A | 5028 |
| FAM175A | Family with sequence similarity 175, | SEQ ID NOS: 64-71 |
| | member A | |
| FAM177A1 | Family with sequence similarity 177, | SEQ ID NOS: 5029- |
| | member A1 | 5038 |
| FAM179B | Family with sequence similarity 179, | SEQ ID NOS: 13628- |
| | member B | 13633 |
| FAM180A | Family with sequence similarity 180, | SEQ ID NOS: 5039- |
| | member A | 5041 |
| FAM189A1 | Family with sequence similarity 189, | SEQ ID NOS: 5042- |
| | member A1 | 5043 |
| FAM198A | Family with sequence similarity 198, | SEQ ID NOS: 5044- |
| | member A | 5046 |
| FAM19A1 | Family with sequence similarity 19 | SEQ ID NOS: 5047- |
| | (chemokine (C-C motif)-like), member A1 | 5049 |
| FAM19A2 | Family with sequence similarity 19 | SEQ ID NOS: 5050- |
| | (chemokine (C-C motif)-like), member A2 | 5057 |
| FAM19A3 | Family with sequence similarity 19 | SEQ ID NOS: 5058- |
| | (chemokine (C-C motif)-like), member A3 | 5059 |
| FAM19A4 | Family with sequence similarity 19 | SEQ ID NOS: 5060- |
| | (chemokine (C-C motif)-like), member A4 | 5062 |
| FAM19A5 | Family with sequence similarity 19 | SEQ ID NOS: 5063- |
| | (chemokine (C-C motif)-like), member A5 | 5066 |
| FAM20A | Family with sequence similarity 20, | SEQ ID NOS: 5067- |
| | member A | 5070 |
| FAM20C | Family with sequence similarity 20, | SEQ ID NO: 5071 |
| | member C | |
| FAM213A | Family with sequence similarity 213, | SEQ ID NOS: 5072- |
| | member A | 5077 |
| FAM26D | Family with sequence similarity 26, | SEQ ID NOS: 2006- |
| | member D | 2010 |
| FAM46B | Family with sequence similarity 46, | SEQ ID NO: 5078 |
| | member B | |
| FAM57A | Family with sequence similarity 57, | SEQ ID NOS: 5079- |
| | member A | 5084 |
| FAM78A | Family with sequence similarity 78, | SEQ ID NOS: 5085- |
| | member A | 5087 |
| FAM96A | Family with sequence similarity 96, | SEQ ID NOS: 5088- |
| | member A | 5092 |
| FAM9B | Family with sequence similarity 9, member | SEQ ID NOS: 5093- |
| | B | 5096 |
| FAP | Fibroblast activation protein, alpha | SEQ ID NOS: 5097- |
| | | 5103 |
| FAS | Fas cell surface death receptor | SEQ ID NOS: 5104- |
| | | 5113 |
| FAT1 | FAT atypical cadherin 1 | SEQ ID NOS: 5114- |
| | | 5120 |
| FBLN1 | Fibulin 1 | SEQ ID NOS: 5121- |
| | | 5133 |
| FBLN2 | Fibulin 2 | SEQ ID NOS: 5134- |
| | | 5139 |
| FBLN5 | Fibulin 5 | SEQ ID NOS: 5140- |
| | | 5145 |
| FBLN7 | Fibulin 7 | SEQ ID NOS: 5146- |
| | | 5151 |
| FBN1 | Fibrillin 1 | SEQ ID NOS: 5152- |
| | | 5155 |
| FBN2 | Fibrillin 2 | SEQ ID NOS: 5156- |
| | | 5161 |
| FBN3 | Fibrillin 3 | SEQ ID NOS: 5162- |
| | | 5166 |
| FBXW7 | F-box and WD repeat domain containing 7, | SEQ ID NOS: 5167- |
| | E3 ubiquitin protein ligase | 5177 |
| FCAR | Fc fragment of IgA receptor | SEQ ID NOS: 5178- |
| | | 5187 |
| FCGBP | Fc fragment of IgG binding protein | SEQ ID NOS: 5188- |
| | | 5190 |
| FCGR1B | Fc fragment of IgG, high affinity Ib, | SEQ ID NOS: 5191- |
| | receptor (CD64) | 5196 |
| FCGR3A | Fc fragment of IgG, low affinity IIIa, | SEQ ID NOS: 5197- |
| | receptor (CD16a) | 5203 |
| FCGRT | Fc fragment of IgG, receptor, transporter, | SEQ ID NOS: 5204- |
| | alpha | 5214 |
| FCMR | Fc fragment of IgM receptor | SEQ ID NOS: 5215- |
| | | 5221 |
| FCN1 | Ficolin (collagen/fibrinogen domain | SEQ ID NOS: 5222- |
| | containing) 1 | 5223 |
| FCN2 | Ficolin (collagen/fibrinogen domain | SEQ ID NOS: 5224- |
| | containing lectin) 2 | 5225 |
| FCN3 | Ficolin (collagen/fibrinogen domain | SEQ ID NOS: 5226- |
| | containing) 3 | 5227 |
| FCRL1 | Fc receptor-like 1 | SEQ ID NOS: 5228- |
| | | 5230 |
| FCRL3 | Fc receptor-like 3 | SEQ ID NOS: 5231- |
| | | 5236 |
| FCRL5 | Fc receptor-like 5 | SEQ ID NOS: 5237- |
| | | 5239 |
| FCRLA | Fc receptor-like A | SEQ ID NOS: 5240- |
| | | 5251 |
| FCRLB | Fc receptor-like B | SEQ ID NOS: 5252- |
| | | 5256 |
| FDCSP | Follicular dendritic cell secreted protein | SEQ ID NO: 5257 |
| FETUB | Fetuin B | SEQ ID NOS: 5258- |
| | | 5264 |
| FGA | Fibrinogen alpha chain | SEQ ID NOS: 5265- |
| | | 5267 |
| FGB | Fibrinogen beta chain | SEQ ID NOS: 5268- |
| | | 5270 |
| FGF10 | Fibroblast growth factor 10 | SEQ ID NOS: 5271- |
| | | 5272 |
| FGF17 | Fibroblast growth factor 17 | SEQ ID NOS: 5273- |
| | | 5274 |
| FGF18 | Fibroblast growth factor 18 | SEQ ID NO: 5275 |
| FGF19 | Fibroblast growth factor 19 | SEQ ID NO: 5276 |
| FGF21 | Fibroblast growth factor 21 | SEQ ID NOS: 5277- |
| | | 5278 |
| FGF22 | Fibroblast growth factor 22 | SEQ ID NOS: 5279- |
| | | 5280 |
| FGF23 | Fibroblast growth factor 23 | SEQ ID NO: 5281 |
| FGF3 | Fibroblast growth factor 3 | SEQ ID NO: 5282 |
| FGF4 | Fibroblast growth factor 4 | SEQ ID NO: 5283 |
| FGF5 | Fibroblast growth factor 5 | SEQ ID NOS: 5284- |
| | | 5286 |
| FGF7 | Fibroblast growth factor 7 | SEQ ID NOS: 5287- |
| | | 5291 |
| FGF8 | Fibroblast growth factor 8 (androgen- | SEQ ID NOS: 5292- |
| | induced) | 5297 |
| FGFBP1 | Fibroblast growth factor binding protein 1 | SEQ ID NO: 5298 |
| FGFBP2 | Fibroblast growth factor binding protein 2 | SEQ ID NO: 5299 |
| FGFBP3 | Fibroblast growth factor binding protein 3 | SEQ ID NO: 5300 |
| FGFR1 | Fibroblast growth factor receptor 1 | SEQ ID NOS: 5301- |
| | | 5322 |
| FGFR2 | Fibroblast growth factor receptor 2 | SEQ ID NOS: 5323- |
| | | 5344 |
| FGFR3 | Fibroblast growth factor receptor 3 | SEQ ID NOS: 5345- |
| | | 5352 |
| FGFR4 | Fibroblast growth factor receptor 4 | SEQ ID NOS: 5353- |
| | | 5362 |
| FGFRL1 | Fibroblast growth factor receptor-like 1 | SEQ ID NOS: 5363- |
| | | 5368 |
| FGG | Fibrinogen gamma chain | SEQ ID NOS: 5369- |
| | | 5374 |
| FGL1 | Fibrinogen-like 1 | SEQ ID NOS: 5375- |
| | | 5381 |
| FGL2 | Fibrinogen-like 2 | SEQ ID NOS: 5382- |
| | | 5383 |
| FHL1 | Four and a half LIM domains 1 | SEQ ID NOS: 5384- |
| | | 5411 |
| FHOD3 | Formin homology 2 domain containing 3 | SEQ ID NOS: 5412- |
| | | 5418 |
| FIBIN | Fin bud initiation factor homolog | SEQ ID NO: 5419 |
| | (zebrafish) | |
| FICD | FIC domain containing | SEQ ID NOS: 5420- |
| | | 5423 |
| FIGF | C-fos induced growth factor (vascular | SEQ ID NO: 14054 |
| | endothelial growth factor D) | |
| FJX1 | Four jointed box 1 | SEQ ID NO: 5424 |
| FKBP10 | FK506 binding protein 10, 65 kDa | SEQ ID NOS: 5425- |
| | | 5430 |
| FKBP11 | FK506 binding protein 11, 19 kDa | SEQ ID NOS: 5431- |
| | | 5437 |
| FKBP14 | FK506 binding protein 14, 22 kDa | SEQ ID NOS: 5438- |
| | | 5440 |
| FKBP2 | FK506 binding protein 2, 13 kDa | SEQ ID NOS: 5441- |
| | | 5444 |
| FKBP7 | FK506 binding protein 7 | SEQ ID NOS: 5445- |
| | | 5450 |
| FKBP9 | FK506 binding protein 9, 63 kDa | SEQ ID NOS: 5451- |
| | | 5454 |
| FLT1 | Fms-related tyrosine kinase 1 | SEQ ID NOS: 5455- |
| | | 5463 |
| FLT4 | Fms-related tyrosine kinase 4 | SEQ ID NOS: 5464- |
| | | 5468 |
| FMO1 | Flavin containing monooxygenase 1 | SEQ ID NOS: 5469- |
| | | 5473 |
| FMO2 | Flavin containing monooxygenase 2 (non- | SEQ ID NOS: 5474- |
| | functional) | 5476 |
| FMO3 | Flavin containing monooxygenase 3 | SEQ ID NOS: 5477- |
| | | 5479 |
| FMO5 | Flavin containing monooxygenase 5 | SEQ ID NOS: 5480- |
| | | 5486 |
| FMOD | Fibromodulin | SEQ ID NO: 5487 |
| FN1 | Fibronectin 1 | SEQ ID NOS: 5488- |
| | | 5500 |
| FNDC1 | Fibronectin type III domain containing 1 | SEQ ID NOS: 5501- |
| | | 5502 |
| FNDC7 | Fibronectin type III domain containing 7 | SEQ ID NOS: 5503- |
| | | 5504 |
| FOCAD | Focadhesin | SEQ ID NOS: 5505- |
| | | 5511 |
| FOLR2 | Folate receptor 2 (fetal) | SEQ ID NOS: 5512- |
| | | 5521 |
| FOLR3 | Folate receptor 3 (gamma) | SEQ ID NOS: 5522- |
| | | 5526 |
| FOXRED2 | FAD-dependent oxidoreductase domain | SEQ ID NOS: 5527- |
| | containing 2 | 5530 |
| FP325331.1 | Uncharacterized protein | SEQ ID NO: 5531 |
| | UNQ6126/PRO20091 | |
| FPGS | Folylpolyglutamate synthase | SEQ ID NOS: 5539- |
| | | 5545 |
| FRAS1 | Fraser extracellular matrix complex subunit | SEQ ID NOS: 5546- |
| | 1 | 5551 |
| FREM1 | FRAS1 related extracellular matrix 1 | SEQ ID NOS: 5552- |
| | | 5556 |
| FREM3 | FRAS1 related extracellular matrix 3 | SEQ ID NO: 5557 |
| FRMPD2 | FERM and PDZ domain containing 2 | SEQ ID NOS: 5558- |
| | | 5561 |
| FRZB | Frizzled-related protein | SEQ ID NO: 5562 |
| FSHB | Follicle stimulating hormone, beta | SEQ ID NOS: 5563- |
| | polypeptide | 5565 |
| FSHR | Follicle stimulating hormone receptor | SEQ ID NOS: 5566- |
| | | 5569 |
| FST | Follistatin | SEQ ID NOS: 5570- |
| | | 5573 |
| FSTL1 | Follistatin-like 1 | SEQ ID NOS: 5574- |
| | | 5577 |
| FSTL3 | Follistatin-like 3 (secreted glycoprotein) | SEQ ID NOS: 5578- |
| | | 5583 |
| FSTL4 | Follistatin-like 4 | SEQ ID NOS: 5584- |
| | | 5586 |
| FSTL5 | Follistatin-like 5 | SEQ ID NOS: 5587- |
| | | 5589 |
| FTCDNL1 | Formiminotransferase cyclodeaminase N- | SEQ ID NOS: 5590- |
| | terminal like | 5593 |
| FUCA1 | Fucosidase, alpha-L- 1, tissue | SEQ ID NO: 5594 |
| FUCA2 | Fucosidase, alpha-L- 2, plasma | SEQ ID NOS: 5595- |
| | | 5596 |
| FURIN | Furin (paired basic amino acid cleaving | SEQ ID NOS: 5597- |
| | enzyme) | 5603 |
| FUT10 | Fucosyltransferase 10 (alpha (1,3) | SEQ ID NOS: 5604- |
| | fucosyltransferase) | 5606 |
| FUT11 | Fucosyltransferase 11 (alpha (1,3) | SEQ ID NOS: 5607- |
| | fucosyltransferase) | 5608 |
| FXN | Frataxin | SEQ ID NOS: 5609- |
| | | 5616 |
| FXR1 | Fragile X mental retardation, autosomal | SEQ ID NOS: 5617- |
| | homolog 1 | 5629 |
| FXYD3 | FXYD domain containing ion transport | SEQ ID NOS: 5630- |
| | regulator 3 | 5642 |
| GABBR1 | Gamma-aminobutyric acid (GABA) B | SEQ ID NOS: 5643- |
| | receptor, 1 | 5654 |
| GABRA1 | Gamma-aminobutyric acid (GABA) A | SEQ ID NOS: 5655- |
| | receptor, alpha 1 | 5670 |
| GABRA2 | Gamma-aminobutyric acid (GABA) A | SEQ ID NOS: 5671- |
| | receptor, alpha 2 | 5685 |
| GABRA5 | Gamma-aminobutyric acid (GABA) A | SEQ ID NOS: 5686- |
| | receptor, alpha 5 | 5694 |
| GABRG3 | Gamma-aminobutyric acid (GABA) A | SEQ ID NOS: 5695- |
| | receptor, gamma 3 | 5700 |
| GABRP | Gamma-aminobutyric acid (GABA) A | SEQ ID NOS: 5701- |
| | receptor, pi | 5709 |
| GAL | Galanin/GMAP prepropeptide | SEQ ID NO: 5710 |
| GAL3ST1 | Galactose-3-O-sulfotransferase 1 | SEQ ID NOS: 5711- |
| | | 5732 |
| GAL3ST2 | Galactose-3-O-sulfotransferase 2 | SEQ ID NO: 5733 |
| GAL3ST3 | Galactose-3-O-sulfotransferase 3 | SEQ ID NOS: 5734- |
| | | 5735 |
| GALC | Galactosylceramidase | SEQ ID NOS: 5736- |
| | | 5745 |
| GALNS | Galactosamine (N-acetyl)-6-sulfatase | SEQ ID NOS: 5746- |
| | | 5751 |
| GALNT10 | Polypeptide N- | SEQ ID NOS: 5752- |
| | acetylgalactosaminyltransferase 10 | 5755 |
| GALNT12 | Polypeptide N- | SEQ ID NOS: 5756- |
| | acetylgalactosaminyltransferase 12 | 5757 |
| GALNT15 | Polypeptide N- | SEQ ID NOS: 5758- |
| | acetylgalactosaminyltransferase 15 | 5761 |
| GALNT2 | Polypeptide N- | SEQ ID NO: 5762 |
| | acetylgalactosaminyltransferase 2 | |
| GALNT6 | Polypeptide N- | SEQ ID NOS: 5763- |
| | acetylgalactosaminyltransferase 6 | 5774 |
| GALNT8 | Polypeptide N- | SEQ ID NOS: 5775- |
| | acetylgalactosaminyltransferase 8 | 5778 |
| GALNTL6 | Polypeptide N- | SEQ ID NOS: 5779- |
| | acetylgalactosaminyltransferase-like 6 | 5782 |
| GALP | Galanin-like peptide | SEQ ID NOS: 5783- |
| | | 5785 |
| GANAB | Glucosidase, alpha; neutral AB | SEQ ID NOS: 5786- |
| | | 5794 |
| GARS | Glycyl-tRNA synthetase | SEQ ID NOS: 5795- |
| | | 5798 |
| GAS1 | Growth arrest-specific 1 | SEQ ID NO: 5799 |
| GAS6 | Growth arrest-specific 6 | SEQ ID NO: 5800 |
| GAST | Gastrin | SEQ ID NO: 5801 |
| GBA | Glucosidase, beta, acid | SEQ ID NOS: 5811- |
| | | 5814 |
| GBGT1 | Globoside alpha-1,3-N- | SEQ ID NOS: 5815- |
| | acetylgalactosaminyltransferase 1 | 5823 |
| GC | Group-specific component (vitamin D | SEQ ID NOS: 5824- |
| | binding protein) | 5828 |
| GCG | Glucagon | SEQ ID NOS: 5829- |
| | | 5830 |
| GCGR | Glucagon receptor | SEQ ID NOS: 5831- |
| | | 5833 |
| GCNT7 | Glucosaminyl (N-acetyl) transferase family | SEQ ID NOS: 5834- |
| | member 7 | 5835 |
| GCSH | Glycine cleavage system protein H | SEQ ID NOS: 5836- |
| | (aminomethyl carrier) | 5844 |
| GDF1 | Growth differentiation factor 1 | SEQ ID NO: 5845 |
| GDF10 | Growth differentiation factor 10 | SEQ ID NO: 5846 |
| GDF11 | Growth differentiation factor 11 | SEQ ID NOS: 5847- |
| | | 5848 |
| GDF15 | Growth differentiation factor 15 | SEQ ID NOS: 5849- |
| | | 5851 |
| GDF2 | Growth differentiation factor 2 | SEQ ID NO: 5852 |
| GDF3 | Growth differentiation factor 3 | SEQ ID NO: 5853 |
| GDF5 | Growth differentiation factor 5 | SEQ ID NOS: 5854- |
| | | 5855 |
| GDF6 | Growth differentiation factor 6 | SEQ ID NOS: 5856- |
| | | 5858 |
| GDF7 | Growth differentiation factor 7 | SEQ ID NO: 5859 |
| GDF9 | Growth differentiation factor 9 | SEQ ID NOS: 5860- |
| | | 5864 |
| GDNF | Glial cell derived neurotrophic factor | SEQ ID NOS: 5865- |
| | | 5872 |
| GFOD2 | Glucose-fructose oxidoreductase domain | SEQ ID NOS: 5873- |
| | containing 2 | 5878 |
| GFPT2 | Glutamine-fructose-6-phosphate | SEQ ID NOS: 5879- |
| | transaminase 2 | 5881 |
| GFRA2 | GDNF family receptor alpha 2 | SEQ ID NOS: 5882- |
| | | 5888 |
| GFRA4 | GDNF family receptor alpha 4 | SEQ ID NOS: 5889- |
| | | 5891 |
| GGA2 | Golgi-associated, gamma adaptin ear | SEQ ID NOS: 5892- |
| | containing, ARF binding protein 2 | 5900 |
| GGH | Gamma-glutamyl hydrolase (conjugase, | SEQ ID NO: 5901 |
| | folylpolygammaglutamyl hydrolase) | |
| GGT1 | Gamma-glutamyltransferase 1 | SEQ ID NOS: 5902- |
| | | 5924 |
| GGT5 | Gamma-glutamyltransferase 5 | SEQ ID NOS: 5925- |
| | | 5929 |
| GH1 | Growth hormone 1 | SEQ ID NOS: 5930- |
| | | 5934 |
| GH2 | Growth hormone 2 | SEQ ID NOS: 5935- |
| | | 5939 |
| GHDC | GH3 domain containing | SEQ ID NOS: 5940- |
| | | 5947 |
| GHRH | Growth hormone releasing hormone | SEQ ID NOS: 5948- |
| | | 5950 |
| GHRHR | Growth hormone releasing hormone | SEQ ID NOS: 5951- |
| | receptor | 5956 |
| GHRL | Ghrelin/obestatin prepropeptide | SEQ ID NOS: 5957- |
| | | 5967 |
| GIF | Gastric intrinsic factor (vitamin B synthesis) | SEQ ID NOS: 5968- |
| | | 5969 |
| GIP | Gastric inhibitory polypeptide | SEQ ID NO: 5970 |
| GKN1 | Gastrokine 1 | SEQ ID NO: 5971 |
| GKN2 | Gastrokine 2 | SEQ ID NOS: 5972- |
| | | 5973 |
| GLA | Galactosidase, alpha | SEQ ID NOS: 5974- |
| | | 5975 |
| GLB1 | Galactosidase, beta 1 | SEQ ID NOS: 5976- |
| | | 5984 |
| GLB1L | Galactosidase, beta 1-like | SEQ ID NOS: 5985- |
| | | 5992 |
| GLB1L2 | Galactosidase, beta 1-like 2 | SEQ ID NOS: 5993- |
| | | 5994 |
| GLCE | Glucuronic acid epimerase | SEQ ID NOS: 5995- |
| | | 5996 |
| GLG1 | Golgi glycoprotein 1 | SEQ ID NOS: 5997- |
| | | 6004 |
| GLIPR1 | GLI pathogenesis-related 1 | SEQ ID NOS: 6005- |
| | | 6008 |
| GLIPR1L1 | GLI pathogenesis-related 1 like 1 | SEQ ID NOS: 6009- |
| | | 6012 |
| GLIS3 | GLIS family zinc finger 3 | SEQ ID NOS: 6013- |
| | | 6021 |
| GLMP | Glycosylated lysosomal membrane protein | SEQ ID NOS: 6022- |
| | | 6030 |
| GLRB | Glycine receptor, beta | SEQ ID NOS: 6031- |
| | | 6036 |
| GLS | Glutaminase | SEQ ID NOS: 6037- |
| | | 6044 |
| GLT6D1 | Glycosyltransferase 6 domain containing 1 | SEQ ID NOS: 6045- |
| | | 6046 |
| GLTPD2 | Glycolipid transfer protein domain | SEQ ID NO: 6047 |
| | containing 2 | |
| GLUD1 | Glutamate dehydrogenase 1 | SEQ ID NO: 6048 |
| GM2A | GM2 ganglioside activator | SEQ ID NOS: 6049- |
| | | 6051 |
| GML | Glycosylphosphatidylinositol anchored | SEQ ID NOS: 6052- |
| | molecule like | 6053 |
| GNAS | GNAS complex locus | SEQ ID NOS: 6054- |
| | | 6075 |
| GNLY | Granulysin | SEQ ID NOS: 6076- |
| | | 6079 |
| GNPTG | N-acetylglucosamine-1-phosphate | SEQ ID NOS: 6080- |
| | transferase, gamma subunit | 6084 |
| GNRH1 | Gonadotropin-releasing hormone 1 | SEQ ID NOS: 6085- |
| | (luteinizing-releasing hormone) | 6086 |
| GNRH2 | Gonadotropin-releasing hormone 2 | SEQ ID NOS: 6087- |
| | | 6090 |
| GNS | Glucosamine (N-acetyl)-6-sulfatase | SEQ ID NOS: 6091- |
| | | 6096 |
| GOLM1 | Golgi membrane protein 1 | SEQ ID NOS: 6097- |
| | | 6101 |
| GORAB | Golgin, RAB6-interacting | SEQ ID NOS: 6102- |
| | | 6104 |
| GOT2 | Glutamic-oxaloacetic transaminase 2, | SEQ ID NOS: 6105- |
| | mitochondrial | 6107 |
| GP2 | Glycoprotein 2 (zymogen granule | SEQ ID NOS: 6108- |
| | membrane) | 6116 |
| GP6 | Glycoprotein VI (platelet) | SEQ ID NOS: 6117- |
| | | 6120 |
| GPC2 | Glypican 2 | SEQ ID NOS: 6121- |
| | | 6122 |
| GPC5 | Glypican 5 | SEQ ID NOS: 6123- |
| | | 6125 |
| GPC6 | Glypican 6 | SEQ ID NOS: 6126- |
| | | 6127 |
| GPD2 | Glycerol-3-phosphate dehydrogenase 2 | SEQ ID NOS: 6128- |
| | (mitochondrial) | 6136 |
| GPER1 | G protein-coupled estrogen receptor 1 | SEQ ID NOS: 6137- |
| | | 6143 |
| GPHA2 | Glycoprotein hormone alpha 2 | SEQ ID NOS: 6144- |
| | | 6146 |
| GPHB5 | Glycoprotein hormone beta 5 | SEQ ID NOS: 6147- |
| | | 6148 |
| GPIHBP1 | Glycosylphosphatidylinositol anchored high | SEQ ID NO: 6149 |
| | density lipoprotein binding protein 1 | |
| GPLD1 | Glycosylphosphatidylinositol specific | SEQ ID NO: 6150 |
| | phospholipase D1 | |
| GPNMB | Glycoprotein (transmembrane) nmb | SEQ ID NOS: 6151- |
| | | 6153 |
| GPR162 | G protein-coupled receptor 162 | SEQ ID NOS: 6154- |
| | | 6157 |
| GPX3 | Glutathione peroxidase 3 | SEQ ID NOS: 6158- |
| | | 6165 |
| GPX4 | Glutathione peroxidase 4 | SEQ ID NOS: 6166- |
| | | 6176 |
| GPX5 | Glutathione peroxidase 5 | SEQ ID NOS: 6177- |
| | | 6178 |
| GPX6 | Glutathione peroxidase 6 | SEQ ID NOS: 6179- |
| | | 6181 |
| GPX7 | Glutathione peroxidase 7 | SEQ ID NO: 6182 |
| GREM1 | Gremlin 1, DAN family BMP antagonist | SEQ ID NOS: 6183- |
| | | 6185 |
| GREM2 | Gremlin 2, DAN family BMP antagonist | SEQ ID NO: 6186 |
| GRHL3 | Grainyhead-like transcription factor 3 | SEQ ID NOS: 6187- |
| | | 6192 |
| GRIA2 | Glutamate receptor, ionotropic, AMPA 2 | SEQ ID NOS: 6193- |
| | | 6204 |
| GRIA3 | Glutamate receptor, ionotropic, AMPA 3 | SEQ ID NOS: 6205- |
| | | 6210 |
| GRIA4 | Glutamate receptor, ionotropic, AMPA 4 | SEQ ID NOS: 6211- |
| | | 6222 |
| GRIK2 | Glutamate receptor, ionotropic, kainate 2 | SEQ ID NOS: 6223- |
| | | 6231 |
| GRIN2B | Glutamate receptor, ionotropic, N-methyl | SEQ ID NOS: 6232- |
| | D-aspartate 2B | 6235 |
| GRM2 | Glutamate receptor, metabotropic 2 | SEQ ID NOS: 6236- |
| | | 6239 |
| GRM3 | Glutamate receptor, metabotropic 3 | SEQ ID NOS: 6240- |
| | | 6244 |
| GRM5 | Glutamate receptor, metabotropic 5 | SEQ ID NOS: 6245- |
| | | 6249 |
| GRN | Granulin | SEQ ID NOS: 6250- |
| | | 6265 |
| GRP | Gastrin-releasing peptide | SEQ ID NOS: 6266- |
| | | 6270 |
| GSG1 | Germ cell associated 1 | SEQ ID NOS: 6280- |
| | | 6288 |
| GSN | Gelsolin | SEQ ID NOS: 6289- |
| | | 6297 |
| GTDC1 | Glycosyltransferase-like domain containing | SEQ ID NOS: 6298- |
| | 1 | 6311 |
| GTPBP10 | GTP-binding protein 10 (putative) | SEQ ID NOS: 6312- |
| | | 6320 |
| GUCA2A | Guanylate cyclase activator 2A (guanylin) | SEQ ID NO: 6321 |
| GUCA2B | Guanylate cyclase activator 2B | SEQ ID NO: 6322 |
| | (uroguanylin) | |
| GUSB | Glucuronidase, beta | SEQ ID NOS: 6323- |
| | | 6327 |
| GVQW1 | GVQW motif containing 1 | SEQ ID NO: 6328 |
| GXYLT1 | Glucoside xylosyltransferase 1 | SEQ ID NOS: 6329- |
| | | 6330 |
| GXYLT2 | Glucoside xylosyltransferase 2 | SEQ ID NOS: 6331- |
| | | 6333 |
| GYLTL1B | Glycosyltransferase-like 1B | SEQ ID NOS: 7702- |
| | | 7707 |
| GYPB | Glycophorin B (MNS blood group) | SEQ ID NOS: 6334- |
| | | 6342 |
| GZMA | Granzyme A (granzyme 1, cytotoxic T- | SEQ ID NO: 6343 |
| | lymphocyte-associated serine esterase 3) | |
| GZMB | Granzyme B (granzyme 2, cytotoxic T- | SEQ ID NOS: 6344- |
| | lymphocyte-associated serine esterase 1) | 6352 |
| GZMH | Granzyme H (cathepsin G-like 2, protein h- | SEQ ID NOS: 6353- |
| | CCPX) | 6355 |
| GZMK | Granzyme K (granzyme 3; tryptase II) | SEQ ID NO: 6356 |
| GZMM | Granzyme M (lymphocyte met-ase 1) | SEQ ID NOS: 6357- |
| | | 6358 |
| H6PD | Hexose-6-phosphate dehydrogenase | SEQ ID NOS: 6359- |
| | (glucose 1-dehydrogenase) | 6360 |
| HABP2 | Hyaluronan binding protein 2 | SEQ ID NOS: 6361- |
| | | 6362 |
| HADHB | Hydroxyacyl-CoA dehydrogenase/3- | SEQ ID NOS: 6363- |
| | ketoacyl-CoA thiolase/enoyl-CoA hydratase | 6369 |
| | (trifunctional protein), beta subunit | |
| HAMP | Hepcidin antimicrobial peptide | SEQ ID NOS: 6370- |
| | | 6371 |
| HAPLN1 | Hyaluronan and proteoglycan link protein 1 | SEQ ID NOS: 6372- |
| | | 6378 |
| HAPLN2 | Hyaluronan and proteoglycan link protein 2 | SEQ ID NOS: 6379- |
| | | 6380 |
| HAPLN3 | Hyaluronan and proteoglycan link protein 3 | SEQ ID NOS: 6381- |
| | | 6384 |
| HAPLN4 | Hyaluronan and proteoglycan link protein 4 | SEQ ID NO: 6385 |
| HARS2 | Histidyl-tRNA synthetase 2, mitochondrial | SEQ ID NOS: 6386- |
| | | 6401 |
| HAVCR1 | Hepatitis A virus cellular receptor 1 | SEQ ID NOS: 6402- |
| | | 6406 |
| HCCS | Holocytochrome c synthase | SEQ ID NOS: 6407- |
| | | 6409 |
| HCRT | Hypocretin (orexin) neuropeptide precursor | SEQ ID NO: 6410 |
| HEATR5A | HEAT repeat containing 5A | SEQ ID NOS: 6414- |
| | | 6420 |
| HEPH | Hephaestin | SEQ ID NOS: 6421- |
| | | 6428 |
| HEXA | Hexosaminidase A (alpha polypeptide) | SEQ ID NOS: 6429- |
| | | 6438 |
| HEXB | Hexosaminidase B (beta polypeptide) | SEQ ID NOS: 6439- |
| | | 6444 |
| HFE2 | Hemochromatosis type 2 (juvenile) | SEQ ID NOS: 6445- |
| | | 6451 |
| HGF | Hepatocyte growth factor (hepapoietin A; | SEQ ID NOS: 6452- |
| | scatter factor) | 6462 |
| HGFAC | HGF activator | SEQ ID NOS: 6463- |
| | | 6464 |
| HHIP | Hedgehog interacting protein | SEQ ID NOS: 6465- |
| | | 6466 |
| HHIPL1 | HHIP-like 1 | SEQ ID NOS: 6467- |
| | | 6468 |
| HHIPL2 | HHIP-like 2 | SEQ ID NO: 6469 |
| HHLA1 | HERV-H LTR-associating 1 | SEQ ID NOS: 6470- |
| | | 6471 |
| HHLA2 | HERV-H LTR-associating 2 | SEQ ID NOS: 6472- |
| | | 6482 |
| HIBADH | 3-hydroxyisobutyrate dehydrogenase | SEQ ID NOS: 6483- |
| | | 6485 |
| HINT2 | Histidine triad nucleotide binding protein 2 | SEQ ID NO: 6486 |
| HLA-A | Major histocompatibility complex, class I, | SEQ ID NOS: 6487- |
| | A | 6491 |
| HLA-C | Major histocompatibility complex, class I, C | SEQ ID NOS: 6492- |
| | | 6496 |
| HLA-DOA | Major histocompatibility complex, class II, | SEQ ID NOS: 6497- |
| | DO alpha | 6498 |
| HLA-DPA1 | Major histocompatibility complex, class II, | SEQ ID NOS: 6499- |
| | DP alpha 1 | 6502 |
| HLA-DQA1 | Major histocompatibility complex, class II, | SEQ ID NOS: 6503- |
| | DQ alpha 1 | 6508 |
| HLA-DQB1 | Major histocompatibility complex, class II, | SEQ ID NOS: 6509- |
| | DQ beta 1 | 6514 |
| HLA-DQB2 | Major histocompatibility complex, class II, | SEQ ID NOS: 6515- |
| | DQ beta 2 | 6518 |
| HMCN1 | Hemicentin 1 | SEQ ID NOS: 6519- |
| | | 6520 |
| HMCN2 | Hemicentin 2 | SEQ ID NOS: 6521- |
| | | 6524 |
| HMGCL | 3-hydroxymethyl-3-methylglutaryl-CoA | SEQ ID NOS: 6525- |
| | lyase | 6528 |
| HMHA1 | Histocompatibility (minor) HA-1 | SEQ ID NOS: 1034- |
| | | 1042 |
| HMSD | Histocompatibility (minor) serpin domain | SEQ ID NOS: 6529- |
| | containing | 6530 |
| HP | Haptoglobin | SEQ ID NOS: 6531- |
| | | 6544 |
| HPR | Haptoglobin-related protein | SEQ ID NOS: 6545- |
| | | 6547 |
| HPSE | Heparanase | SEQ ID NOS: 6548- |
| | | 6554 |
| HPSE2 | Heparanase 2 (inactive) | SEQ ID NOS: 6555- |
| | | 6560 |
| HPX | Hemopexin | SEQ ID NOS: 6561- |
| | | 6562 |
| HRC | Histidine rich calcium binding protein | SEQ ID NOS: 6563- |
| | | 6565 |
| HRG | Histidine-rich glycoprotein | SEQ ID NO: 6566 |
| HRSP12 | Heat-responsive protein 12 | SEQ ID NOS: 11389- |
| | | 11392 |
| HS2ST1 | Heparan sulfate 2-O-sulfotransferase 1 | SEQ ID NOS: 6567- |
| | | 6569 |
| HS3ST1 | Heparan sulfate (glucosamine) 3-O- | SEQ ID NOS: 6570- |
| | sulfotransferase 1 | 6572 |
| HS6ST1 | Heparan sulfate 6-O-sulfotransferase 1 | SEQ ID NO: 6573 |
| HS6ST3 | Heparan sulfate 6-O-sulfotransferase 3 | SEQ ID NOS: 6574- |
| | | 6575 |
| HSD11B1L | Hydroxysteroid (11-beta) dehydrogenase 1- | SEQ ID NOS: 6576- |
| | like | 6594 |
| HSD17B11 | Hydroxysteroid (17-beta) dehydrogenase 11 | SEQ ID NOS: 6595- |
| | | 6596 |
| HSD17B7 | Hydroxysteroid (17-beta) dehydrogenase 7 | SEQ ID NOS: 6597- |
| | | 6601 |
| HSP90B1 | Heat shock protein 90 kDa beta (Grp94), | SEQ ID NOS: 6602- |
| | member 1 | 6607 |
| HSPA13 | Heat shock protein 70 kDa family, member | SEQ ID NO: 6608 |
| | 13 | |
| HSPA5 | Heat shock 70 kDa protein 5 (glucose- | SEQ ID NO: 6609 |
| | regulated protein, 78 kDa) | |
| HSPG2 | Heparan sulfate proteoglycan 2 | SEQ ID NOS: 6610- |
| | | 6614 |
| HTATIP2 | HIV-1 Tat interactive protein 2, 30 kDa | SEQ ID NOS: 6615- |
| | | 6622 |
| HTN1 | Histatin 1 | SEQ ID NOS: 6623- |
| | | 6625 |
| HTN3 | Histatin 3 | SEQ ID NOS: 6626- |
| | | 6628 |
| HTRA1 | HtrA serine peptidase 1 | SEQ ID NOS: 6629- |
| | | 6630 |
| HTRA3 | HtrA serine peptidase 3 | SEQ ID NOS: 6631- |
| | | 6632 |
| HTRA4 | HtrA serine peptidase 4 | SEQ ID NO: 6633 |
| HYAL1 | Hyaluronoglucosaminidase 1 | SEQ ID NOS: 6634- |
| | | 6642 |
| HYAL2 | Hyaluronoglucosaminidase 2 | SEQ ID NOS: 6643- |
| | | 6651 |
| HYAL3 | Hyaluronoglucosaminidase 3 | SEQ ID NOS: 6652- |
| | | 6658 |
| HYOU1 | Hypoxia up-regulated 1 | SEQ ID NOS: 6659- |
| | | 6673 |
| IAPP | Islet amyloid polypeptide | SEQ ID NOS: 6674- |
| | | 6678 |
| IBSP | Integrin-binding sialoprotein | SEQ ID NO: 6679 |
| ICAM1 | Intercellular adhesion molecule 1 | SEQ ID NOS: 6680- |
| | | 6682 |
| ICAM2 | Intercellular adhesion molecule 2 | SEQ ID NOS: 6683- |
| | | 6693 |
| ICAM4 | Intercellular adhesion molecule 4 | SEQ ID NOS: 6694- |
| | (Landsteiner-Wiener blood group) | 6696 |
| ID1 | Inhibitor of DNA binding 1, dominant | SEQ ID NOS: 6697- |
| | negative helix-loop-helix protein | 6698 |
| IDE | Insulin-degrading enzyme | SEQ ID NOS: 6699- |
| | | 6702 |
| IDNK | IdnK, gluconokinase homolog (E. coli) | SEQ ID NOS: 6703- |
| | | 6708 |
| IDS | Iduronate 2-sulfatase | SEQ ID NOS: 6709- |
| | | 6714 |
| IDUA | Iduronidase, alpha-L- | SEQ ID NOS: 6715- |
| | | 6720 |
| IFI27L2 | Interferon, alpha-inducible protein 27-like 2 | SEQ ID NOS: 6721- |
| | | 6722 |
| IFI30 | Interferon, gamma-inducible protein 30 | SEQ ID NOS: 6723- |
| | | 6724 |
| IFNA1 | Interferon, alpha 1 | SEQ ID NO: 6725 |
| IFNA10 | Interferon, alpha 10 | SEQ ID NO: 6726 |
| IFNA13 | Interferon, alpha 13 | SEQ ID NOS: 6727- |
| | | 6728 |
| IFNA14 | Interferon, alpha 14 | SEQ ID NO: 6729 |
| IFNA16 | Interferon, alpha 16 | SEQ ID NO: 6730 |
| IFNA17 | Interferon, alpha 17 | SEQ ID NO: 6731 |
| IFNA2 | Interferon, alpha 2 | SEQ ID NO: 6732 |
| IFNA21 | Interferon, alpha 21 | SEQ ID NO: 6733 |
| IFNA4 | Interferon, alpha 4 | SEQ ID NO: 6734 |
| IFNA5 | Interferon, alpha 5 | SEQ ID NO: 6735 |
| IFNA6 | Interferon, alpha 6 | SEQ ID NOS: 6736- |
| | | 6737 |
| IFNA7 | Interferon, alpha 7 | SEQ ID NO: 6738 |
| IFNA8 | Interferon, alpha 8 | SEQ ID NO: 6739 |
| IFNAR1 | Interferon (alpha, beta and omega) receptor | SEQ ID NOS: 6740- |
| | 1 | 6741 |
| IFNB1 | Interferon, beta 1, fibroblast | SEQ ID NO: 6742 |
| IFNE | Interferon, epsilon | SEQ ID NO: 6743 |
| IFNG | Interferon, gamma | SEQ ID NO: 6744 |
| IFNGR1 | Interferon gamma receptor 1 | SEQ ID NOS: 6745- |
| | | 6755 |
| IFNL1 | Interferon, lambda 1 | SEQ ID NO: 6756 |
| IFNL2 | Interferon, lambda 2 | SEQ ID NO: 6757 |
| IFNL3 | Interferon, lambda 3 | SEQ ID NOS: 6758- |
| | | 6759 |
| IFNLR1 | Interferon, lambda receptor 1 | SEQ ID NOS: 6760- |
| | | 6764 |
| IFNW1 | Interferon, omega 1 | SEQ ID NO: 6765 |
| IGF1 | Insulin-like growth factor 1 (somatomedin | SEQ ID NOS: 6766- |
| | C) | 6771 |
| IGF2 | Insulin-like growth factor 2 | SEQ ID NOS: 6772- |
| | | 6779 |
| IGFALS | Insulin-like growth factor binding protein, | SEQ ID NOS: 6780- |
| | acid labile subunit | 6782 |
| IGFBP1 | Insulin-like growth factor binding protein 1 | SEQ ID NOS: 6783- |
| | | 6785 |
| IGFBP2 | Insulin-like growth factor binding protein 2, | SEQ ID NOS: 6786- |
| | 36 kDa | 6789 |
| IGFBP3 | Insulin-like growth factor binding protein 3 | SEQ ID NOS: 6790- |
| | | 6797 |
| IGFBP4 | Insulin-like growth factor binding protein 4 | SEQ ID NO: 6798 |
| IGFBP5 | Insulin-like growth factor binding protein 5 | SEQ ID NOS: 6799- |
| | | 6800 |
| IGFBP6 | Insulin-like growth factor binding protein 6 | SEQ ID NOS: 6801- |
| | | 6803 |
| IGFBP7 | Insulin-like growth factor binding protein 7 | SEQ ID NOS: 6804- |
| | | 6805 |
| IGFBPL1 | Insulin-like growth factor binding protein- | SEQ ID NO: 6806 |
| | like 1 | |
| IGFL1 | IGF-like family member 1 | SEQ ID NO: 6807 |
| IGFL2 | IGF-like family member 2 | SEQ ID NOS: 6808- |
| | | 6810 |
| IGFL3 | IGF-like family member 3 | SEQ ID NO: 6811 |
| IGFLR1 | IGF-like family receptor 1 | SEQ ID NOS: 6812- |
| | | 6820 |
| IGIP | IgA-inducing protein | SEQ ID NO: 6821 |
| IGLON5 | IgLON family member 5 | SEQ ID NO: 6822 |
| IGSF1 | Immunoglobulin superfamily, member 1 | SEQ ID NOS: 6823- |
| | | 6828 |
| IGSF10 | Immunoglobulin superfamily, member 10 | SEQ ID NOS: 6829- |
| | | 6830 |
| IGSF11 | Immunoglobulin superfamily, member 11 | SEQ ID NOS: 6831- |
| | | 6838 |
| IGSF21 | Immunoglobin superfamily, member 21 | SEQ ID NO: 6839 |
| IGSF8 | Immunoglobulin superfamily, member 8 | SEQ ID NOS: 6840- |
| | | 6843 |
| IGSF9 | Immunoglobulin superfamily, member 9 | SEQ ID NOS: 6844- |
| | | 6846 |
| IHH | Indian hedgehog | SEQ ID NO: 6847 |
| IL10 | Interleukin 10 | SEQ ID NOS: 6848- |
| | | 6849 |
| IL11 | Interleukin 11 | SEQ ID NOS: 6850- |
| | | 6853 |
| IL11RA | Interleukin 11 receptor, alpha | SEQ ID NOS: 6854- |
| | | 6864 |
| IL12B | Interleukin 12B | SEQ ID NO: 6865 |
| IL12RB1 | Interleukin 12 receptor, beta 1 | SEQ ID NOS: 6866- |
| | | 6871 |
| IL12RB2 | Interleukin 12 receptor, beta 2 | SEQ ID NOS: 6872- |
| | | 6876 |
| IL13 | Interleukin 13 | SEQ ID NOS: 6877- |
| | | 6878 |
| IL13RA1 | Interleukin 13 receptor, alpha 1 | SEQ ID NOS: 6879- |
| | | 6880 |
| IL15RA | Interleukin 15 receptor, alpha | SEQ ID NOS: 6881- |
| | | 6898 |
| IL17A | Interleukin 17A | SEQ ID NO: 6899 |
| IL17B | Interleukin 17B | SEQ ID NO: 6900 |
| IL17C | Interleukin 17C | SEQ ID NO: 6901 |
| IL17D | Interleukin 17D | SEQ ID NOS: 6902- |
| | | 6904 |
| IL17F | Interleukin 17F | SEQ ID NO: 6905 |
| IL17RA | Interleukin 17 receptor A | SEQ ID NOS: 6906- |
| | | 6907 |
| IL17RC | Interleukin 17 receptor C | SEQ ID NOS: 6908- |
| | | 6923 |
| IL17RE | Interleukin 17 receptor E | SEQ ID NOS: 6924- |
| | | 6930 |
| IL18BP | Interleukin 18 binding protein | SEQ ID NOS: 6931- |
| | | 6941 |
| IL18R1 | Interleukin 18 receptor 1 | SEQ ID NOS: 6942- |
| | | 6945 |
| IL18RAP | Interleukin 18 receptor accessory protein | SEQ ID NOS: 6946- |
| | | 6948 |
| IL19 | Interleukin 19 | SEQ ID NOS: 6949- |
| | | 6951 |
| IL1R1 | Interleukin 1 receptor, type I | SEQ ID NOS: 6952- |
| | | 6964 |
| IL1R2 | Interleukin 1 receptor, type II | SEQ ID NOS: 6965- |
| | | 6968 |
| IL1RAP | Interleukin 1 receptor accessory protein | SEQ ID NOS: 6969- |
| | | 6982 |
| IL1RL1 | Interleukin 1 receptor-like 1 | SEQ ID NOS: 6983- |
| | | 6988 |
| IL1RL2 | Interleukin 1 receptor-like 2 | SEQ ID NOS: 6989- |
| | | 6991 |
| IL1RN | Interleukin 1 receptor antagonist | SEQ ID NOS: 6992- |
| | | 6996 |
| IL2 | Interleukin 2 | SEQ ID NO: 6997 |
| IL20 | Interleukin 20 | SEQ ID NOS: 6998- |
| | | 7000 |
| IL20RA | Interleukin 20 receptor, alpha | SEQ ID NOS: 7001- |
| | | 7007 |
| IL21 | Interleukin 21 | SEQ ID NOS: 7008- |
| | | 7009 |
| IL22 | Interleukin 22 | SEQ ID NOS: 7010- |
| | | 7011 |
| IL22RA2 | Interleukin 22 receptor, alpha 2 | SEQ ID NOS: 7012- |
| | | 7014 |
| IL23A | Interleukin 23, alpha subunit p19 | SEQ ID NO: 7015 |
| IL24 | Interleukin 24 | SEQ ID NOS: 7016- |
| | | 7021 |
| IL25 | Interleukin 25 | SEQ ID NOS: 7022- |
| | | 7023 |
| IL26 | Interleukin 26 | SEQ ID NO: 7024 |
| IL27 | Interleukin 27 | SEQ ID NOS: 7025- |
| | | 7026 |
| IL2RB | Interleukin 2 receptor, beta | SEQ ID NOS: 7027- |
| | | 7031 |
| IL3 | Interleukin 3 | SEQ ID NO: 7032 |
| IL31 | Interleukin 31 | SEQ ID NO: 7033 |
| IL31RA | Interleukin 31 receptor A | SEQ ID NOS: 7034- |
| | | 7041 |
| IL32 | Interleukin 32 | SEQ ID NOS: 7042- |
| | | 7071 |
| IL34 | Interleukin 34 | SEQ ID NOS: 7072- |
| | | 7075 |
| IL3RA | Interleukin 3 receptor, alpha (low affinity) | SEQ ID NOS: 7076- |
| | | 7078 |
| IL4 | Interleukin 4 | SEQ ID NOS: 7079- |
| | | 7081 |
| IL4I1 | Interleukin 4 induced 1 | SEQ ID NOS: 7082- |
| | | 7089 |
| IL4R | Interleukin 4 receptor | SEQ ID NOS: 7090- |
| | | 7103 |
| IL5 | Interleukin 5 | SEQ ID NOS: 7104- |
| | | 7105 |
| IL5RA | Interleukin 5 receptor, alpha | SEQ ID NOS: 7106- |
| | | 7115 |
| IL6 | Interleukin 6 | SEQ ID NOS: 7116- |
| | | 7122 |
| IL6R | Interleukin 6 receptor | SEQ ID NOS: 7123- |
| | | 7128 |
| IL6ST | Interleukin 6 signal transducer | SEQ ID NOS: 7129- |
| | | 7138 |
| IL7 | Interleukin 7 | SEQ ID NOS: 7139- |
| | | 7146 |
| IL7R | Interleukin 7 receptor | SEQ ID NOS: 7147- |
| | | 7153 |
| IL9 | Interleukin 9 | SEQ ID NO: 7154 |
| ILDR1 | Immunoglobulin-like domain containing | SEQ ID NOS: 7155- |
| | receptor 1 | 7159 |
| ILDR2 | Immunoglobulin-like domain containing | SEQ ID NOS: 7160- |
| | receptor 2 | 7166 |
| IMP4 | IMP4, U3 small nucleolar ribonucleoprotein | SEQ ID NOS: 7167- |
| | | 7172 |
| IMPG1 | Interphotoreceptor matrix proteoglycan 1 | SEQ ID NOS: 7173- |
| | | 7176 |
| INHA | Inhibin, alpha | SEQ ID NO: 7177 |
| INHBA | Inhibin, beta A | SEQ ID NOS: 7178- |
| | | 7180 |
| INHBB | Inhibin, beta B | SEQ ID NO: 7181 |
| INHBC | Inhibin, beta C | SEQ ID NO: 7182 |
| INHBE | Inhibin, beta E | SEQ ID NOS: 7183- |
| | | 7184 |
| INPP5A | Inositol polyphosphate-5-phosphatase A | SEQ ID NOS: 7185- |
| | | 7189 |
| INS | Insulin | SEQ ID NOS: 7190- |
| | | 7194 |
| INS-IGF2 | INS-IGF2 readthrough | SEQ ID NOS: 7195- |
| | | 7196 |
| INSL3 | Insulin-like 3 (Leydig cell) | SEQ ID NOS: 7197- |
| | | 7199 |
| INSL4 | Insulin-like 4 (placenta) | SEQ ID NO: 7200 |
| INSL5 | Insulin-like 5 | SEQ ID NO: 7201 |
| INSL6 | Insulin-like 6 | SEQ ID NO: 7202 |
| INTS3 | Integrator complex subunit 3 | SEQ ID NOS: 7203- |
| | | 7208 |
| IPO11 | Importin 11 | SEQ ID NOS: 7209- |
| | | 7217 |
| IPO9 | Importin 9 | SEQ ID NOS: 7218- |
| | | 7219 |
| IQCF6 | IQ motif containing F6 | SEQ ID NOS: 7220- |
| | | 7221 |
| IRAK3 | Interleukin-1 receptor-associated kinase 3 | SEQ ID NOS: 7222- |
| | | 7224 |
| IRS4 | Insulin receptor substrate 4 | SEQ ID NO: 7225 |
| ISLR | Immunoglobulin superfamily containing | SEQ ID NOS: 7226- |
| | leucine-rich repeat | 7229 |
| ISLR2 | Immunoglobulin superfamily containing | SEQ ID NOS: 7230- |
| | leucine-rich repeat 2 | 7239 |
| ISM1 | Isthmin 1, angiogenesis inhibitor | SEQ ID NO: 7240 |
| ISM2 | Isthmin 2 | SEQ ID NOS: 7241- |
| | | 7246 |
| ITGA4 | Integrin, alpha 4 (antigen CD49D, alpha 4 | SEQ ID NOS: 7247- |
| | subunit of VLA-4 receptor) | 7249 |
| ITGA9 | Integrin, alpha 9 | SEQ ID NOS: 7250- |
| | | 7252 |
| ITGAL | Integrin, alpha L (antigen CD11A (p180), | SEQ ID NOS: 7253- |
| | lymphocyte function-associated antigen 1; | 7262 |
| | alpha polypeptide) | |
| ITGAX | Integrin, alpha X (complement component 3 | SEQ ID NOS: 7263- |
| | receptor 4 subunit) | 7265 |
| ITGB1 | Integrin, beta 1 (fibronectin receptor, beta | SEQ ID NOS: 7266- |
| | polypeptide, antigen CD29 includes MDF2, | 7281 |
| | MSK12) | |
| ITGB2 | Integrin, beta 2 (complement component 3 | SEQ ID NOS: 7282- |
| | receptor 3 and 4 subunit) | 7298 |
| ITGB3 | Integrin, beta 3 (platelet glycoprotein IIIa, | SEQ ID NOS: 7299- |
| | antigen CD61) | 7301 |
| ITGB7 | Integrin, beta 7 | SEQ ID NOS: 7302- |
| | | 7309 |
| ITGBL1 | Integrin, beta-like 1 (with EGF-like repeat | SEQ ID NOS: 7310- |
| | domains) | 7315 |
| ITIH1 | Inter-alpha-trypsin inhibitor heavy chain 1 | SEQ ID NOS: 7316- |
| | | 7321 |
| ITIH2 | Inter-alpha-trypsin inhibitor heavy chain 2 | SEQ ID NOS: 7322- |
| | | 7324 |
| ITIH3 | Inter-alpha-trypsin inhibitor heavy chain 3 | SEQ ID NOS: 7325- |
| | | 7327 |
| ITIH4 | Inter-alpha-trypsin inhibitor heavy chain | SEQ ID NOS: 7328- |
| | family, member 4 | 7331 |
| ITIH5 | Inter-alpha-trypsin inhibitor heavy chain | SEQ ID NOS: 7332- |
| | family, member 5 | 7335 |
| ITIH6 | Inter-alpha-trypsin inhibitor heavy chain | SEQ ID NO: 7336 |
| | family, member 6 | |
| ITLN1 | Intelectin 1 (galactofuranose binding) | SEQ ID NO: 7337 |
| ITLN2 | Intelectin 2 | SEQ ID NO: 7338 |
| IZUMO1R | IZUMO1 receptor, JUNO | SEQ ID NOS: 7339- |
| | | 7340 |
| IZUMO4 | IZUMO family member 4 | SEQ ID NOS: 7341- |
| | | 7347 |
| JCHAIN | Joining chain of multimeric IgA and IgM | SEQ ID NOS: 7357- |
| | | 7362 |
| JMJD8 | Jumonji domain containing 8 | SEQ ID NOS: 7363- |
| | | 7367 |
| JSRP1 | Junctional sarcoplasmic reticulum protein 1 | SEQ ID NO: 7368 |
| KANSL2 | KAT8 regulatory NSL complex subunit 2 | SEQ ID NOS: 7369- |
| | | 7379 |
| KAZALD1 | Kazal-type serine peptidase inhibitor | SEQ ID NO: 7380 |
| | domain 1 | |
| KCNIP3 | Kv channel interacting protein 3, calsenilin | SEQ ID NOS: 7381- |
| | | 7383 |
| KCNK7 | Potassium channel, two pore domain | SEQ ID NOS: 7384- |
| | subfamily K, member 7 | 7389 |
| KCNN4 | Potassium channel, calcium activated | SEQ ID NOS: 7390- |
| | intermediate/small conductance subfamily | 7395 |
| | N alpha, member 4 | |
| KCNU1 | Potassium channel, subfamily U, member 1 | SEQ ID NOS: 7396- |
| | | 7400 |
| KCP | Kielin/chordin-like protein | SEQ ID NOS: 7401- |
| | | 7404 |
| KDELC1 | KDEL (Lys-Asp-Glu-Leu) containing 1 | SEQ ID NO: 7405 |
| KDELC2 | KDEL (Lys-Asp-Glu-Leu) containing 2 | SEQ ID NOS: 7406- |
| | | 7409 |
| KDM1A | Lysine (K)-specific demethylase 1A | SEQ ID NOS: 7410- |
| | | 7413 |
| KDM3B | Lysine (K)-specific demethylase 3B | SEQ ID NOS: 7414- |
| | | 7417 |
| KDM6A | Lysine (K)-specific demethylase 6A | SEQ ID NOS: 7418- |
| | | 7427 |
| KDM7A | Lysine (K)-specific demethylase 7A | SEQ ID NOS: 7428- |
| | | 7429 |
| KDSR | 3-ketodihydrosphingosine reductase | SEQ ID NOS: 7430- |
| | | 7436 |
| KERA | Keratocan | SEQ ID NO: 7437 |
| KIAA0100 | KIAA0100 | SEQ ID NOS: 7438- |
| | | 7443 |
| KIAA0319 | KIAA0319 | SEQ ID NOS: 7444- |
| | | 7449 |
| KIAA1324 | KIAA1324 | SEQ ID NOS: 7450- |
| | | 7458 |
| KIFC2 | Kinesin family member C2 | SEQ ID NOS: 7459- |
| | | 7461 |
| KIR2DL4 | Killer cell immunoglobulin-like receptor, | SEQ ID NOS: 7462- |
| | two domains, long cytoplasmic tail, 4 | 7468 |
| KIR3DX1 | Killer cell immunoglobulin-like receptor, | SEQ ID NOS: 7469- |
| | three domains, X1 | 7473 |
| KIRREL2 | Kin of IRRE like 2 (Drosophila) | SEQ ID NOS: 7474- |
| | | 7478 |
| KISS1 | KiSS-1 metastasis-suppressor | SEQ ID NOS: 7479- |
| | | 7480 |
| KLHL11 | Kelch-like family member 11 | SEQ ID NO: 7481 |
| KLHL22 | Kelch-like family member 22 | SEQ ID NOS: 7482- |
| | | 7488 |
| KLK1 | Kallikrein 1 | SEQ ID NOS: 7489- |
| | | 7490 |
| KLK10 | Kallikrein-related peptidase 10 | SEQ ID NOS: 7491- |
| | | 7495 |
| KLK11 | Kallikrein-related peptidase 11 | SEQ ID NOS: 7496- |
| | | 7504 |
| KLK12 | Kallikrein-related peptidase 12 | SEQ ID NOS: 7505- |
| | | 7511 |
| KLK13 | Kallikrein-related peptidase 13 | SEQ ID NOS: 7512- |
| | | 7520 |
| KLK14 | Kallikrein-related peptidase 14 | SEQ ID NOS: 7521- |
| | | 7522 |
| KLK15 | Kallikrein-related peptidase 15 | SEQ ID NOS: 7523- |
| | | 7527 |
| KLK2 | Kallikrein-related peptidase 2 | SEQ ID NOS: 7528- |
| | | 7540 |
| KLK3 | Kallikrein-related peptidase 3 | SEQ ID NOS: 7541- |
| | | 7552 |
| KLK4 | Kallikrein-related peptidase 4 | SEQ ID NOS: 7553- |
| | | 7557 |
| KLK5 | Kallikrein-related peptidase 5 | SEQ ID NOS: 7558- |
| | | 7561 |
| KLK6 | Kallikrein-related peptidase 6 | SEQ ID NOS: 7562- |
| | | 7568 |
| KLK7 | Kallikrein-related peptidase 7 | SEQ ID NOS: 7569- |
| | | 7573 |
| KLK8 | Kallikrein-related peptidase 8 | SEQ ID NOS: 7574- |
| | | 7581 |
| KLK9 | Kallikrein-related peptidase 9 | SEQ ID NOS: 7582- |
| | | 7583 |
| KLKB1 | Kallikrein B, plasma (Fletcher factor) 1 | SEQ ID NOS: 7584- |
| | | 7588 |
| KNDC1 | Kinase non-catalytic C-lobe domain | SEQ ID NOS: 7593- |
| | (KIND) containing 1 | 7594 |
| KNG1 | Kininogen 1 | SEQ ID NOS: 7595- |
| | | 7599 |
| KRBA2 | KRAB-A domain containing 2 | SEQ ID NOS: 7600- |
| | | 7603 |
| KREMEN2 | Kringle containing transmembrane protein 2 | SEQ ID NOS: 7604- |
| | | 7609 |
| KRTDAP | Keratinocyte differentiation-associated | SEQ ID NOS: 7610- |
| | protein | 7611 |
| L1CAM | L1 cell adhesion molecule | SEQ ID NOS: 7612- |
| | | 7621 |
| L3MBTL2 | L(3)mbt-like 2 (Drosophila) | SEQ ID NOS: 7622- |
| | | 7626 |
| LA16c- | | SEQ ID NO: 72 |
| 380H5.3 | | |
| LACE1 | Lactation elevated 1 | SEQ ID NOS: 580-583 |
| LACRT | Lacritin | SEQ ID NOS: 7627- |
| | | 7629 |
| LACTB | Lactamase, beta | SEQ ID NOS: 7630- |
| | | 7632 |
| LAG3 | Lymphocyte-activation gene 3 | SEQ ID NOS: 7633- |
| | | 7634 |
| LAIR2 | Leukocyte-associated immunoglobulin-like | SEQ ID NOS: 7635- |
| | receptor 2 | 7638 |
| LALBA | Lactalbumin, alpha- | SEQ ID NOS: 7639- |
| | | 7640 |
| LAMA1 | Laminin, alpha 1 | SEQ ID NOS: 7641- |
| | | 7642 |
| LAMA2 | Laminin, alpha 2 | SEQ ID NOS: 7643- |
| | | 7646 |
| LAMA3 | Laminin, alpha 3 | SEQ ID NOS: 7647- |
| | | 7656 |
| LAMA4 | Laminin, alpha 4 | SEQ ID NOS: 7657- |
| | | 7671 |
| LAMA5 | Laminin, alpha 5 | SEQ ID NOS: 7672- |
| | | 7674 |
| LAMB1 | Laminin, beta 1 | SEQ ID NOS: 7675- |
| | | 7679 |
| LAMB2 | Laminin, beta 2 (laminin S) | SEQ ID NOS: 7680- |
| | | 7682 |
| LAMB3 | Laminin, beta 3 | SEQ ID NOS: 7683- |
| | | 7687 |
| LAMB4 | Laminin, beta 4 | SEQ ID NOS: 7688- |
| | | 7691 |
| LAMC1 | Laminin, gamma 1 (formerly LAMB2) | SEQ ID NOS: 7692- |
| | | 7693 |
| LAMC2 | Laminin, gamma 2 | SEQ ID NOS: 7694- |
| | | 7695 |
| LAMC3 | Laminin, gamma 3 | SEQ ID NOS: 7696- |
| | | 7697 |
| LAMP3 | Lysosomal-associated membrane protein 3 | SEQ ID NOS: 7698- |
| | | 7701 |
| LAT | Linker for activation of T cells | SEQ ID NOS: 7708- |
| | | 7717 |
| LAT2 | Linker for activation of T cells family, | SEQ ID NOS: 7718- |
| | member 2 | 7726 |
| LBP | Lipopolysaccharide binding protein | SEQ ID NO: 7727 |
| LCAT | Lecithin-cholesterol acyltransferase | SEQ ID NOS: 7728- |
| | | 7734 |
| LCN1 | Lipocalin 1 | SEQ ID NOS: 7735- |
| | | 7736 |
| LCN10 | Lipocalin 10 | SEQ ID NOS: 7737- |
| | | 7742 |
| LCN12 | Lipocalin 12 | SEQ ID NOS: 7743- |
| | | 7745 |
| LCN15 | Lipocalin 15 | SEQ ID NO: 7746 |
| LCN2 | Lipocalin 2 | SEQ ID NOS: 7747- |
| | | 7749 |
| LCN6 | Lipocalin 6 | SEQ ID NOS: 7750- |
| | | 7751 |
| LCN8 | Lipocalin 8 | SEQ ID NOS: 7752- |
| | | 7753 |
| LCN9 | Lipocalin 9 | SEQ ID NOS: 7754- |
| | | 7755 |
| LCORL | Ligand dependent nuclear receptor | SEQ ID NOS: 7756- |
| | corepressor-like | 7761 |
| LDLR | Low density lipoprotein receptor | SEQ ID NOS: 7762- |
| | | 7770 |
| LDLRAD2 | Low density lipoprotein receptor class A | SEQ ID NOS: 7771- |
| | domain containing 2 | 7772 |
| LEAP2 | Liver expressed antimicrobial peptide 2 | SEQ ID NO: 7773 |
| LECT2 | Leukocyte cell-derived chemotaxin 2 | SEQ ID NOS: 7774- |
| | | 7777 |
| LEFTY1 | Left-right determination factor 1 | SEQ ID NOS: 7778- |
| | | 7779 |
| LEFTY2 | Left-right determination factor 2 | SEQ ID NOS: 7780- |
| | | 7781 |
| LEP | Leptin | SEQ ID NO: 7782 |
| LFNG | LFNG O-fucosylpeptide 3-beta-N- | SEQ ID NOS: 7783- |
| | acetylglucosaminyltransferase | 7788 |
| LGALS3BP | Lectin, galactoside-binding, soluble, 3 | SEQ ID NOS: 7789- |
| | binding protein | 7803 |
| LGI1 | Leucine-rich, glioma inactivated 1 | SEQ ID NOS: 7804- |
| | | 7822 |
| LGI2 | Leucine-rich repeat LGI family, member 2 | SEQ ID NOS: 7823- |
| | | 7824 |
| LGI3 | Leucine-rich repeat LGI family, member 3 | SEQ ID NOS: 7825- |
| | | 7828 |
| LGI4 | Leucine-rich repeat LGI family, member 4 | SEQ ID NOS: 7829- |
| | | 7832 |
| LGMN | Legumain | SEQ ID NOS: 7833- |
| | | 7846 |
| LGR4 | Leucine-rich repeat containing G protein- | SEQ ID NOS: 7847- |
| | coupled receptor 4 | 7849 |
| LHB | Luteinizing hormone beta polypeptide | SEQ ID NO: 7850 |
| LHCGR | Luteinizing hormone/choriogonadotropin | SEQ ID NOS: 7851- |
| | receptor | 7855 |
| LIF | Leukemia inhibitory factor | SEQ ID NOS: 7856- |
| | | 7857 |
| LIFR | Leukemia inhibitory factor receptor alpha | SEQ ID NOS: 7858- |
| | | 7862 |
| LILRA1 | Leukocyte immunoglobulin-like receptor, | SEQ ID NOS: 7863- |
| | subfamily A (with TM domain), member 1 | 7864 |
| LILRA2 | Leukocyte immunoglobulin-like receptor, | SEQ ID NOS: 7865- |
| | subfamily A (with TM domain), member 2 | 7871 |
| LILRB3 | Leukocyte immunoglobulin-like receptor, | SEQ ID NOS: 7872- |
| | subfamily B (with TM and ITIM domains), | 7876 |
| | member 3 | |
| LIME1 | Lck interacting transmembrane adaptor 1 | SEQ ID NOS: 7877- |
| | | 7882 |
| LINGO1 | Leucine rich repeat and Ig domain | SEQ ID NOS: 7883- |
| | containing 1 | 7893 |
| LIPA | Lipase A, lysosomal acid, cholesterol | SEQ ID NOS: 7894- |
| | esterase | 7898 |
| LIPC | Lipase, hepatic | SEQ ID NOS: 7899- |
| | | 7902 |
| LIPF | Lipase, gastric | SEQ ID NOS: 7903- |
| | | 7906 |
| LIPG | Lipase, endothelial | SEQ ID NOS: 7907- |
| | | 7912 |
| LIPH | Lipase, member H | SEQ ID NOS: 7913- |
| | | 7917 |
| LIPK | Lipase, family member K | SEQ ID NO: 7918 |
| LIPM | Lipase, family member M | SEQ ID NOS: 7919- |
| | | 7920 |
| LIPN | Lipase, family member N | SEQ ID NO: 7921 |
| LMAN2 | Lectin, mannose-binding 2 | SEQ ID NOS: 7922- |
| | | 7926 |
| LMNTD1 | Lamin tail domain containing 1 | SEQ ID NOS: 7927- |
| | | 7937 |
| LNX1 | Ligand of numb-protein X 1, E3 ubiquitin | SEQ ID NOS: 7938- |
| | protein ligase | 7944 |
| LOX | Lysyl oxidase | SEQ ID NOS: 7945- |
| | | 7947 |
| LOXL1 | Lysyl oxidase-like 1 | SEQ ID NOS: 7948- |
| | | 7949 |
| LOXL2 | Lysyl oxidase-like 2 | SEQ ID NOS: 7950- |
| | | 7958 |
| LOXL3 | Lysyl oxidase-like 3 | SEQ ID NOS: 7959- |
| | | 7965 |
| LOXL4 | Lysyl oxidase-like 4 | SEQ ID NO: 7966 |
| LPA | Lipoprotein, Lp(a) | SEQ ID NOS: 7967- |
| | | 7969 |
| LPL | Lipoprotein lipase | SEQ ID NOS: 7970- |
| | | 7974 |
| LPO | Lactoperoxidase | SEQ ID NOS: 7975- |
| | | 7981 |
| LRAT | Lecithin retinol acyltransferase | SEQ ID NOS: 7982- |
| | (phosphatidylcholine--retinol O- | 7984 |
| | acyltransferase) | |
| LRCH3 | Leucine-rich repeats and calponin | SEQ ID NOS: 7985- |
| | homology (CH) domain containing 3 | 7993 |
| LRCOL1 | Leucine rich colipase-like 1 | SEQ ID NOS: 7994- |
| | | 7997 |
| LRFN4 | Leucine rich repeat and fibronectin type III | SEQ ID NOS: 7998- |
| | domain containing 4 | 7999 |
| LRFN5 | Leucine rich repeat and fibronectin type III | SEQ ID NOS: 8000- |
| | domain containing 5 | 8002 |
| LRG1 | Leucine-rich alpha-2-glycoprotein 1 | SEQ ID NO: 8003 |
| LRP1 | Low density lipoprotein receptor-related | SEQ ID NOS: 8004- |
| | protein 1 | 8009 |
| LRP11 | Low density lipoprotein receptor-related | SEQ ID NOS: 8010- |
| | protein 11 | 8011 |
| LRP1B | Low density lipoprotein receptor-related | SEQ ID NOS: 8012- |
| | protein 1B | 8015 |
| LRP2 | Low density lipoprotein receptor-related | SEQ ID NOS: 8016- |
| | protein 2 | 8017 |
| LRP4 | Low density lipoprotein receptor-related | SEQ ID NOS: 8018- |
| | protein 4 | 8019 |
| LRPAP1 | Low density lipoprotein receptor-related | SEQ ID NOS: 8020- |
| | protein associated protein 1 | 8021 |
| LRRC17 | Leucine rich repeat containing 17 | SEQ ID NOS: 8022- |
| | | 8024 |
| LRRC32 | Leucine rich repeat containing 32 | SEQ ID NOS: 8025- |
| | | 8028 |
| LRRC3B | Leucine rich repeat containing 3B | SEQ ID NOS: 8029- |
| | | 8033 |
| LRRC4B | Leucine rich repeat containing 4B | SEQ ID NOS: 8034- |
| | | 8036 |
| LRRC70 | Leucine rich repeat containing 70 | SEQ ID NOS: 8037- |
| | | 8038 |
| LRRN3 | Leucine rich repeat neuronal 3 | SEQ ID NOS: 8039- |
| | | 8042 |
| LRRTM1 | Leucine rich repeat transmembrane | SEQ ID NOS: 8043- |
| | neuronal 1 | 8049 |
| LRRTM2 | Leucine rich repeat transmembrane | SEQ ID NOS: 8050- |
| | neuronal 2 | 8052 |
| LRRTM4 | Leucine rich repeat transmembrane | SEQ ID NOS: 8053- |
| | neuronal 4 | 8058 |
| LRTM2 | Leucine-rich repeats and transmembrane | SEQ ID NOS: 8059- |
| | domains 2 | 8063 |
| LSR | Lipolysis stimulated lipoprotein receptor | SEQ ID NOS: 8064- |
| | | 8074 |
| LST1 | Leukocyte specific transcript 1 | SEQ ID NOS: 8075- |
| | | 8092 |
| LTA | Lymphotoxin alpha | SEQ ID NOS: 8093- |
| | | 8094 |
| LTBP1 | Latent transforming growth factor beta | SEQ ID NOS: 8095- |
| | binding protein 1 | 8104 |
| LTBP2 | Latent transforming growth factor beta | SEQ ID NOS: 8105- |
| | binding protein 2 | 8108 |
| LTBP3 | Latent transforming growth factor beta | SEQ ID NOS: 8109- |
| | binding protein 3 | 8121 |
| LTBP4 | Latent transforming growth factor beta | SEQ ID NOS: 8122- |
| | binding protein 4 | 8137 |
| LTBR | Lymphotoxin beta receptor (TNFR | SEQ ID NOS: 8138- |
| | superfamily, member 3) | 8143 |
| LTF | Lactotransferrin | SEQ ID NOS: 8144- |
| | | 8148 |
| LTK | Leukocyte receptor tyrosine kinase | SEQ ID NOS: 8149- |
| | | 8152 |
| LUM | Lumican | SEQ ID NO: 8153 |
| LUZP2 | Leucine zipper protein 2 | SEQ ID NOS: 8154- |
| | | 8157 |
| LVRN | Laeverin | SEQ ID NOS: 8158- |
| | | 8163 |
| LY6E | Lymphocyte antigen 6 complex, locus E | SEQ ID NOS: 8164- |
| | | 8177 |
| LY6G5B | Lymphocyte antigen 6 complex, locus G5B | SEQ ID NOS: 8178- |
| | | 8179 |
| LY6G6D | Lymphocyte antigen 6 complex, locus G6D | SEQ ID NOS: 8180- |
| | | 8181 |
| LY6G6E | Lymphocyte antigen 6 complex, locus G6E | SEQ ID NOS: 8182- |
| | (pseudogene) | 8185 |
| LY6H | Lymphocyte antigen 6 complex, locus H | SEQ ID NOS: 8186- |
| | | 8189 |
| LY6K | Lymphocyte antigen 6 complex, locus K | SEQ ID NOS: 8190- |
| | | 8193 |
| LY86 | Lymphocyte antigen 86 | SEQ ID NOS: 8195- |
| | | 8196 |
| LY96 | Lymphocyte antigen 96 | SEQ ID NOS: 8197- |
| | | 8198 |
| LYG1 | Lysozyme G-like 1 | SEQ ID NOS: 8199- |
| | | 8200 |
| LYG2 | Lysozyme G-like 2 | SEQ ID NOS: 8201- |
| | | 8206 |
| LYNX1 | Ly6/neurotoxin 1 | SEQ ID NOS: 8207- |
| | | 8211 |
| LYPD1 | LY6/PLAUR domain containing 1 | SEQ ID NOS: 8212- |
| | | 8214 |
| LYPD2 | LY6/PLAUR domain containing 2 | SEQ ID NO: 8215 |
| LYPD4 | LY6/PLAUR domain containing 4 | SEQ ID NOS: 8216- |
| | | 8218 |
| LYPD6 | LY6/PLAUR domain containing 6 | SEQ ID NOS: 8219- |
| | | 8223 |
| LYPD6B | LY6/PLAUR domain containing 6B | SEQ ID NOS: 8224- |
| | | 8230 |
| LYPD8 | LY6/PLAUR domain containing 8 | SEQ ID NOS: 8231- |
| | | 8232 |
| LYZ | Lysozyme | SEQ ID NOS: 8233- |
| | | 8235 |
| LYZL4 | Lysozyme-like 4 | SEQ ID NOS: 8236- |
| | | 8237 |
| LYZL6 | Lysozyme-like 6 | SEQ ID NOS: 8238- |
| | | 8240 |
| M6PR | Mannose-6-phosphate receptor (cation | SEQ ID NOS: 8241- |
| | dependent) | 8251 |
| MAD1L1 | MAD1 mitotic arrest deficient-like 1 (yeast) | SEQ ID NOS: 8252- |
| | | 8264 |
| MAG | Myelin associated glycoprotein | SEQ ID NOS: 8265- |
| | | 8270 |
| MAGT1 | Magnesium transporter 1 | SEQ ID NOS: 8271- |
| | | 8274 |
| MALSU1 | Mitochondrial assembly of ribosomal large | SEQ ID NO: 8275 |
| | subunit 1 | |
| MAMDC2 | MAM domain containing 2 | SEQ ID NO: 8276 |
| MAN2B1 | Mannosidase, alpha, class 2B, member 1 | SEQ ID NOS: 8277- |
| | | 8282 |
| MAN2B2 | Mannosidase, alpha, class 2B, member 2 | SEQ ID NOS: 8283- |
| | | 8285 |
| MANBA | Mannosidase, beta A, lysosomal | SEQ ID NOS: 8286- |
| | | 8299 |
| MANEAL | Mannosidase, endo-alpha-like | SEQ ID NOS: 8300- |
| | | 8304 |
| MANF | Mesencephalic astrocyte-derived | SEQ ID NOS: 8305- |
| | neurotrophic factor | 8306 |
| MANSC1 | MANSC domain containing 1 | SEQ ID NOS: 8307- |
| | | 8310 |
| MAP3K9 | Mitogen-activated protein kinase 9 | SEQ ID NOS: 8311- |
| | | 8316 |
| MASP1 | Mannan-binding lectin serine peptidase 1 | SEQ ID NOS: 8317- |
| | (C4/C2 activating component of Ra-reactive | 8324 |
| | factor) | |
| MASP2 | Mannan-binding lectin serine peptidase 2 | SEQ ID NOS: 8325- |
| | | 8326 |
| MATN1 | Matrilin 1, cartilage matrix protein | SEQ ID NO: 8327 |
| MATN2 | Matrilin 2 | SEQ ID NOS: 8328- |
| | | 8340 |
| MATN3 | Matrilin 3 | SEQ ID NOS: 8341- |
| | | 8342 |
| MATN4 | Matrilin 4 | SEQ ID NOS: 8343- |
| | | 8347 |
| MATR3 | Matrin 3 | SEQ ID NOS: 8348- |
| | | 8375 |
| MAU2 | MAU2 sister chromatid cohesion factor | SEQ ID NOS: 8376- |
| | | 8378 |
| MAZ | MYC-associated zinc finger protein (purine- | SEQ ID NOS: 8379- |
| | binding transcription factor) | 8393 |
| MBD6 | Methyl-CpG binding domain protein 6 | SEQ ID NOS: 8394- |
| | | 8405 |
| MBL2 | Mannose-binding lectin (protein C) 2, | SEQ ID NO: 8406 |
| | soluble | |
| MBNL1 | Muscleblind-like splicing regulator 1 | SEQ ID NOS: 8407- |
| | | 8425 |
| MCCC1 | Methylcrotonoyl-CoA carboxylase 1 (alpha) | SEQ ID NOS: 8426- |
| | | 8437 |
| MCCD1 | Mitochondrial coiled-coil domain 1 | SEQ ID NO: 8438 |
| MCEE | Methylmalonyl CoA epimerase | SEQ ID NOS: 8439- |
| | | 8442 |
| MCF2L | MCF.2 cell line derived transforming | SEQ ID NOS: 8443- |
| | sequence-like | 8464 |
| MCFD2 | Multiple coagulation factor deficiency 2 | SEQ ID NOS: 8465- |
| | | 8476 |
| MDFIC | MyoD family inhibitor domain containing | SEQ ID NOS: 8477- |
| | | 8484 |
| MDGA1 | MAM domain containing | SEQ ID NOS: 8485- |
| | glycosylphosphatidylinositol anchor 1 | 8490 |
| MDK | Midkine (neurite growth-promoting factor | SEQ ID NOS: 8491- |
| | 2) | 8500 |
| MED20 | Mediator complex subunit 20 | SEQ ID NOS: 8501- |
| | | 8505 |
| MEGF10 | Multiple EGF-like-domains 10 | SEQ ID NOS: 8506- |
| | | 8509 |
| MEGF6 | Multiple EGF-like-domains 6 | SEQ ID NOS: 8510- |
| | | 8513 |
| MEI1 | Meiotic double-stranded break formation | SEQ ID NOS: 8514- |
| | protein 1 | 8517 |
| MEI4 | Meiotic double-stranded break formation | SEQ ID NO: 8518 |
| | protein 4 | |
| MEIS1 | Meis homeobox 1 | SEQ ID NOS: 8519- |
| | | 8524 |
| MEIS3 | Meis homeobox 3 | SEQ ID NOS: 8525- |
| | | 8534 |
| MEPE | Matrix extracellular phosphoglycoprotein | SEQ ID NOS: 8538- |
| | | 8544 |
| MESDC2 | Mesoderm development candidate 2 | SEQ ID NOS: 8545- |
| | | 8549 |
| MEST | Mesoderm specific transcript | SEQ ID NOS: 8550- |
| | | 8563 |
| MET | MET proto-oncogene, receptor tyrosine | SEQ ID NOS: 8564- |
| | kinase | 8569 |
| METRN | Meteorin, glial cell differentiation regulator | SEQ ID NOS: 8570- |
| | | 8574 |
| METRNL | Meteorin, glial cell differentiation regulator- | SEQ ID NOS: 8575- |
| | like | 8578 |
| METTL17 | Methyltransferase like 17 | SEQ ID NOS: 8579- |
| | | 8589 |
| METTL24 | Methyltransferase like 24 | SEQ ID NO: 8590 |
| METTL7B | Methyltransferase like 7B | SEQ ID NOS: 8591- |
| | | 8592 |
| METTL9 | Methyltransferase like 9 | SEQ ID NOS: 8593- |
| | | 8601 |
| MEX3C | Mex-3 RNA binding family member C | SEQ ID NOS: 8602- |
| | | 8604 |
| MFAP2 | Microfibrillar-associated protein 2 | SEQ ID NOS: 8605- |
| | | 8606 |
| MFAP3 | Microfibrillar-associated protein 3 | SEQ ID NOS: 8607- |
| | | 8611 |
| MFAP3L | Microfibrillar-associated protein 3-like | SEQ ID NOS: 8612- |
| | | 8621 |
| MFAP4 | Microfibrillar-associated protein 4 | SEQ ID NOS: 8622- |
| | | 8624 |
| MFAP5 | Microfibrillar associated protein 5 | SEQ ID NOS: 8625- |
| | | 8635 |
| MFGE8 | Milk fat globule-EGF factor 8 protein | SEQ ID NOS: 8636- |
| | | 8642 |
| MFI2 | Antigen p97 (melanoma associated) | SEQ ID NOS: 8535- |
| | identified by monoclonal antibodies 133.2 | 8537 |
| | and 96.5 | |
| MFNG | MFNG O-fucosylpeptide 3-beta-N- | SEQ ID NOS: 8643- |
| | acetylglucosaminyltransferase | 8650 |
| MGA | MGA, MAX dimerization protein | SEQ ID NOS: 8651- |
| | | 8659 |
| MGAT2 | Mannosyl (alpha-1,6-)-glycoprotein beta- | SEQ ID NO: 8660 |
| | 1,2-N-acetylglucosaminyltransferase | |
| MGAT3 | Mannosyl (beta-1,4-)-glycoprotein beta-1,4- | SEQ ID NOS: 8661- |
| | N-acetylglucosaminyltransferase | 8663 |
| MGAT4A | Mannosyl (alpha-1,3-)-glycoprotein beta- | SEQ ID NOS: 8664- |
| | 1,4-N-acetylglucosaminyltransferase, | 8668 |
| | isozyme A | |
| MGAT4B | Mannosyl (alpha-1,3-)-glycoprotein beta- | SEQ ID NOS: 8669- |
| | 1,4-N-acetylglucosaminyltransferase, | 8679 |
| | isozyme B | |
| MGAT4D | MGAT4 family, member D | SEQ ID NOS: 8680- |
| | | 8685 |
| MGLL | Monoglyceride lipase | SEQ ID NOS: 8686- |
| | | 8695 |
| MGP | Matrix Gla protein | SEQ ID NOS: 8696- |
| | | 8698 |
| MGST2 | Microsomal glutathione S-transferase 2 | SEQ ID NOS: 8699- |
| | | 8702 |
| MIA | Melanoma inhibitory activity | SEQ ID NOS: 8703- |
| | | 8708 |
| MIA2 | Melanoma inhibitory activity 2 | SEQ ID NO: 8709 |
| MIA3 | Melanoma inhibitory activity family, | SEQ ID NOS: 8710- |
| | member 3 | 8714 |
| MICU1 | Mitochondrial calcium uptake 1 | SEQ ID NOS: 8715- |
| | | 8724 |
| MIER1 | Mesoderm induction early response 1, | SEQ ID NOS: 8725- |
| | transcriptional regulator | 8733 |
| MINOS1- | MINOS1-NBL1 readthrough | SEQ ID NOS: 8734- |
| NBL1 | | 8736 |
| MINPP1 | Multiple inositol-polyphosphate | SEQ ID NOS: 8737- |
| | phosphatase 1 | 8739 |
| MLEC | Malectin | SEQ ID NOS: 8740- |
| | | 8743 |
| MLN | Motilin | SEQ ID NOS: 8744- |
| | | 8746 |
| MLXIP | MLX interacting protein | SEQ ID NOS: 8747- |
| | | 8752 |
| MLXIPL | MLX interacting protein-like | SEQ ID NOS: 8753- |
| | | 8760 |
| MMP1 | Matrix metallopeptidase 1 | SEQ ID NO: 8761 |
| MMP10 | Matrix metallopeptidase 10 | SEQ ID NOS: 8762- |
| | | 8763 |
| MMP11 | Matrix metallopeptidase 11 | SEQ ID NOS: 8764- |
| | | 8767 |
| MMP12 | Matrix metallopeptidase 12 | SEQ ID NO: 8768 |
| MMP13 | Matrix metallopeptidase 13 | SEQ ID NOS: 8769- |
| | | 8771 |
| MMP14 | Matrix metallopeptidase 14 (membrane- | SEQ ID NOS: 8772- |
| | inserted) | 8774 |
| MMP17 | Matrix metallopeptidase 17 (membrane- | SEQ ID NOS: 8775- |
| | inserted) | 8782 |
| MMP19 | Matrix metallopeptidase 19 | SEQ ID NOS: 8783- |
| | | 8788 |
| MMP2 | Matrix metallopeptidase 2 | SEQ ID NOS: 8789- |
| | | 8796 |
| MMP20 | Matrix metallopeptidase 20 | SEQ ID NO: 8797 |
| MMP21 | Matrix metallopeptidase 21 | SEQ ID NO: 8798 |
| MMP25 | Matrix metallopeptidase 25 | SEQ ID NOS: 8799- |
| | | 8800 |
| MMP26 | Matrix metallopeptidase 26 | SEQ ID NOS: 8801- |
| | | 8802 |
| MMP27 | Matrix metallopeptidase 27 | SEQ ID NO: 8803 |
| MMP28 | Matrix metallopeptidase 28 | SEQ ID NOS: 8804- |
| | | 8809 |
| MMP3 | Matrix metallopeptidase 3 | SEQ ID NOS: 8810- |
| | | 8812 |
| MMP7 | Matrix metallopeptidase 7 | SEQ ID NO: 8813 |
| MMP8 | Matrix metallopeptidase 8 | SEQ ID NOS: 8814- |
| | | 8819 |
| MMP9 | Matrix metallopeptidase 9 | SEQ ID NO: 8820 |
| MMRN1 | Multimerin 1 | SEQ ID NOS: 8821- |
| | | 8823 |
| MMRN2 | Multimerin 2 | SEQ ID NOS: 8824- |
| | | 8828 |
| MOXD1 | Monooxygenase, DBH-like 1 | SEQ ID NOS: 8829- |
| | | 8831 |
| MPO | Myeloperoxidase | SEQ ID NOS: 8840- |
| | | 8841 |
| MPPED1 | Metallophosphoesterase domain containing | SEQ ID NOS: 8842- |
| | 1 | 8845 |
| MPZL1 | Myelin protein zero-like 1 | SEQ ID NOS: 8846- |
| | | 8850 |
| MR1 | Major histocompatibility complex, class I- | SEQ ID NOS: 8851- |
| | related | 8856 |
| MRPL2 | Mitochondrial ribosomal protein L2 | SEQ ID NOS: 8857- |
| | | 8861 |
| MRPL21 | Mitochondrial ribosomal protein L21 | SEQ ID NOS: 8862- |
| | | 8868 |
| MRPL22 | Mitochondrial ribosomal protein L22 | SEQ ID NOS: 8869- |
| | | 8873 |
| MRPL24 | Mitochondrial ribosomal protein L24 | SEQ ID NOS: 8874- |
| | | 8878 |
| MRPL27 | Mitochondrial ribosomal protein L27 | SEQ ID NOS: 8879- |
| | | 8884 |
| MRPL32 | Mitochondrial ribosomal protein L32 | SEQ ID NOS: 8885- |
| | | 8887 |
| MRPL34 | Mitochondrial ribosomal protein L34 | SEQ ID NOS: 8888- |
| | | 8892 |
| MRPL35 | Mitochondrial ribosomal protein L35 | SEQ ID NOS: 8893- |
| | | 8896 |
| MRPL52 | Mitochondrial ribosomal protein L52 | SEQ ID NOS: 8897- |
| | | 8907 |
| MRPL55 | Mitochondrial ribosomal protein L55 | SEQ ID NOS: 8908- |
| | | 8933 |
| MRPS14 | Mitochondrial ribosomal protein S14 | SEQ ID NOS: 8934- |
| | | 8935 |
| MRPS22 | Mitochondrial ribosomal protein S22 | SEQ ID NOS: 8936- |
| | | 8944 |
| MRPS28 | Mitochondrial ribosomal protein S28 | SEQ ID NOS: 8945- |
| | | 8952 |
| MS4A14 | Membrane-spanning 4-domains, subfamily | SEQ ID NOS: 8953- |
| | A, member 14 | 8963 |
| MS4A3 | Membrane-spanning 4-domains, subfamily | SEQ ID NOS: 8964- |
| | A, member 3 (hematopoietic cell-specific) | 8968 |
| MSH3 | MutS homolog 3 | SEQ ID NO: 8969 |
| MSH5 | MutS homolog 5 | SEQ ID NOS: 8970- |
| | | 8981 |
| MSLN | Mesothelin | SEQ ID NOS: 8982- |
| | | 8989 |
| MSMB | Microseminoprotein, beta- | SEQ ID NOS: 8990- |
| | | 8991 |
| MSRA | Methionine sulfoxide reductase A | SEQ ID NOS: 8992- |
| | | 8999 |
| MSRB2 | Methionine sulfoxide reductase B2 | SEQ ID NOS: 9000- |
| | | 9001 |
| MSRB3 | Methionine sulfoxide reductase B3 | SEQ ID NOS: 9002- |
| | | 9015 |
| MST1 | Macrophage stimulating 1 | SEQ ID NOS: 9016- |
| | | 9017 |
| MSTN | Myostatin | SEQ ID NO: 9018 |
| MT1G | Metallothionein 1G | SEQ ID NOS: 9019- |
| | | 9022 |
| MTHFD2 | Methylenetetrahydrofolate dehydrogenase | SEQ ID NOS: 9023- |
| | (NADP+ dependent) 2, | 9027 |
| | methenyltetrahydrofolate cyclohydrolase | |
| MTMR14 | Myotubularin related protein 14 | SEQ ID NOS: 9028- |
| | | 9038 |
| MTRNR2L11 | MT-RNR2-like 11 (pseudogene) | SEQ ID NO: 9039 |
| MTRR | 5-methyltetrahydrofolate-homocysteine | SEQ ID NOS: 9040- |
| | methyltransferase reductase | 9052 |
| MTTP | Microsomal triglyceride transfer protein | SEQ ID NOS: 9053- |
| | | 9063 |
| MTX2 | Metaxin 2 | SEQ ID NOS: 9064- |
| | | 9068 |
| MUC1 | Mucin 1, cell surface associated | SEQ ID NOS: 9069- |
| | | 9094 |
| MUC13 | Mucin 13, cell surface associated | SEQ ID NOS: 9095- |
| | | 9096 |
| MUC20 | Mucin 20, cell surface associated | SEQ ID NOS: 9097- |
| | | 9101 |
| MUC3A | Mucin 3A, cell surface associated | SEQ ID NOS: 9102- |
| | | 9104 |
| MUC5AC | Mucin 5AC, oligomeric mucus/gel-forming | SEQ ID NO: 9105 |
| MUC5B | Mucin 5B, oligomeric mucus/gel-forming | SEQ ID NOS: 9106- |
| | | 9107 |
| MUC6 | Mucin 6, oligomeric mucus/gel-forming | SEQ ID NOS: 9108- |
| | | 9111 |
| MUC7 | Mucin 7, secreted | SEQ ID NOS: 9112- |
| | | 9115 |
| MUCL1 | Mucin-like 1 | SEQ ID NOS: 9116- |
| | | 9118 |
| MXRA5 | Matrix-remodelling associated 5 | SEQ ID NO: 9119 |
| MXRA7 | Matrix-remodelling associated 7 | SEQ ID NOS: 9120- |
| | | 9126 |
| MYDGF | Myeloid-derived growth factor | SEQ ID NOS: 9127- |
| | | 9129 |
| MYL1 | Myosin, light chain 1, alkali; skeletal, fast | SEQ ID NOS: 9130- |
| | | 9131 |
| MYOC | Myocilin, trabecular meshwork inducible | SEQ ID NOS: 9132- |
| | glucocorticoid response | 9133 |
| MYRFL | Myelin regulatory factor-like | SEQ ID NOS: 9134- |
| | | 9138 |
| MZB1 | Marginal zone B and B1 cell-specific | SEQ ID NOS: 9139- |
| | protein | 9143 |
| N4BP2L2 | NEDD4 binding protein 2-like 2 | SEQ ID NOS: 9144- |
| | | 9149 |
| NAA38 | N(alpha)-acetyltransferase 38, NatC | SEQ ID NOS: 9150- |
| | auxiliary subunit | 9155 |
| NAAA | N-acylethanolamine acid amidase | SEQ ID NOS: 9156- |
| | | 9161 |
| NAGA | N-acetylgalactosaminidase, alpha- | SEQ ID NOS: 9162- |
| | | 9164 |
| NAGLU | N-acetylglucosaminidase, alpha | SEQ ID NOS: 9165- |
| | | 9169 |
| NAGS | N-acetylglutamate synthase | SEQ ID NOS: 9170- |
| | | 9171 |
| NAPSA | Napsin A aspartic peptidase | SEQ ID NOS: 9172- |
| | | 9174 |
| NBL1 | Neuroblastoma 1, DAN family BMP | SEQ ID NOS: 9180- |
| | antagonist | 9193 |
| NCAM1 | Neural cell adhesion molecule 1 | SEQ ID NOS: 9194- |
| | | 9213 |
| NCAN | Neurocan | SEQ ID NOS: 9214- |
| | | 9215 |
| NCBP2-AS2 | NCBP2 antisense RNA 2 (head to head) | SEQ ID NO: 9216 |
| NCSTN | Nicastrin | SEQ ID NOS: 9217- |
| | | 9226 |
| NDNF | Neuron-derived neurotrophic factor | SEQ ID NOS: 9227- |
| | | 9229 |
| NDP | Norrie disease (pseudoglioma) | SEQ ID NOS: 9230- |
| | | 9232 |
| NDUFA10 | NADH dehydrogenase (ubiquinone) 1 alpha | SEQ ID NOS: 9233- |
| | subcomplex, 10, 42 kDa | 9242 |
| NDUFB5 | NADH dehydrogenase (ubiquinone) 1 beta | SEQ ID NOS: 9243- |
| | subcomplex, 5, 16 kDa | 9251 |
| NDUFS8 | NADH dehydrogenase (ubiquinone) Fe—S | SEQ ID NOS: 9252- |
| | protein 8, 23 kDa (NADH-coenzyme Q | 9261 |
| | reductase) | |
| NDUFV1 | NADH dehydrogenase (ubiquinone) | SEQ ID NOS: 9262- |
| | flavoprotein 1, 51 kDa | 9275 |
| NECAB3 | N-terminal EF-hand calcium binding | SEQ ID NOS: 9276- |
| | protein 3 | 9285 |
| NELL1 | Neural EGFL like 1 | SEQ ID NOS: 9289- |
| | | 9292 |
| NELL2 | Neural EGFL like 2 | SEQ ID NOS: 9293- |
| | | 9307 |
| NENF | Neudesin neurotrophic factor | SEQ ID NO: 9308 |
| NETO1 | Neuropilin (NRP) and tolloid (TLL)-like 1 | SEQ ID NOS: 9309- |
| | | 9312 |
| NFASC | Neurofascin | SEQ ID NOS: 9313- |
| | | 9327 |
| NFE2L1 | Nuclear factor, erythroid 2-like 1 | SEQ ID NOS: 9328- |
| | | 9346 |
| NFE2L3 | Nuclear factor, erythroid 2-like 3 | SEQ ID NOS: 9347- |
| | | 9348 |
| NGEF | Neuronal guanine nucleotide exchange | SEQ ID NOS: 9349- |
| | factor | 9354 |
| NGF | Nerve growth factor (beta polypeptide) | SEQ ID NO: 9355 |
| NGLY1 | N-glycanase 1 | SEQ ID NOS: 9356- |
| | | 9362 |
| NGRN | Neugrin, neurite outgrowth associated | SEQ ID NOS: 9363- |
| | | 9364 |
| NHLRC3 | NHL repeat containing 3 | SEQ ID NOS: 9365- |
| | | 9367 |
| NID1 | Nidogen 1 | SEQ ID NOS: 9368- |
| | | 9369 |
| NID2 | Nidogen 2 (osteonidogen) | SEQ ID NOS: 9370- |
| | | 9372 |
| NKG7 | Natural killer cell granule protein 7 | SEQ ID NOS: 9373- |
| | | 9377 |
| NLGN3 | Neuroligin 3 | SEQ ID NOS: 9378- |
| | | 9382 |
| NLGN4Y | Neuroligin 4, Y-linked | SEQ ID NOS: 9383- |
| | | 9389 |
| NLRP5 | NLR family, pyrin domain containing 5 | SEQ ID NOS: 9390- |
| | | 9392 |
| NMB | Neuromedin B | SEQ ID NOS: 9393- |
| | | 9394 |
| NME1 | NME/NM23 nucleoside diphosphate kinase | SEQ ID NOS: 9395- |
| | 1 | 9401 |
| NME1-NME2 | NME1-NME2 readthrough | SEQ ID NOS: 9402- |
| | | 9404 |
| NME3 | NME/NM23 nucleoside diphosphate kinase | SEQ ID NOS: 9405- |
| | 3 | 9409 |
| NMS | Neuromedin S | SEQ ID NO: 9410 |
| NMU | Neuromedin U | SEQ ID NOS: 9411- |
| | | 9414 |
| NOA1 | Nitric oxide associated 1 | SEQ ID NO: 9415 |
| NODAL | Nodal growth differentiation factor | SEQ ID NOS: 9416- |
| | | 9417 |
| NOG | Noggin | SEQ ID NO: 9418 |
| NOMO3 | NODAL modulator 3 | SEQ ID NOS: 9419- |
| | | 9425 |
| NOS1AP | Nitric oxide synthase 1 (neuronal) adaptor | SEQ ID NOS: 9426- |
| | protein | 9430 |
| NOTCH3 | Notch 3 | SEQ ID NOS: 9431- |
| | | 9434 |
| NOTUM | Notum pectinacetylesterase homolog | SEQ ID NOS: 9435- |
| | (Drosophila) | 9437 |
| NOV | Nephroblastoma overexpressed | SEQ ID NO: 9438 |
| NPB | Neuropeptide B | SEQ ID NOS: 9439- |
| | | 9440 |
| NPC2 | Niemann-Pick disease, type C2 | SEQ ID NOS: 9441- |
| | | 9449 |
| NPFF | Neuropeptide FF-amide peptide precursor | SEQ ID NO: 9450 |
| NPFFR2 | Neuropeptide FF receptor 2 | SEQ ID NOS: 9451- |
| | | 9454 |
| NPHS1 | Nephrosis 1, congenital, Finnish type | SEQ ID NOS: 9455- |
| | (nephrin) | 9456 |
| NPNT | Nephronectin | SEQ ID NOS: 9457- |
| | | 9467 |
| NPPA | Natriuretic peptide A | SEQ ID NOS: 9468- |
| | | 9470 |
| NPPB | Natriuretic peptide B | SEQ ID NO: 9471 |
| NPPC | Natriuretic peptide C | SEQ ID NOS: 9472- |
| | | 9473 |
| NPS | Neuropeptide S | SEQ ID NO: 9474 |
| NPTX1 | Neuronal pentraxin I | SEQ ID NO: 9475 |
| NPTX2 | Neuronal pentraxin II | SEQ ID NO: 9476 |
| NPTXR | Neuronal pentraxin receptor | SEQ ID NOS: 9477- |
| | | 9478 |
| NPVF | Neuropeptide VF precursor | SEQ ID NO: 9479 |
| NPW | Neuropeptide W | SEQ ID NOS: 9480- |
| | | 9482 |
| NPY | Neuropeptide Y | SEQ ID NOS: 9483- |
| | | 9485 |
| NQO2 | NAD(P)H dehydrogenase, quinone 2 | SEQ ID NOS: 9486- |
| | | 9494 |
| NRCAM | Neuronal cell adhesion molecule | SEQ ID NOS: 9495- |
| | | 9507 |
| NRG1 | Neuregulin 1 | SEQ ID NOS: 9508- |
| | | 9525 |
| NRN1L | Neuritin 1-like | SEQ ID NOS: 9526- |
| | | 9528 |
| NRP1 | Neuropilin 1 | SEQ ID NOS: 9529- |
| | | 9542 |
| NRP2 | Neuropilin 2 | SEQ ID NOS: 9543- |
| | | 9549 |
| NRTN | Neurturin | SEQ ID NO: 9550 |
| NRXN1 | Neurexin 1 | SEQ ID NOS: 9551- |
| | | 9581 |
| NRXN2 | Neurexin 2 | SEQ ID NOS: 9582- |
| | | 9590 |
| NT5C3A | 5′-nucleotidase, cytosolic IIIA | SEQ ID NOS: 9591- |
| | | 9601 |
| NT5DC3 | 5′-nucleotidase domain containing 3 | SEQ ID NOS: 9602- |
| | | 9604 |
| NT5E | 5′-nucleotidase, ecto (CD73) | SEQ ID NOS: 9605- |
| | | 9609 |
| NTF3 | Neurotrophin 3 | SEQ ID NOS: 9610- |
| | | 9611 |
| NTF4 | Neurotrophin 4 | SEQ ID NOS: 9612- |
| | | 9613 |
| NTM | Neurotrimin | SEQ ID NOS: 9614- |
| | | 9623 |
| NTN1 | Netrin 1 | SEQ ID NOS: 9624- |
| | | 9625 |
| NTN3 | Netrin 3 | SEQ ID NO: 9626 |
| NTN4 | Netrin 4 | SEQ ID NOS: 9627- |
| | | 9631 |
| NTN5 | Netrin 5 | SEQ ID NOS: 9632- |
| | | 9633 |
| NTNG1 | Netrin G1 | SEQ ID NOS: 9634- |
| | | 9640 |
| NTNG2 | Netrin G2 | SEQ ID NOS: 9641- |
| | | 9642 |
| NTS | Neurotensin | SEQ ID NOS: 9643- |
| | | 9644 |
| NUBPL | Nucleotide binding proteindike | SEQ ID NOS: 9645- |
| | | 9651 |
| NUCB1 | Nucleobindin 1 | SEQ ID NOS: 9652- |
| | | 9658 |
| NUCB2 | Nucleobindin 2 | SEQ ID NOS: 9659- |
| | | 9674 |
| NUDT19 | Nudix (nucleoside diphosphate linked | SEQ ID NO: 9675 |
| | moiety X)-type motif 19 | |
| NUDT9 | Nudix (nucleoside diphosphate linked | SEQ ID NOS: 9676- |
| | moiety X)-type motif 9 | 9680 |
| NUP155 | Nucleoporin 155 kDa | SEQ ID NOS: 9681- |
| | | 9684 |
| NUP214 | Nucleoporin 214 kDa | SEQ ID NOS: 9685- |
| | | 9696 |
| NUP85 | Nucleoporin 85 kDa | SEQ ID NOS: 9697- |
| | | 9711 |
| NXPE3 | Neurexophilin and PC-esterase domain | SEQ ID NOS: 9712- |
| | family, member 3 | 9716 |
| NXPE4 | Neurexophilin and PC-esterase domain | SEQ ID NOS: 9717- |
| | family, member 4 | 9718 |
| NXPH1 | Neurexophilin 1 | SEQ ID NOS: 9719- |
| | | 9722 |
| NXPH2 | Neurexophilin 2 | SEQ ID NO: 9723 |
| NXPH3 | Neurexophilin 3 | SEQ ID NOS: 9724- |
| | | 9725 |
| NXPH4 | Neurexophilin 4 | SEQ ID NOS: 9726- |
| | | 9727 |
| NYX | Nyctalopin | SEQ ID NOS: 9728- |
| | | 9729 |
| OAF | Out at first homolog | SEQ ID NOS: 9730- |
| | | 9731 |
| OBP2A | Odorant binding protein 2A | SEQ ID NOS: 9732- |
| | | 9738 |
| OBP2B | Odorant binding protein 2B | SEQ ID NOS: 9739- |
| | | 9742 |
| OC90 | Otoconin 90 | SEQ ID NO: 9743 |
| OCLN | Occludin | SEQ ID NOS: 9744- |
| | | 9746 |
| ODAM | Odontogenic, ameloblast asssociated | SEQ ID NOS: 9747- |
| | | 9750 |
| OGG1 | 8-oxoguanine DNA glycosylase | SEQ ID NOS: 9755- |
| | | 9768 |
| OGN | Osteoglycin | SEQ ID NOS: 9769- |
| | | 9771 |
| OIT3 | Oncoprotein induced transcript 3 | SEQ ID NOS: 9772- |
| | | 9773 |
| OLFM1 | Olfactomedin 1 | SEQ ID NOS: 9774- |
| | | 9784 |
| OLFM2 | Olfactomedin 2 | SEQ ID NOS: 9785- |
| | | 9788 |
| OLFM3 | Olfactomedin 3 | SEQ ID NOS: 9789- |
| | | 9791 |
| OLFM4 | Olfactomedin 4 | SEQ ID NO: 9792 |
| OLFML1 | Olfactomedin-like 1 | SEQ ID NOS: 9793- |
| | | 9796 |
| OLFML2A | Olfactomedin-like 2A | SEQ ID NOS: 9797- |
| | | 9799 |
| OLFML2B | Olfactomedin-like 2B | SEQ ID NOS: 9800- |
| | | 9804 |
| OLFML3 | Olfactomedin-like 3 | SEQ ID NOS: 9805- |
| | | 9807 |
| OMD | Osteomodulin | SEQ ID NO: 9808 |
| OMG | Oligodendrocyte myelin glycoprotein | SEQ ID NO: 9809 |
| OOSP2 | Oocyte secreted protein 2 | SEQ ID NOS: 9810- |
| | | 9811 |
| OPCML | Opioid binding protein/cell adhesion | SEQ ID NOS: 9812- |
| | molecule-like | 9816 |
| OPTC | Opticin | SEQ ID NOS: 9818- |
| | | 9819 |
| ORAI1 | ORAI calcium release-activated calcium | SEQ ID NO: 9820 |
| | modulator 1 | |
| ORM1 | Orosomucoid 1 | SEQ ID NO: 9821 |
| ORM2 | Orosomucoid 2 | SEQ ID NO: 9822 |
| ORMDL2 | ORMDL sphingolipid biosynthesis | SEQ ID NOS: 9823- |
| | regulator 2 | 9826 |
| OS9 | Osteosarcoma amplified 9, endoplasmic | SEQ ID NOS: 9827- |
| | reticulum lectin | 9841 |
| OSCAR | Osteoclast associated, immunoglobulin-like | SEQ ID NOS: 9842- |
| | receptor | 9852 |
| OSM | Oncostatin M | SEQ ID NOS: 9853- |
| | | 9855 |
| OSMR | Oncostatin M receptor | SEQ ID NOS: 9856- |
| | | 9860 |
| OSTN | Osteocrin | SEQ ID NOS: 9861- |
| | | 9862 |
| OTOA | Otoancorin | SEQ ID NOS: 9863- |
| | | 9868 |
| OTOG | Otogelin | SEQ ID NOS: 9869- |
| | | 9871 |
| OTOGL | Otogelin-like | SEQ ID NOS: 9872- |
| | | 9878 |
| OTOL1 | Otolin 1 | SEQ ID NO: 9879 |
| OTOR | Otoraplin | SEQ ID NO: 9880 |
| OTOS | Otospiralin | SEQ ID NOS: 9881- |
| | | 9882 |
| OVCH1 | Ovochymase 1 | SEQ ID NOS: 9883- |
| | | 9885 |
| OVCH2 | Ovochymase 2 (gene/pseudogene) | SEQ ID NOS: 9886- |
| | | 9887 |
| OVGP1 | Oviductal glycoprotein 1, 120 kDa | SEQ ID NO: 9888 |
| OXCT1 | 3-oxoacid CoA transferase 1 | SEQ ID NOS: 9889- |
| | | 9892 |
| OXCT2 | 3-oxoacid CoA transferase 2 | SEQ ID NO: 9893 |
| OXNAD1 | Oxidoreductase NAD-binding domain | SEQ ID NOS: 9894- |
| | containing 1 | 9900 |
| OXT | Oxytocin/neurophysin I prepropeptide | SEQ ID NO: 9901 |
| P3H1 | Prolyl 3-hydroxylase 1 | SEQ ID NOS: 9902- |
| | | 9906 |
| P3H2 | Prolyl 3-hydroxylase 2 | SEQ ID NOS: 9907- |
| | | 9910 |
| P3H3 | Prolyl 3-hydroxylase 3 | SEQ ID NO: 9911 |
| P3H4 | Prolyl 3-hydroxylase family member 4 | SEQ ID NOS: 9912- |
| | (non-enzymatic) | 9916 |
| P4HA1 | Prolyl 4-hydroxylase, alpha polypeptide I | SEQ ID NOS: 9917- |
| | | 9921 |
| P4HA2 | Prolyl 4-hydroxylase, alpha polypeptide II | SEQ ID NOS: 9922- |
| | | 9936 |
| P4HA3 | Prolyl 4-hydroxylase, alpha polypeptide III | SEQ ID NOS: 9937- |
| | | 9941 |
| P4HB | Prolyl 4-hydroxylase, beta polypeptide | SEQ ID NOS: 9942- |
| | | 9953 |
| PAEP | Progestagen-associated endometrial protein | SEQ ID NOS: 9954- |
| | | 9962 |
| PAM | Peptidylglycine alpha-amidating | SEQ ID NOS: 9963- |
| | monooxygenase | 9976 |
| PAMR1 | Peptidase domain containing associated | SEQ ID NOS: 9977- |
| | with muscle regeneration 1 | 9983 |
| PAPL | Iron/zinc purple acid phosphatase-like | SEQ ID NOS: 159-162 |
| | protein | |
| PAPLN | Papilin, proteoglycan-like sulfated | SEQ ID NOS: 9984- |
| | glycoprotein | 9991 |
| PAPPA | Pregnancy-associated plasma protein A, | SEQ ID NO: 9992 |
| | pappalysin 1 | |
| PAPPA2 | Pappalysin 2 | SEQ ID NOS: 9993- |
| | | 9994 |
| PARP15 | Poly (ADP-ribose) polymerase family, | SEQ ID NOS: 9995- |
| | member 15 | 9998 |
| PARVB | Parvin, beta | SEQ ID NOS: 9999- |
| | | 10003 |
| PATE1 | Prostate and testis expressed 1 | SEQ ID NOS: 10004- |
| | | 10005 |
| PATE2 | Prostate and testis expressed 2 | SEQ ID NOS: 10006- |
| | | 10007 |
| PATE3 | Prostate and testis expressed 3 | SEQ ID NO: 10008 |
| PATE4 | Prostate and testis expressed 4 | SEQ ID NOS: 10009- |
| | | 10010 |
| PATL2 | Protein associated with topoisomerase II | SEQ ID NOS: 10011- |
| | homolog 2 (yeast) | 10016 |
| PAX2 | Paired box 2 | SEQ ID NOS: 10017- |
| | | 10022 |
| PAX4 | Paired box 4 | SEQ ID NOS: 10023- |
| | | 10029 |
| PCCB | Propionyl CoA carboxylase, beta | SEQ ID NOS: 10030- |
| | polypeptide | 10044 |
| PCDH1 | Protocadherin 1 | SEQ ID NOS: 10045- |
| | | 10050 |
| PCDH12 | Protocadherin 12 | SEQ ID NOS: 10051- |
| | | 10052 |
| PCDH15 | Protocadherin-related 15 | SEQ ID NOS: 10053- |
| | | 10086 |
| PCDHA1 | Protocadherin alpha 1 | SEQ ID NOS: 10087- |
| | | 10089 |
| PCDHA10 | Protocadherin alpha 10 | SEQ ID NOS: 10090- |
| | | 10092 |
| PCDHA11 | Protocadherin alpha 11 | SEQ ID NOS: 10093- |
| | | 10095 |
| PCDHA6 | Protocadherin alpha 6 | SEQ ID NOS: 10096- |
| | | 10098 |
| PCDHB12 | Protocadherin beta 12 | SEQ ID NOS: 10099- |
| | | 10101 |
| PCDHGA11 | Protocadherin gamma subfamily A, 11 | SEQ ID NOS: 10102- |
| | | 10104 |
| PCF11 | PCF11 cleavage and polyadenylation factor | SEQ ID NOS: 10105- |
| | subunit | 10109 |
| PCOLCE | Procollagen C-endopeptidase enhancer | SEQ ID NO: 10110 |
| PCOLCE2 | Procollagen C-endopeptidase enhancer 2 | SEQ ID NOS: 10111- |
| | | 10114 |
| PCSK1 | Proprotein convertase subtilisin/kexin type | SEQ ID NOS: 10115- |
| | 1 | 10117 |
| PCSK1N | Proprotein convertase subtilisin/kexin type | SEQ ID NO: 10118 |
| | 1 inhibitor | |
| PCSK2 | Proprotein convertase subtilisin/kexin type | SEQ ID NOS: 10119- |
| | 2 | 10121 |
| PCSK4 | Proprotein convertase subtilisin/kexin type | SEQ ID NOS: 10122- |
| | 4 | 10124 |
| PCSK5 | Proprotein convertase subtilisin/kexin type | SEQ ID NOS: 10125- |
| | 5 | 10129 |
| PCSK9 | Proprotein convertase subtilisin/kexin type | SEQ ID NO: 10130 |
| | 9 | |
| PCYOX1 | Prenylcysteine oxidase 1 | SEQ ID NOS: 10131- |
| | | 10135 |
| PCYOX1L | Prenylcysteine oxidase 1 like | SEQ ID NOS: 10136- |
| | | 10140 |
| PDDC1 | Parkinson disease 7 domain containing 1 | SEQ ID NOS: 5802- |
| | | 5810 |
| PDE11A | Phosphodiesterase 11A | SEQ ID NOS: 10141- |
| | | 10146 |
| PDE2A | Phosphodiesterase 2A, cGMP-stimulated | SEQ ID NOS: 10147- |
| | | 10168 |
| PDE7A | Phosphodiesterase 7A | SEQ ID NOS: 10169- |
| | | 10172 |
| PDF | Peptide deformylase (mitochondrial) | SEQ ID NO: 10173 |
| PDGFA | Platelet-derived growth factor alpha | SEQ ID NOS: 10174- |
| | polypeptide | 10177 |
| PDGFB | Platelet-derived growth factor beta | SEQ ID NOS: 10178- |
| | polypeptide | 10181 |
| PDGFC | Platelet derived growth factor C | SEQ ID NOS: 10182- |
| | | 10185 |
| PDGFD | Platelet derived growth factor D | SEQ ID NOS: 10186- |
| | | 10188 |
| PDGFRA | Platelet-derived growth factor receptor, | SEQ ID NOS: 10189- |
| | alpha polypeptide | 10195 |
| PDGFRB | Platelet-derived growth factor receptor, beta | SEQ ID NOS: 10196- |
| | polypeptide | 10199 |
| PDGFRL | Platelet-derived growth factor receptor-like | SEQ ID NOS: 10200- |
| | | 10201 |
| PDHA1 | Pyruvate dehydrogenase (lipoamide) alpha | SEQ ID NOS: 10202- |
| | 1 | 10210 |
| PDIA2 | Protein disulfide isomerase family A, | SEQ ID NOS: 10211- |
| | member 2 | 10214 |
| PDIA3 | Protein disulfide isomerase family A, | SEQ ID NOS: 10215- |
| | member 3 | 10218 |
| PDIA4 | Protein disulfide isomerase family A, | SEQ ID NOS: 10219- |
| | member 4 | 10220 |
| PDIA5 | Protein disulfide isomerase family A, | SEQ ID NOS: 10221- |
| | member 5 | 10224 |
| PDIA6 | Protein disulfide isomerase family A, | SEQ ID NOS: 10225- |
| | member 6 | 10231 |
| PDILT | Protein disulfide isomerase-like, testis | SEQ ID NOS: 10232- |
| | expressed | 10233 |
| PDYN | Prodynorphin | SEQ ID NOS: 10234- |
| | | 10236 |
| PDZD8 | PDZ domain containing 8 | SEQ ID NO: 10237 |
| PDZRN4 | PDZ domain containing ring finger 4 | SEQ ID NOS: 10238- |
| | | 10240 |
| PEAR1 | Platelet endothelial aggregation receptor 1 | SEQ ID NOS: 10241- |
| | | 10244 |
| PEBP4 | Phosphatidylethanolamine-binding protein 4 | SEQ ID NOS: 10245- |
| | | 10246 |
| PECAM1 | Platelet/endothelial cell adhesion molecule | SEQ ID NOS: 10247- |
| | 1 | 10250 |
| PENK | Proenkephalin | SEQ ID NOS: 10251- |
| | | 10256 |
| PET117 | PET117 homolog | SEQ ID NO: 10257 |
| PF4 | Platelet factor 4 | SEQ ID NO: 10258 |
| PF4V1 | Platelet factor 4 variant 1 | SEQ ID NO: 10259 |
| PFKP | Phosphofructokinase, platelet | SEQ ID NOS: 10260- |
| | | 10268 |
| PFN1 | Profilin 1 | SEQ ID NOS: 10269- |
| | | 10271 |
| PGA3 | Pepsinogen 3, group I (pepsinogen A) | SEQ ID NOS: 10272- |
| | | 10275 |
| PGA4 | Pepsinogen 4, group I (pepsinogen A) | SEQ ID NOS: 10276- |
| | | 10278 |
| PGA5 | Pepsinogen 5, group I (pepsinogen A) | SEQ ID NOS: 10279- |
| | | 10281 |
| PGAM5 | PGAM family member 5, serine/threonine | SEQ ID NOS: 10282- |
| | protein phosphatase, mitochondrial | 10285 |
| PGAP3 | Post-GPI attachment to proteins 3 | SEQ ID NOS: 10286- |
| | | 10293 |
| PGC | Progastricsin (pepsinogen C) | SEQ ID NOS: 10294- |
| | | 10297 |
| PGF | Placental growth factor | SEQ ID NOS: 10298- |
| | | 10301 |
| PGLYRP1 | Peptidoglycan recognition protein 1 | SEQ ID NO: 10302 |
| PGLYRP2 | Peptidoglycan recognition protein 2 | SEQ ID NOS: 10303- |
| | | 10306 |
| PGLYRP3 | Peptidoglycan recognition protein 3 | SEQ ID NO: 10307 |
| PGLYRP4 | Peptidoglycan recognition protein 4 | SEQ ID NOS: 10308- |
| | | 10309 |
| PHACTR1 | Phosphatase and actin regulator 1 | SEQ ID NOS: 10310- |
| | | 10316 |
| PHB | Prohibitin | SEQ ID NOS: 10317- |
| | | 10325 |
| PI15 | Peptidase inhibitor 15 | SEQ ID NOS: 10326- |
| | | 10327 |
| PI3 | Peptidase inhibitor 3, skin-derived | SEQ ID NO: 10328 |
| PIANP | PILR alpha associated neural protein | SEQ ID NOS: 10329- |
| | | 10334 |
| PIGK | Phosphatidylinositol glycan anchor | SEQ ID NOS: 10335- |
| | biosynthesis, class K | 10338 |
| PIGL | Phosphatidylinositol glycan anchor | SEQ ID NOS: 10339- |
| | biosynthesis, class L | 10346 |
| PIGT | Phosphatidylinositol glycan anchor | SEQ ID NOS: 10347- |
| | biosynthesis, class T | 10400 |
| PIGZ | Phosphatidylinositol glycan anchor | SEQ ID NOS: 10401- |
| | biosynthesis, class Z | 10403 |
| PIK3AP1 | Phosphoinositide-3-kinase adaptor protein 1 | SEQ ID NOS: 10404- |
| | | 10406 |
| PIK3IP1 | Phosphoinositide-3-kinase interacting | SEQ ID NOS: 10407- |
| | protein 1 | 10410 |
| PILRA | Paired immunoglobin-like type 2 receptor | SEQ ID NOS: 10411- |
| | alpha | 10415 |
| PILRB | Paired immunoglobin-like type 2 receptor | SEQ ID NOS: 10416- |
| | beta | 10427 |
| PINLYP | Phospholipase A2 inhibitor and | SEQ ID NOS: 10428- |
| | LY6/PLAUR domain containing | 10432 |
| PIP | Prolactin-induced protein | SEQ ID NO: 10433 |
| PIWIL4 | Piwi-like RNA-mediated gene silencing 4 | SEQ ID NOS: 10434- |
| | | 10438 |
| PKDCC | Protein kinase domain containing, | SEQ ID NOS: 10439- |
| | cytoplasmic | 10440 |
| PKHD1 | Polycystic kidney and hepatic disease 1 | SEQ ID NOS: 10441- |
| | (autosomal recessive) | 10442 |
| PLA1A | Phospholipase A1 member A | SEQ ID NOS: 10443- |
| | | 10447 |
| PLA2G10 | Phospholipase A2, group X | SEQ ID NOS: 10448- |
| | | 10449 |
| PLA2G12A | Phospholipase A2, group XIIA | SEQ ID NOS: 10450- |
| | | 10452 |
| PLA2G12B | Phospholipase A2, group XIIB | SEQ ID NO: 10453 |
| PLA2G15 | Phospholipase A2, group XV | SEQ ID NOS: 10454- |
| | | 10461 |
| PLA2G1B | Phospholipase A2, group IB (pancreas) | SEQ ID NOS: 10462- |
| | | 10464 |
| PLA2G2A | Phospholipase A2, group IIA (platelets, | SEQ ID NOS: 10465- |
| | synovial fluid) | 10466 |
| PLA2G2C | Phospholipase A2, group IIC | SEQ ID NOS: 10467- |
| | | 10468 |
| PLA2G2D | Phospholipase A2, group IID | SEQ ID NOS: 10469- |
| | | 10470 |
| PLA2G2E | Phospholipase A2, group IIE | SEQ ID NO: 10471 |
| PLA2G3 | Phospholipase A2, group III | SEQ ID NO: 10472 |
| PLA2G5 | Phospholipase A2, group V | SEQ ID NO: 10473 |
| PLA2G7 | Phospholipase A2, group VII (platelet- | SEQ ID NOS: 10474- |
| | activating factor acetylhydrolase, plasma) | 10475 |
| PLA2R1 | Phospholipase A2 receptor 1, 180 kDa | SEQ ID NOS: 10476- |
| | | 10477 |
| PLAC1 | Placenta-specific 1 | SEQ ID NO: 10478 |
| PLAC9 | Placenta-specific 9 | SEQ ID NOS: 10479- |
| | | 10481 |
| PLAT | Plasminogen activator, tissue | SEQ ID NOS: 10482- |
| | | 10490 |
| PLAU | Plasminogen activator, urokinase | SEQ ID NOS: 10491- |
| | | 10493 |
| PLAUR | Plasminogen activator, urokinase receptor | SEQ ID NOS: 10494- |
| | | 10505 |
| PLBD1 | Phospholipase B domain containing 1 | SEQ ID NOS: 10506- |
| | | 10508 |
| PLBD2 | Phospholipase B domain containing 2 | SEQ ID NOS: 10509- |
| | | 10511 |
| PLG | Plasminogen | SEQ ID NOS: 10512- |
| | | 10514 |
| PLGLB1 | Plasminogen-like B1 | SEQ ID NOS: 10515- |
| | | 10518 |
| PLGLB2 | Plasminogen-like B2 | SEQ ID NOS: 10519- |
| | | 10520 |
| PLOD1 | Procollagen-lysine, 2-oxoglutarate 5- | SEQ ID NOS: 10521- |
| | dioxygenase 1 | 10523 |
| PLOD2 | Procollagen-lysine, 2-oxoglutarate 5- | SEQ ID NOS: 10524- |
| | dioxygenase 2 | 10529 |
| PLOD3 | Procollagen-lysine, 2-oxoglutarate 5- | SEQ ID NOS: 10530- |
| | dioxygenase 3 | 10536 |
| PLTP | Phospholipid transfer protein | SEQ ID NOS: 10537- |
| | | 10541 |
| PLXNA4 | Plexin A4 | SEQ ID NOS: 10542- |
| | | 10545 |
| PLXNB2 | Plexin B2 | SEQ ID NOS: 10546- |
| | | 10554 |
| PM20D1 | Peptidase M20 domain containing 1 | SEQ ID NO: 10555 |
| PMCH | Pro-melanin-concentrating hormone | SEQ ID NO: 10556 |
| PMEL | Premelanosome protein | SEQ ID NOS: 10557- |
| | | 10568 |
| PMEPA1 | Prostate transmembrane protein, androgen | SEQ ID NOS: 10569- |
| | induced 1 | 10575 |
| PNLIP | Pancreatic lipase | SEQ ID NO: 10576 |
| PNLIPRP1 | Pancreatic lipase-related protein 1 | SEQ ID NOS: 10577- |
| | | 10585 |
| PNLIPRP3 | Pancreatic lipase-related protein 3 | SEQ ID NO: 10586 |
| PNOC | Prepronociceptin | SEQ ID NOS: 10587- |
| | | 10589 |
| PNP | Purine nucleoside phosphorylase | SEQ ID NOS: 10590- |
| | | 10593 |
| PNPLA4 | Patatin-like phospholipase domain | SEQ ID NOS: 10594- |
| | containing 4 | 10597 |
| PODNL1 | Podocan-like 1 | SEQ ID NOS: 10598- |
| | | 10609 |
| POFUT1 | Protein O-fucosyltransferase 1 | SEQ ID NOS: 10610- |
| | | 10611 |
| POFUT2 | Protein O-fucosyltransferase 2 | SEQ ID NOS: 10612- |
| | | 10617 |
| POGLUT1 | Protein O-glucosyltransferase 1 | SEQ ID NOS: 10618- |
| | | 10622 |
| POLL | Polymerase (DNA directed), lambda | SEQ ID NOS: 10623- |
| | | 10635 |
| POMC | Proopiomelanocortin | SEQ ID NOS: 10636- |
| | | 10640 |
| POMGNT2 | Protein O-linked mannose N- | SEQ ID NOS: 10641- |
| | acetylglucosaminyltransferase 2 (beta 1,4-) | 10642 |
| PON1 | Paraoxonase 1 | SEQ ID NOS: 10643- |
| | | 10644 |
| PON2 | Paraoxonase 2 | SEQ ID NOS: 10645- |
| | | 10657 |
| PON3 | Paraoxonase 3 | SEQ ID NOS: 10658- |
| | | 10663 |
| POSTN | Periostin, osteoblast specific factor | SEQ ID NOS: 10664- |
| | | 10669 |
| PPBP | Pro-platelet basic protein (chemokine (C-X- | SEQ ID NO: 10670 |
| | C motif) ligand 7) | |
| PPIB | Peptidylprolyl isomerase B (cyclophilin B) | SEQ ID NO: 10671 |
| PPIC | Peptidylprolyl isomerase C (cyclophilin C) | SEQ ID NO: 10672 |
| PPOX | Protoporphyrinogen oxidase | SEQ ID NOS: 10673- |
| | | 10683 |
| PPP1CA | Protein phosphatase 1, catalytic subunit, | SEQ ID NOS: 10684- |
| | alpha isozyme | 10689 |
| PPT1 | Palmitoyl-protein thioesterase 1 | SEQ ID NOS: 10690- |
| | | 10706 |
| PPT2 | Palmitoyl-protein thioesterase 2 | SEQ ID NOS: 10707- |
| | | 10714 |
| PPY | Pancreatic polypeptide | SEQ ID NOS: 10715- |
| | | 10719 |
| PRAC2 | Prostate cancer susceptibility candidate 2 | SEQ ID NOS: 10720- |
| | | 10721 |
| PRADC1 | Protease-associated domain containing 1 | SEQ ID NO: 10722 |
| PRAP1 | Proline-rich acidic protein 1 | SEQ ID NOS: 10723- |
| | | 10724 |
| PRB1 | Proline-rich protein BstNI subfamily 1 | SEQ ID NOS: 10725- |
| | | 10728 |
| PRB2 | Proline-rich protein BstNI subfamily 2 | SEQ ID NOS: 10729- |
| | | 10730 |
| PRB3 | Proline-rich protein BstNI subfamily 3 | SEQ ID NOS: 10731- |
| | | 10732 |
| PRB4 | Proline-rich protein BstNI subfamily 4 | SEQ ID NOS: 10733- |
| | | 10736 |
| PRCD | Progressive rod-cone degeneration | SEQ ID NOS: 10737- |
| | | 10738 |
| PRCP | Prolylcarboxypeptidase (angiotensinase C) | SEQ ID NOS: 10739- |
| | | 10750 |
| PRDM12 | PR domain containing 12 | SEQ ID NO: 10751 |
| PRDX4 | Peroxiredoxin 4 | SEQ ID NOS: 10752- |
| | | 10755 |
| PRELP | Proline/arginine-rich end leucine-rich repeat | SEQ ID NO: 10756 |
| | protein | |
| PRF1 | Perforin 1 (pore forming protein) | SEQ ID NOS: 10757- |
| | | 10759 |
| PRG2 | Proteoglycan 2, bone marrow (natural killer | SEQ ID NOS: 10760- |
| | cell activator, eosinophil granule major | 10762 |
| | basic protein) | |
| PRG3 | Proteoglycan 3 | SEQ ID NO: 10763 |
| PRG4 | Proteoglycan 4 | SEQ ID NOS: 10764- |
| | | 10769 |
| PRH1 | Proline-rich protein HaeIII subfamily 1 | SEQ ID NOS: 10770- |
| | | 10772 |
| PRH2 | Proline-rich protein HaeIII subfamily 2 | SEQ ID NOS: 10773- |
| | | 10774 |
| PRKAG1 | Protein kinase, AMP-activated, gamma 1 | SEQ ID NOS: 10775- |
| | non-catalytic subunit | 10789 |
| PRKCSH | Protein kinase C substrate 80K-H | SEQ ID NOS: 10790- |
| | | 10799 |
| PRKD1 | Protein kinase D1 | SEQ ID NOS: 10800- |
| | | 10805 |
| PRL | Prolactin | SEQ ID NOS: 10806- |
| | | 10808 |
| PRLH | Prolactin releasing hormone | SEQ ID NO: 10809 |
| PRLR | Prolactin receptor | SEQ ID NOS: 10810- |
| | | 10828 |
| PRNP | Prion protein | SEQ ID NOS: 10829- |
| | | 10832 |
| PRNT | Prion protein (testis specific) | SEQ ID NO: 10833 |
| PROC | Protein C (inactivator of coagulation factors | SEQ ID NOS: 10834- |
| | Va and VIIIa) | 10841 |
| PROK1 | Prokineticin 1 | SEQ ID NO: 10842 |
| PROK2 | Prokineticin 2 | SEQ ID NOS: 10843- |
| | | 10844 |
| PROL1 | Proline rich, lacrimal 1 | SEQ ID NO: 9817 |
| PROM1 | Prominin 1 | SEQ ID NOS: 10845- |
| | | 10856 |
| PROS1 | Protein S (alpha) | SEQ ID NOS: 10857- |
| | | 10860 |
| PROZ | Protein Z, vitamin K-dependent plasma | SEQ ID NOS: 10861- |
| | glycoprotein | 10862 |
| PRR27 | Proline rich 27 | SEQ ID NOS: 10863- |
| | | 10866 |
| PRR4 | Proline rich 4 (lacrimal) | SEQ ID NOS: 10867- |
| | | 10869 |
| PRRG2 | Proline rich Gla (G-carboxyglutamic acid) 2 | SEQ ID NOS: 10870- |
| | | 10872 |
| PRRT3 | Proline-rich transmembrane protein 3 | SEQ ID NOS: 10873- |
| | | 10875 |
| PRRT4 | Proline-rich transmembrane protein 4 | SEQ ID NOS: 10876- |
| | | 10882 |
| PRSS1 | Protease, serine, 1 (trypsin 1) | SEQ ID NOS: 10883- |
| | | 10886 |
| PRSS12 | Protease, serine, 12 (neurotrypsin, | SEQ ID NO: 10887 |
| | motopsin) | |
| PRSS16 | Protease, serine, 16 (thymus) | SEQ ID NOS: 10888- |
| | | 10895 |
| PRSS2 | Protease, serine, 2 (trypsin 2) | SEQ ID NOS: 10896- |
| | | 10899 |
| PRSS21 | Protease, serine, 21 (testisin) | SEQ ID NOS: 10900- |
| | | 10905 |
| PRSS22 | Protease, serine, 22 | SEQ ID NOS: 10906- |
| | | 10908 |
| PRSS23 | Protease, serine, 23 | SEQ ID NOS: 10909- |
| | | 10912 |
| PRSS27 | Protease, serine 27 | SEQ ID NOS: 10913- |
| | | 10915 |
| PRSS3 | Protease, serine, 3 | SEQ ID NOS: 10916- |
| | | 10920 |
| PRSS33 | Protease, serine, 33 | SEQ ID NOS: 10921- |
| | | 10924 |
| PRSS35 | Protease, serine, 35 | SEQ ID NO: 10925 |
| PRSS36 | Protease, serine, 36 | SEQ ID NOS: 10926- |
| | | 10929 |
| PRSS37 | Protease, serine, 37 | SEQ ID NOS: 10930- |
| | | 10933 |
| PRSS38 | Protease, serine, 38 | SEQ ID NO: 10934 |
| PRSS42 | Protease, serine, 42 | SEQ ID NOS: 10935- |
| | | 10936 |
| PRSS48 | Protease, serine, 48 | SEQ ID NOS: 10937- |
| | | 10938 |
| PRSS50 | Protease, serine, 50 | SEQ ID NO: 10939 |
| PRSS53 | Protease, serine, 53 | SEQ ID NO: 10940 |
| PRSS54 | Protease, serine, 54 | SEQ ID NOS: 10941- |
| | | 10945 |
| PRSS55 | Protease, serine, 55 | SEQ ID NOS: 10946- |
| | | 10948 |
| PRSS56 | Protease, serine, 56 | SEQ ID NOS: 10949- |
| | | 10950 |
| PRSS57 | Protease, serine, 57 | SEQ ID NOS: 10951- |
| | | 10952 |
| PRSS58 | Protease, serine, 58 | SEQ ID NOS: 10953- |
| | | 10954 |
| PRSS8 | Protease, serine, 8 | SEQ ID NOS: 10955- |
| | | 10958 |
| PRTG | Protogenin | SEQ ID NOS: 10959- |
| | | 10962 |
| PRTN3 | Proteinase 3 | SEQ ID NOS: 10963- |
| | | 10964 |
| PSAP | Prosaposin | SEQ ID NOS: 10965- |
| | | 10968 |
| PSAPL1 | Prosaposin-like 1 (gene/pseudogene) | SEQ ID NO: 10969 |
| PSG1 | Pregnancy specific beta-1-glycoprotein 1 | SEQ ID NOS: 10970- |
| | | 10977 |
| PSG11 | Pregnancy specific beta-1-glycoprotein 11 | SEQ ID NOS: 10978- |
| | | 10982 |
| PSG2 | Pregnancy specific beta-1-glycoprotein 2 | SEQ ID NOS: 10983- |
| | | 10984 |
| PSG3 | Pregnancy specific beta-1-glycoprotein 3 | SEQ ID NOS: 10985- |
| | | 10988 |
| PSG4 | Pregnancy specific beta-1-glycoprotein 4 | SEQ ID NOS: 10989- |
| | | 11000 |
| PSG5 | Pregnancy specific beta-1-glycoprotein 5 | SEQ ID NOS: 11001- |
| | | 11006 |
| PSG6 | Pregnancy specific beta-1-glycoprotein 6 | SEQ ID NOS: 11007- |
| | | 11012 |
| PSG7 | Pregnancy specific beta-1-glycoprotein 7 | SEQ ID NOS: 11013- |
| | (gene/pseudogene) | 11015 |
| PSG8 | Pregnancy specific beta-1-glycoprotein 8 | SEQ ID NOS: 11016- |
| | | 11020 |
| PSG9 | Pregnancy specific beta-1-glycoprotein 9 | SEQ ID NOS: 11021- |
| | | 11028 |
| PSMD1 | Proteasome 26S subunit, non-ATPase 1 | SEQ ID NOS: 11029- |
| | | 11036 |
| PSORS1C2 | Psoriasis susceptibility 1 candidate 2 | SEQ ID NO: 11037 |
| PSPN | Persephin | SEQ ID NOS: 11038- |
| | | 11039 |
| PTGDS | Prostaglandin D2 synthase 21 kDa (brain) | SEQ ID NOS: 11040- |
| | | 11044 |
| PTGIR | Prostaglandin I2 (prostacyclin) receptor (IP) | SEQ ID NOS: 11045- |
| | | 11049 |
| PTGS1 | Prostaglandin-endoperoxide synthase 1 | SEQ ID NOS: 11050- |
| | (prostaglandin G/H synthase and | 11058 |
| | cyclooxygenase) | |
| PTGS2 | Prostaglandin-endoperoxide synthase 2 | SEQ ID NOS: 11059- |
| | (prostaglandin G/H synthase and | 11060 |
| | cyclooxygenase) | |
| PTH | Parathyroid hormone | SEQ ID NOS: 11061- |
| | | 11062 |
| PTH2 | Parathyroid hormone 2 | SEQ ID NO: 11063 |
| PTHLH | Parathyroid hormone-like hormone | SEQ ID NOS: 11064- |
| | | 11072 |
| PTK7 | Protein tyrosine kinase 7 (inactive) | SEQ ID NOS: 11073- |
| | | 11088 |
| PTN | Pleiotrophin | SEQ ID NOS: 11089- |
| | | 11090 |
| PTPRA | Protein tyrosine phosphatase, receptor type, | SEQ ID NOS: 11091- |
| | A | 11098 |
| PTPRB | Protein tyrosine phosphatase, receptor type, | SEQ ID NOS: 11099- |
| | B | 11106 |
| PTPRC | Protein tyrosine phosphatase, receptor type, | SEQ ID NOS: 11107- |
| | C | 11117 |
| PTPRCAP | Protein tyrosine phosphatase, receptor type, | SEQ ID NO: 11118 |
| | C-associated protein | |
| PTPRD | Protein tyrosine phosphatase, receptor type, | SEQ ID NOS: 11119- |
| | D | 11130 |
| PTPRF | Protein tyrosine phosphatase, receptor type, | SEQ ID NOS: 11131- |
| | F | 11138 |
| PTPRJ | Protein tyrosine phosphatase, receptor type, | SEQ ID NOS: 11139- |
| | J | 11144 |
| PTPRO | Protein tyrosine phosphatase, receptor type, | SEQ ID NOS: 11145- |
| | O | 11153 |
| PTPRS | Protein tyrosine phosphatase, receptor type, | SEQ ID NOS: 11154- |
| | S | 11161 |
| PTTG1IP | Pituitary tumor-transforming 1 interacting | SEQ ID NOS: 11162- |
| | protein | 11165 |
| PTX3 | Pentraxin 3, long | SEQ ID NO: 11166 |
| PTX4 | Pentraxin 4, long | SEQ ID NOS: 11167- |
| | | 11169 |
| PVR | Poliovirus receptor | SEQ ID NOS: 11170- |
| | | 11175 |
| PVRL1 | Poliovirus receptor-related 1 (herpesvirus | SEQ ID NOS: 9286- |
| | entry mediator C) | 9288 |
| PXDN | Peroxidasin | SEQ ID NOS: 11176- |
| | | 11180 |
| PXDNL | Peroxidasin-like | SEQ ID NOS: 11181- |
| | | 11183 |
| PXYLP1 | 2-phosphoxylose phosphatase 1 | SEQ ID NOS: 11184- |
| | | 11196 |
| PYY | Peptide YY | SEQ ID NOS: 11197- |
| | | 11198 |
| PZP | Pregnancy-zone protein | SEQ ID NOS: 11199- |
| | | 11200 |
| QPCT | Glutaminyl-peptide cyclotransferase | SEQ ID NOS: 11201- |
| | | 11203 |
| QPRT | Quinolinate phosphoribosyltransferase | SEQ ID NOS: 11204- |
| | | 11205 |
| QRFP | Pyroglutamylated RFamide peptide | SEQ ID NOS: 11206- |
| | | 11207 |
| QSOX1 | Quiescin Q6 sulfhydryl oxidase 1 | SEQ ID NOS: 11208- |
| | | 11211 |
| R3HDML | R3H domain containing-like | SEQ ID NO: 11212 |
| RAB26 | RAB26, member RAS oncogene family | SEQ ID NOS: 11213- |
| | | 11216 |
| RAB36 | RAB36, member RAS oncogene family | SEQ ID NOS: 11217- |
| | | 11219 |
| RAB9B | RAB9B, member RAS oncogene family | SEQ ID NO: 11220 |
| RAET1E | Retinoic acid early transcript 1E | SEQ ID NOS: 11221- |
| | | 11226 |
| RAET1G | Retinoic acid early transcript 1G | SEQ ID NOS: 11227- |
| | | 11229 |
| RAMP2 | Receptor (G protein-coupled) activity | SEQ ID NOS: 11230- |
| | modifying protein 2 | 11234 |
| RAPGEF5 | Rap guanine nucleotide exchange factor | SEQ ID NOS: 11235- |
| | (GEF) 5 | 11241 |
| RARRES1 | Retinoic acid receptor responder (tazarotene | SEQ ID NOS: 11242- |
| | induced) 1 | 11243 |
| RARRES2 | Retinoic acid receptor responder (tazarotene | SEQ ID NOS: 11244- |
| | induced) 2 | 11247 |
| RASA2 | RAS p21 protein activator 2 | SEQ ID NOS: 11248- |
| | | 11250 |
| RBM3 | RNA binding motif (RNP1, RRM) protein 3 | SEQ ID NOS: 11251- |
| | | 11253 |
| RBP3 | Retinol binding protein 3, interstitial | SEQ ID NO: 11254 |
| RBP4 | Retinol binding protein 4, plasma | SEQ ID NOS: 11255- |
| | | 11258 |
| RCN1 | Reticulocalbin 1, EF-hand calcium binding | SEQ ID NOS: 11259- |
| | domain | 11262 |
| RCN2 | Reticulocalbin 2, EF-hand calcium binding | SEQ ID NOS: 11263- |
| | domain | 11266 |
| RCN3 | Reticulocalbin 3, EF-hand calcium binding | SEQ ID NOS: 11267- |
| | domain | 11270 |
| RCOR1 | REST corepressor 1 | SEQ ID NOS: 11271- |
| | | 11272 |
| RDH11 | Retinol dehydrogenase 11 (all-trans/9- | SEQ ID NOS: 11273- |
| | cis/11-cis) | 11280 |
| RDH12 | Retinol dehydrogenase 12 (all-trans/9- | SEQ ID NOS: 11281- |
| | cis/11-cis) | 11282 |
| RDH13 | Retinol dehydrogenase 13 (all-trans/9-cis) | SEQ ID NOS: 11283- |
| | | 11291 |
| RDH5 | Retinol dehydrogenase 5 (11-cis/9-cis) | SEQ ID NOS: 11292- |
| | | 11296 |
| RDH8 | Retinol dehydrogenase 8 (all-trans) | SEQ ID NOS: 11297- |
| | | 11298 |
| REG1A | Regenerating islet-derived 1 alpha | SEQ ID NO: 11299 |
| REG1B | Regenerating islet-derived 1 beta | SEQ ID NOS: 11300- |
| | | 11301 |
| REG3A | Regenerating islet-derived 3 alpha | SEQ ID NOS: 11302- |
| | | 11304 |
| REG3G | Regenerating islet-derived 3 gamma | SEQ ID NOS: 11305- |
| | | 11307 |
| REG4 | Regenerating islet-derived family, member | SEQ ID NOS: 11308- |
| | 4 | 11311 |
| RELN | Reelin | SEQ ID NOS: 11312- |
| | | 11315 |
| RELT | RELT tumor necrosis factor receptor | SEQ ID NOS: 11316- |
| | | 11319 |
| REN | Renin | SEQ ID NOS: 11320- |
| | | 11321 |
| REPIN1 | Replication initiator 1 | SEQ ID NOS: 11322- |
| | | 11335 |
| REPS2 | RALBP1 associated Eps domain containing | SEQ ID NOS: 11336- |
| | 2 | 11337 |
| RET | Ret proto-oncogene | SEQ ID NOS: 11338- |
| | | 11343 |
| RETN | Resistin | SEQ ID NOS: 11344- |
| | | 11346 |
| RETNLB | Resistin like beta | SEQ ID NO: 11347 |
| RETSAT | Retinol saturase (all-trans-retinol 13,14- | SEQ ID NOS: 11348- |
| | reductase) | 11352 |
| RFNG | RFNG O-fucosylpeptide 3-beta-N- | SEQ ID NOS: 11353- |
| | acetylglucosaminyltransferase | 11355 |
| RGCC | Regulator of cell cycle | SEQ ID NO: 11356 |
| RGL4 | Ral guanine nucleotide dissociation | SEQ ID NOS: 11357- |
| | stimulator-like 4 | 11363 |
| RGMA | Repulsive guidance molecule family | SEQ ID NOS: 11364- |
| | member a | 11373 |
| RGMB | Repulsive guidance molecule family | SEQ ID NOS: 11374- |
| | member b | 11375 |
| RHOQ | Ras homolog family member Q | SEQ ID NOS: 11376- |
| | | 11380 |
| RIC3 | RIC3 acetylcholine receptor chaperone | SEQ ID NOS: 11381- |
| | | 11388 |
| RIMS1 | Regulating synaptic membrane exocytosis 1 | SEQ ID NOS: 11393- |
| | | 11408 |
| RIPPLY1 | Ripply transcriptional repressor 1 | SEQ ID NOS: 11409- |
| | | 11410 |
| RLN1 | Relaxin 1 | SEQ ID NO: 11411 |
| RLN2 | Relaxin 2 | SEQ ID NOS: 11412- |
| | | 11413 |
| RLN3 | Relaxin 3 | SEQ ID NOS: 11414- |
| | | 11415 |
| RMDN1 | Regulator of microtubule dynamics 1 | SEQ ID NOS: 11416- |
| | | 11429 |
| RNASE1 | Ribonuclease, RNase A family, 1 | SEQ ID NOS: 11430- |
| | (pancreatic) | 11434 |
| RNASE10 | Ribonuclease, RNase A family, 10 (non- | SEQ ID NOS: 11435- |
| | active) | 11436 |
| RNASE11 | Ribonuclease, RNase A family, 11 (non- | SEQ ID NOS: 11437- |
| | active) | 11447 |
| RNASE12 | Ribonuclease, RNase A family, 12 (non- | SEQ ID NO: 11448 |
| | active) | |
| RNASE13 | Ribonuclease, RNase A family, 13 (non- | SEQ ID NO: 11449 |
| | active) | |
| RNASE2 | Ribonuclease, RNase A family, 2 (liver, | SEQ ID NO: 11450 |
| | eosinophil-derived neurotoxin) | |
| RNASE3 | Ribonuclease, RNase A family, 3 | SEQ ID NO: 11451 |
| RNASE4 | Ribonuclease, RNase A family, 4 | SEQ ID NOS: 11452- |
| | | 11454 |
| RNASE6 | Ribonuclease, RNase A family, k6 | SEQ ID NO: 11455 |
| RNASE7 | Ribonuclease, RNase A family, 7 | SEQ ID NOS: 11456- |
| | | 11457 |
| RNASE8 | Ribonuclease, RNase A family, 8 | SEQ ID NO: 11458 |
| RNASE9 | Ribonuclease, RNase A family, 9 (non- | SEQ ID NOS: 11459- |
| | active) | 11469 |
| RNASEH1 | Ribonuclease H1 | SEQ ID NOS: 11470- |
| | | 11472 |
| RNASET2 | Ribonuclease T2 | SEQ ID NOS: 11473- |
| | | 11480 |
| RNF146 | Ring finger protein 146 | SEQ ID NOS: 11481- |
| | | 11492 |
| RNF148 | Ring finger protein 148 | SEQ ID NOS: 11493- |
| | | 11494 |
| RNF150 | Ring finger protein 150 | SEQ ID NOS: 11495- |
| | | 11499 |
| RNF167 | Ring finger protein 167 | SEQ ID NOS: 11500- |
| | | 11510 |
| RNF220 | Ring finger protein 220 | SEQ ID NOS: 11511- |
| | | 11517 |
| RNF34 | Ring finger protein 34, E3 ubiquitin protein | SEQ ID NOS: 11518- |
| | ligase | 11525 |
| RNLS | Renalase, FAD-dependent amine oxidase | SEQ ID NOS: 11526- |
| | | 11528 |
| RNPEP | Arginyl aminopeptidase (aminopeptidase B) | SEQ ID NOS: 11529- |
| | | 11534 |
| ROR1 | Receptor tyrosine kinase-like orphan | SEQ ID NOS: 11535- |
| | receptor 1 | 11537 |
| RP11- | | SEQ ID NO: 4158 |
| 1236K1.1 | | |
| RP11-14J7.7 | | SEQ ID NOS: 674-675 |
| RP11- | | SEQ ID NOS: 85-87 |
| 196G11.1 | | |
| RP11- | | SEQ ID NO: 683 |
| 350O14.18 | | |
| RP11- | | SEQ ID NO: 8194 |
| 520P18.5 | | |
| RP11- | | SEQ ID NO: 89 |
| 812E19.9 | | |
| RP11- | | SEQ ID NO: 676 |
| 903H12.5 | | |
| RP11- | | SEQ ID NOS: 78-80 |
| 977G19.10 | | |
| RP4-576H24.4 | | SEQ ID NOS: 670-672 |
| RP4-608O15.3 | Complement factor H-related protein 2 | SEQ ID NO: 1649 |
| RPL3 | Ribosomal protein L3 | SEQ ID NOS: 11538- |
| | | 11543 |
| RPLP2 | Ribosomal protein, large, P2 | SEQ ID NOS: 11544- |
| | | 11546 |
| RPN2 | Ribophorin II | SEQ ID NOS: 11547- |
| | | 11553 |
| RPS27L | Ribosomal protein S27-like | SEQ ID NOS: 11554- |
| | | 11559 |
| RQCD1 | RCD1 required for cell differentiation1 | SEQ ID NOS: 3100- |
| | homolog (S. pombe) | 3106 |
| RS1 | Retinoschisin 1 | SEQ ID NO: 11560 |
| RSF1 | Remodeling and spacing factor 1 | SEQ ID NOS: 11561- |
| | | 11567 |
| RSPO1 | R-spondin 1 | SEQ ID NOS: 11568- |
| | | 11571 |
| RSPO2 | R-spondin 2 | SEQ ID NOS: 11572- |
| | | 11579 |
| RSPO3 | R-spondin 3 | SEQ ID NOS: 11580- |
| | | 11581 |
| RSPO4 | R-spondin 4 | SEQ ID NOS: 11582- |
| | | 11583 |
| RSPRY1 | Ring finger and SPRY domain containing 1 | SEQ ID NOS: 11584- |
| | | 11590 |
| RTBDN | Retbindin | SEQ ID NOS: 11591- |
| | | 11603 |
| RTN4RL1 | Reticulon 4 receptor-like 1 | SEQ ID NO: 11604 |
| RTN4RL2 | Reticulon 4 receptor-like 2 | SEQ ID NOS: 11605- |
| | | 11607 |
| SAA1 | Serum amyloid A1 | SEQ ID NOS: 11608- |
| | | 11610 |
| SAA2 | Serum amyloid A2 | SEQ ID NOS: 11611- |
| | | 11616 |
| SAA4 | Serum amyloid A4, constitutive | SEQ ID NO: 11617 |
| SAP30 | Sin3A-associated protein, 30 kDa | SEQ ID NO: 11618 |
| SAR1A | Secretion associated, Ras related GTPase | SEQ ID NOS: 11619- |
| | 1A | 11625 |
| SARAF | Store-operated calcium entry-associated | SEQ ID NOS: 11626- |
| | regulatory factor | 11636 |
| SARM1 | Sterile alpha and TIR motif containing 1 | SEQ ID NOS: 11637- |
| | | 11640 |
| SATB1 | SATB homeobox 1 | SEQ ID NOS: 11641- |
| | | 11653 |
| SAXO2 | Stabilizer of axonemal microtubules 2 | SEQ ID NOS: 11654- |
| | | 11658 |
| SBSN | Suprabasin | SEQ ID NOS: 11659- |
| | | 11661 |
| SBSPON | Somatomedin B and thrombospondin, type | SEQ ID NO: 11662 |
| | 1 domain containing | |
| SCARF1 | Scavenger receptor class F, member 1 | SEQ ID NOS: 11663- |
| | | 11667 |
| SCG2 | Secretogranin II | SEQ ID NOS: 11668- |
| | | 11670 |
| SCG3 | Secretogranin III | SEQ ID NOS: 11671- |
| | | 11673 |
| SCG5 | Secretogranin V | SEQ ID NOS: 11674- |
| | | 11678 |
| SCGB1A1 | Secretoglobin, family 1A, member 1 | SEQ ID NOS: 11679- |
| | (uteroglobin) | 11680 |
| SCGB1C1 | Secretoglobin, family 1C, member 1 | SEQ ID NO: 11681 |
| SCGB1C2 | Secretoglobin, family 1C, member 2 | SEQ ID NO: 11682 |
| SCGB1D1 | Secretoglobin, family 1D, member 1 | SEQ ID NO: 11683 |
| SCGB1D2 | Secretoglobin, family 1D, member 2 | SEQ ID NO: 11684 |
| SCGB1D4 | Secretoglobin, family 1D, member 4 | SEQ ID NO: 11685 |
| SCGB2A1 | Secretoglobin, family 2A, member 1 | SEQ ID NO: 11686 |
| SCGB2A2 | Secretoglobin, family 2A, member 2 | SEQ ID NOS: 11687- |
| | | 11688 |
| SCGB2B2 | Secretoglobin, family 2B, member 2 | SEQ ID NOS: 11689- |
| | | 11690 |
| SCGB3A1 | Secretoglobin, family 3A, member 1 | SEQ ID NO: 11691 |
| SCGB3A2 | Secretoglobin, family 3A, member 2 | SEQ ID NOS: 11692- |
| | | 11693 |
| SCN1B | Sodium channel, voltage gated, type I beta | SEQ ID NOS: 11694- |
| | subunit | 11699 |
| SCN3B | Sodium channel, voltage gated, type III beta | SEQ ID NOS: 11700- |
| | subunit | 11704 |
| SCPEP1 | Serine carboxypeptidase 1 | SEQ ID NOS: 11705- |
| | | 11712 |
| SCRG1 | Stimulator of chondrogenesis 1 | SEQ ID NOS: 11713- |
| | | 11714 |
| SCT | Secretin | SEQ ID NO: 11715 |
| SCUBE1 | Signal peptide, CUB domain, EGF-like 1 | SEQ ID NOS: 11716- |
| | | 11719 |
| SCUBE2 | Signal peptide, CUB domain, EGF-like 2 | SEQ ID NOS: 11720- |
| | | 11726 |
| SCUBE3 | Signal peptide, CUB domain, EGF-like 3 | SEQ ID NO: 11727 |
| SDC1 | Syndecan 1 | SEQ ID NOS: 11728- |
| | | 11732 |
| SDF2 | Stromal cell-derived factor 2 | SEQ ID NOS: 11733- |
| | | 11735 |
| SDF2L1 | Stromal cell-derived factor 2-like 1 | SEQ ID NO: 11736 |
| SDF4 | Stromal cell derived factor 4 | SEQ ID NOS: 11737- |
| | | 11740 |
| SDHAF2 | Succinate dehydrogenase complex assembly | SEQ ID NOS: 11741- |
| | factor 2 | 11748 |
| SDHAF4 | Succinate dehydrogenase complex assembly | SEQ ID NO: 11749 |
| | factor 4 | |
| SDHB | Succinate dehydrogenase complex, subunit | SEQ ID NOS: 11750- |
| | B, iron sulfur (Ip) | 11752 |
| SDHD | Succinate dehydrogenase complex, subunit | SEQ ID NOS: 11753- |
| | D, integral membrane protein | 11762 |
| SEC14L3 | SEC14-like lipid binding 3 | SEQ ID NOS: 11763- |
| | | 11769 |
| SEC16A | SEC16 homolog A, endoplasmic reticulum | SEQ ID NOS: 11770- |
| | export factor | 11776 |
| SEC16B | SEC16 homolog B, endoplasmic reticulum | SEQ ID NOS: 11777- |
| | export factor | 11780 |
| SEC22C | SEC22 homolog C, vesicle trafficking | SEQ ID NOS: 11781- |
| | protein | 11793 |
| SEC31A | SEC31 homolog A, COPII coat complex | SEQ ID NOS: 11794- |
| | component | 11823 |
| SECISBP2 | SECIS binding protein 2 | SEQ ID NOS: 11824- |
| | | 11828 |
| SECTM1 | Secreted and transmembrane 1 | SEQ ID NOS: 11829- |
| | | 11836 |
| SEL1L | Sel-1 suppressor of lin-12-like (C. elegans) | SEQ ID NOS: 11837- |
| | | 11839 |
| SELM | Selenoprotein M | SEQ ID NOS: 11847- |
| | | 11849 |
| SELO | Selenoprotein O | SEQ ID NOS: 11854- |
| | | 11855 |
| SEMA3A | Sema domain, immunoglobulin domain | SEQ ID NOS: 11862- |
| | (Ig), short basic domain, secreted, | 11866 |
| | (semaphorin) 3A | |
| SEMA3B | Sema domain, immunoglobulin domain | SEQ ID NOS: 11867- |
| | (Ig), short basic domain, secreted, | 11873 |
| | (semaphorin) 3B | |
| SEMA3C | Sema domain, immunoglobulin domain | SEQ ID NOS: 11874- |
| | (Ig), short basic domain, secreted, | 11878 |
| | (semaphorin) 3C | |
| SEMA3E | Sema domain, immunoglobulin domain | SEQ ID NOS: 11879- |
| | (Ig), short basic domain, secreted, | 11883 |
| | (semaphorin) 3E | |
| SEMA3F | Sema domain, immunoglobulin domain | SEQ ID NOS: 11884- |
| | (Ig), short basic domain, secreted, | 11890 |
| | (semaphorin) 3F | |
| SEMA3G | Sema domain, immunoglobulin domain | SEQ ID NOS: 11891- |
| | (Ig), short basic domain, secreted, | 11893 |
| | (semaphorin) 3G | |
| SEMA4A | Sema domain, immunoglobulin domain | SEQ ID NOS: 11894- |
| | (Ig), transmembrane domain (TM) and short | 11902 |
| | cytoplasmic domain, (semaphorin) 4A | |
| SEMA4B | Sema domain, immunoglobulin domain | SEQ ID NOS: 11903- |
| | (Ig), transmembrane domain (TM) and short | 11913 |
| | cytoplasmic domain, (semaphorin) 4B | |
| SEMA4C | Sema domain, immunoglobulin domain | SEQ ID NOS: 11914- |
| | (Ig), transmembrane domain (TM) and short | 11916 |
| | cytoplasmic domain, (semaphorin) 4C | |
| SEMA4D | Sema domain, immunoglobulin domain | SEQ ID NOS: 11917- |
| | (Ig), transmembrane domain (TM) and short | 11930 |
| | cytoplasmic domain, (semaphorin) 4D | |
| SEMA4F | Sema domain, immunoglobulin domain | SEQ ID NOS: 11931- |
| | (Ig), transmembrane domain (TM) and short | 11939 |
| | cytoplasmic domain, (semaphorin) 4F | |
| SEMA4G | Sema domain, immunoglobulin domain | SEQ ID NOS: 11940- |
| | (Ig), transmembrane domain (TM) and short | 11947 |
| | cytoplasmic domain, (semaphorin) 4G | |
| SEMA5A | Sema domain, seven thrombospondin | SEQ ID NOS: 11948- |
| | repeats (type 1 and type 1-like), | 11949 |
| | transmembrane domain (TM) and short | |
| | cytoplasmic domain, (semaphorin) 5A | |
| SEMA6A | Sema domain, transmembrane domain | SEQ ID NOS: 11950- |
| | (TM), and cytoplasmic domain, | 11957 |
| | (semaphorin) 6A | |
| SEMA6C | Sema domain, transmembrane domain | SEQ ID NOS: 11958- |
| | (TM), and cytoplasmic domain, | 11963 |
| | (semaphorin) 6C | |
| SEMA6D | Sema domain, transmembrane domain | SEQ ID NOS: 11964- |
| | (TM), and cytoplasmic domain, | 11977 |
| | (semaphorin) 6D | |
| SEMG1 | Semenogelin I | SEQ ID NO: 11978 |
| SEMG2 | Semenogelin II | SEQ ID NO: 11979 |
| SEPN1 | Selenoprotein N, 1 | SEQ ID NOS: 11850- |
| | | 11853 |
| SEPP1 | Selenoprotein P, plasma, 1 | SEQ ID NOS: 11856- |
| | | 11861 |
| SEPT15 | 15 kDa selenoprotein | SEQ ID NOS: 11840- |
| | | 11846 |
| SEPT9 | Septin 9 | SEQ ID NOS: 11980- |
| | | 12016 |
| SERPINA1 | Serpin peptidase inhibitor, clade A (alpha-1 | SEQ ID NOS: 12017- |
| | antiproteinase, antitrypsin), member 1 | 12033 |
| SERPINA10 | Serpin peptidase inhibitor, clade A (alpha-1 | SEQ ID NOS: 12034- |
| | antiproteinase, antitrypsin), member 10 | 12037 |
| SERPINA11 | Serpin peptidase inhibitor, clade A (alpha-1 | SEQ ID NO: 12038 |
| | antiproteinase, antitrypsin), member 11 | |
| SERPINA12 | Serpin peptidase inhibitor, clade A (alpha-1 | SEQ ID NOS: 12039- |
| | antiproteinase, antitrypsin), member 12 | 12040 |
| SERPINA3 | Serpin peptidase inhibitor, clade A (alpha-1 | SEQ ID NOS: 673- |
| | antiproteinase, antitrypsin), member 3 | 12047 |
| SERPINA4 | Serpin peptidase inhibitor, clade A (alpha-1 | SEQ ID NOS: 12048- |
| | antiproteinase, antitrypsin), member 4 | 12050 |
| SERPINA5 | Serpin peptidase inhibitor, clade A (alpha-1 | SEQ ID NOS: 12051- |
| | antiproteinase, antitrypsin), member 5 | 12062 |
| SERPINA6 | Serpin peptidase inhibitor, clade A (alpha-1 | SEQ ID NOS: 12063- |
| | antiproteinase, antitrypsin), member 6 | 12065 |
| SERPINA7 | Serpin peptidase inhibitor, clade A (alpha-1 | SEQ ID NOS: 12066- |
| | antiproteinase, antitrypsin), member 7 | 12067 |
| SERPINA9 | Serpin peptidase inhibitor, clade A (alpha-1 | SEQ ID NOS: 12068- |
| | antiproteinase, antitrypsin), member 9 | 12074 |
| SERPINB2 | Serpin peptidase inhibitor, clade B | SEQ ID NOS: 12075- |
| | (ovalbumin), member 2 | 12079 |
| SERPINC1 | Serpin peptidase inhibitor, clade C | SEQ ID NOS: 12080- |
| | (antithrombin), member 1 | 12081 |
| SERPIND1 | Serpin peptidase inhibitor, clade D (heparin | SEQ ID NOS: 12082- |
| | cofactor), member 1 | 12083 |
| SERPINE1 | Serpin peptidase inhibitor, clade E (nexin. | SEQ ID NO: 12084 |
| | plasminogen activator inhibitor type 1), | |
| | member 1 | |
| SERPINE2 | Serpin peptidase inhibitor, clade E (nexin, | SEQ ID NOS: 12085- |
| | plasminogen activator inhibitor type 1), | 12091 |
| | member 2 | |
| SERPINE3 | Serpin peptidase inhibitor, clade E (nexin, | SEQ ID NOS: 12092- |
| | plasminogen activator inhibitor type 1), | 12095 |
| | member 3 | |
| SERPINF1 | Serpin peptidase inhibitor, clade F (alpha-2 | SEQ ID NOS: 12096- |
| | antiplasmin, pigment epithelium derived | 12104 |
| | factor), member 1 | |
| SERPINF2 | Serpin peptidase inhibitor, clade F (alpha-2 | SEQ ID NOS: 12105- |
| | antiplasmin, pigment epithelium derived | 12109 |
| | factor), member 2 | |
| SERPING1 | Serpin peptidase inhibitor, clade G (C1 | SEQ ID NOS: 12110- |
| | inhibitor), member 1 | 12120 |
| SERPINH1 | Serpin peptidase inhibitor, clade H (heat | SEQ ID NOS: 12121- |
| | shock protein 47), member 1, (collagen | 12135 |
| | binding protein 1) | |
| SERPINI1 | Serpin peptidase inhibitor, clade I | SEQ ID NOS: 12136- |
| | (neuroserpin), member 1 | 12140 |
| SERPINI2 | Serpin peptidase inhibitor, clade I (pancpin), | SEQ ID NOS: 12141- |
| | member 2 | 12147 |
| SETD8 | SET domain containing (lysine | SEQ ID NOS: 7589- |
| | methyltransferase) 8 | 7592 |
| SEZ6L2 | Seizure related 6 homolog (mouse)-like 2 | SEQ ID NOS: 12148- |
| | | 12154 |
| SFRP1 | Secreted frizzled-related protein 1 | SEQ ID NOS: 12155- |
| | | 12156 |
| SFRP2 | Secreted frizzled-related protein 2 | SEQ ID NO: 12157 |
| SFRP4 | Secreted frizzled-related protein 4 | SEQ ID NOS: 12158- |
| | | 12159 |
| SFRP5 | Secreted frizzled-related protein 5 | SEQ ID NO: 12160 |
| SFTA2 | Surfactant associated 2 | SEQ ID NOS: 12161- |
| | | 12162 |
| SFTPA1 | Surfactant protein A1 | SEQ ID NOS: 12163- |
| | | 12167 |
| SFTPA2 | Surfactant protein A2 | SEQ ID NOS: 12168- |
| | | 12172 |
| SFTPB | Surfactant protein B | SEQ ID NOS: 12173- |
| | | 12177 |
| SFTPD | Surfactant protein D | SEQ ID NOS: 12178- |
| | | 12179 |
| SFXN5 | Sideroflexin 5 | SEQ ID NOS: 12180- |
| | | 12184 |
| SGCA | Sarcoglycan, alpha (50 kDa dystrophin- | SEQ ID NOS: 12185- |
| | associated glycoprotein) | 12192 |
| SGSH | N-sulfoglucosamine sulfohydrolase | SEQ ID NOS: 12193- |
| | | 12201 |
| SH3RF3 | SH3 domain containing ring finger 3 | SEQ ID NO: 12202 |
| SHBG | Sex hormone-binding globulin | SEQ ID NOS: 12203- |
| | | 12221 |
| SHE | Src homology 2 domain containing E | SEQ ID NOS: 12222- |
| | | 12224 |
| SHH | Sonic hedgehog | SEQ ID NOS: 12225- |
| | | 12228 |
| SHKBP1 | SH3KBP1 binding protein 1 | SEQ ID NOS: 12229- |
| | | 12244 |
| SIAE | Sialic acid acetylesterase | SEQ ID NOS: 12245- |
| | | 12247 |
| SIDT2 | SID1 transmembrane family, member 2 | SEQ ID NOS: 12248- |
| | | 12257 |
| SIGLEC10 | Sialic acid binding Ig-like lectin 10 | SEQ ID NOS: 12258- |
| | | 12266 |
| SIGLEC6 | Sialic acid binding Ig-like lectin 6 | SEQ ID NOS: 12267- |
| | | 12272 |
| SIGLEC7 | Sialic acid binding Ig-like lectin 7 | SEQ ID NOS: 12273- |
| | | 12277 |
| SIGLECL1 | SIGLEC family like 1 | SEQ ID NOS: 12278- |
| | | 12283 |
| SIGMAR1 | Sigma non-opioid intracellular receptor 1 | SEQ ID NOS: 12284- |
| | | 12287 |
| SIL1 | SIL1 nucleotide exchange factor | SEQ ID NOS: 12288- |
| | | 12296 |
| SIRPB1 | Signal-regulatory protein beta 1 | SEQ ID NOS: 12297- |
| | | 12309 |
| SIRPD | Signal-regulatory protein delta | SEQ ID NOS: 12310- |
| | | 12312 |
| SLAMF1 | Signaling lymphocytic activation molecule | SEQ ID NOS: 12313- |
| | family member 1 | 12315 |
| SLAMF7 | SLAM family member 7 | SEQ ID NOS: 12316- |
| | | 12324 |
| SLC10A3 | Solute carrier family 10, member 3 | SEQ ID NOS: 12325- |
| | | 12329 |
| SLC15A3 | Solute carrier family 15 (oligopeptide | SEQ ID NOS: 12330- |
| | transporter), member 3 | 12335 |
| SLC25A14 | Solute carrier family 25 (mitochondrial | SEQ ID NOS: 12336- |
| | carrier, brain), member 14 | 12342 |
| SLC25A25 | Solute carrier family 25 (mitochondrial | SEQ ID NOS: 12343- |
| | carrier; phosphate carrier), member 25 | 12349 |
| SLC2A5 | Solute carrier family 2 (facilitated | SEQ ID NOS: 12350- |
| | glucose/fructose transporter), member 5 | 12358 |
| SLC35E3 | Solute carrier family 35, member E3 | SEQ ID NOS: 12359- |
| | | 12360 |
| SLC39A10 | Solute carrier family 39 (zinc transporter), | SEQ ID NOS: 12361- |
| | member 10 | 12367 |
| SLC39A14 | Solute carrier family 39 (zinc transporter), | SEQ ID NOS: 12368- |
| | member 14 | 12378 |
| SLC39A4 | Solute carrier family 39 (zinc transporter), | SEQ ID NOS: 12379- |
| | member 4 | 12381 |
| SLC39A5 | Solute carrier family 39 (zinc transporter), | SEQ ID NOS: 12382- |
| | member 5 | 12388 |
| SLC3A1 | Solute carrier family 3 (amino acid | SEQ ID NOS: 12389- |
| | transporter heavy chain), member 1 | 12398 |
| SLC51A | Solute carrier family 51, alpha subunit | SEQ ID NOS: 12399- |
| | | 12403 |
| SLC52A2 | Solute carrier family 52 (riboflavin | SEQ ID NOS: 12404- |
| | transporter), member 2 | 12414 |
| SLC5A6 | Solute carrier family 5 | SEQ ID NOS: 12415- |
| | (sodium/multivitamin and iodide | 12425 |
| | cotransporter), member 6 | |
| SLC6A9 | Solute carrier family 6 (neurotransmitter | SEQ ID NOS: 12426- |
| | transporter, glycine), member 9 | 12433 |
| SLC8A1 | Solute carrier family 8 (sodium/calcium | SEQ ID NOS: 12434- |
| | exchanger), member 1 | 12445 |
| SLC8B1 | Solute carrier family 8 | SEQ ID NOS: 12446- |
| | (sodium/lithium/calcium exchanger), | 12456 |
| | member B1 | |
| SLC9A6 | Solute carrier family 9, subfamily A | SEQ ID NOS: 12457- |
| | (NHE6, cation proton antiporter 6), member | 12468 |
| | 6 | |
| SLCO1A2 | Solute carrier organic anion transporter | SEQ ID NOS: 12469- |
| | family, member 1A2 | 12481 |
| SLIT1 | Slit guidance ligand 1 | SEQ ID NOS: 12482- |
| | | 12485 |
| SLIT2 | Slit guidance ligand 2 | SEQ ID NOS: 12486- |
| | | 12494 |
| SLIT3 | Slit guidance ligand 3 | SEQ ID NOS: 12495- |
| | | 12497 |
| SLITRK3 | SLIT and NTRK-like family, member 3 | SEQ ID NOS: 12498- |
| | | 12500 |
| SLPI | Secretory leukocyte peptidase inhibitor | SEQ ID NO: 12501 |
| SLTM | SAFB-like, transcription modulator | SEQ ID NOS: 12502- |
| | | 12515 |
| SLURP1 | Secreted LY6/PLAUR domain containing 1 | SEQ ID NO: 12516 |
| SMARCA2 | SWI/SNF related, matrix associated, actin | SEQ ID NOS: 12517- |
| | dependent regulator of chromatin, subfamily | 12562 |
| | a, member 2 | |
| SMG6 | SMG6 nonsense mediated mRNA decay | SEQ ID NOS: 12563- |
| | factor | 12574 |
| SMIM7 | Small integral membrane protein 7 | SEQ ID NOS: 12575- |
| | | 12591 |
| SMOC1 | SPARC related modular calcium binding 1 | SEQ ID NOS: 12592- |
| | | 12593 |
| SMOC2 | SPARC related modular calcium binding 2 | SEQ ID NOS: 12594- |
| | | 12598 |
| SMPDL3A | Sphingomyelin phosphodiesterase, acid-like | SEQ ID NOS: 12599- |
| | 3A | 12600 |
| SMPDL3B | Sphingomyelin phosphodiesterase, acid-like | SEQ ID NOS: 12601- |
| | 3B | 12605 |
| SMR3A | Submaxillary gland androgen regulated | SEQ ID NO: 12606 |
| | protein 3A | |
| SMR3B | Submaxillary gland androgen regulated | SEQ ID NOS: 12607- |
| | protein 3B | 12609 |
| SNED1 | Sushi, nidogen and EGF-like domains 1 | SEQ ID NOS: 12610- |
| | | 12616 |
| SNTB1 | Syntrophin, beta 1 (dystrophin-associated | SEQ ID NOS: 12617- |
| | protein A1, 59 kDa, basic component 1) | 12619 |
| SNTB2 | Syntrophin, beta 2 (dystrophin-associated | SEQ ID NOS: 12620- |
| | protein A1, 59 kDa, basic component 2) | 12624 |
| SNX14 | Sorting nexin 14 | SEQ ID NOS: 12625- |
| | | 12636 |
| SOD3 | Superoxide dismutase 3, extracellular | SEQ ID NOS: 12637- |
| | | 12638 |
| SOST | Sclerostin | SEQ ID NO: 12639 |
| SOSTDC1 | Sclerostin domain containing 1 | SEQ ID NOS: 12640- |
| | | 12641 |
| SOWAHA | Sosondowah ankyrin repeat domain family | SEQ ID NO: 12642 |
| | member A | |
| SPACA3 | Sperm acrosome associated 3 | SEQ ID NOS: 12643- |
| | | 12645 |
| SPACA4 | Sperm acrosome associated 4 | SEQ ID NO: 12646 |
| SPACA5 | Sperm acrosome associated 5 | SEQ ID NOS: 12647- |
| | | 12648 |
| SPACA5B | Sperm acrosome associated 5B | SEQ ID NO: 12649 |
| SPACA7 | Sperm acrosome associated 7 | SEQ ID NOS: 12650- |
| | | 12653 |
| SPAG11A | Sperm associated antigen 11A | SEQ ID NOS: 12654- |
| | | 12662 |
| SPAG11B | Sperm associated antigen 11B | SEQ ID NOS: 12663- |
| | | 12671 |
| SPARC | Secreted protein, acidic, cysteine-rich | SEQ ID NOS: 12672- |
| | (osteonectin) | 12676 |
| SPARCL1 | SPARC-like 1 (hevin) | SEQ ID NOS: 12677- |
| | | 12686 |
| SPATA20 | Spermatogenesis associated 20 | SEQ ID NOS: 12687- |
| | | 12700 |
| SPESP1 | Sperm equatorial segment protein 1 | SEQ ID NO: 12701 |
| SPINK1 | Serine peptidase inhibitor, Kazal type 1 | SEQ ID NOS: 12702- |
| | | 12703 |
| SPINK13 | Serine peptidase inhibitor, Kazal type 13 | SEQ ID NOS: 12704- |
| | (putative) | 12706 |
| SPINK14 | Serine peptidase inhibitor, Kazal type 14 | SEQ ID NOS: 12707- |
| | (putative) | 12708 |
| SPINK2 | Serine peptidase inhibitor, Kazal type 2 | SEQ ID NOS: 12709- |
| | (acrosin-trypsin inhibitor) | 12714 |
| SPINK4 | Serine peptidase inhibitor, Kazal type 4 | SEQ ID NOS: 12715- |
| | | 12716 |
| SPINK5 | Serine peptidase inhibitor, Kazal type 5 | SEQ ID NOS: 12717- |
| | | 12722 |
| SPINK6 | Serine peptidase inhibitor, Kazal type 6 | SEQ ID NOS: 12723- |
| | | 12725 |
| SPINK7 | Serine peptidase inhibitor, Kazal type 7 | SEQ ID NOS: 12726- |
| | (putative) | 12727 |
| SPINK8 | Serine peptidase inhibitor, Kazal type 8 | SEQ ID NO: 12728 |
| | (putative) | |
| SPINK9 | Serine peptidase inhibitor, Kazal type 9 | SEQ ID NOS: 12729- |
| | | 12730 |
| SPINT1 | Serine peptidase inhibitor, Kunitz type 1 | SEQ ID NOS: 12731- |
| | | 12738 |
| SPINT2 | Serine peptidase inhibitor, Kunitz type, 2 | SEQ ID NOS: 12739- |
| | | 12746 |
| SPINT3 | Serine peptidase inhibitor, Kunitz type, 3 | SEQ ID NO: 12747 |
| SPINT4 | Serine peptidase inhibitor, Kunitz type 4 | SEQ ID NO: 12748 |
| SPOCK1 | Sparc/osteonectin, cwcv and kazal-like | SEQ ID NOS: 12749- |
| | domains proteoglycan (testican) 1 | 12752 |
| SPOCK2 | Sparc/osteonectin, cwcv and kazal-like | SEQ ID NOS: 12753- |
| | domains proteoglycan (testican) 2 | 12756 |
| SPOCK3 | Sparc/osteonectin, cwcv and kazal-like | SEQ ID NOS: 12757- |
| | domains proteoglycan (testican) 3 | 12782 |
| SPON1 | Spondin 1, extracellular matrix protein | SEQ ID NO: 12783 |
| SPON2 | Spondin 2, extracellular matrix protein | SEQ ID NOS: 12784- |
| | | 12793 |
| SPP1 | Secreted phosphoprotein 1 | SEQ ID NOS: 12794- |
| | | 12798 |
| SPP2 | Secreted phosphoprotein 2, 24 kDa | SEQ ID NOS: 12799- |
| | | 12801 |
| SPRN | Shadow of prion protein homolog | SEQ ID NO: 12802 |
| | (zebrafish) | |
| SPRYD3 | SPRY domain containing 3 | SEQ ID NOS: 12803- |
| | | 12806 |
| SPRYD4 | SPRY domain containing 4 | SEQ ID NO: 12807 |
| SPTY2D1-AS1 | SPTY2D1 antisense RNA 1 | SEQ ID NOS: 12808- |
| | | 12813 |
| SPX | Spexin hormone | SEQ ID NOS: 12814- |
| | | 12815 |
| SRGN | Serglycin | SEQ ID NO: 12816 |
| SRL | Sarcalumenin | SEQ ID NOS: 12817- |
| | | 12819 |
| SRP14 | Signal recognition particle 14 kDa | SEQ ID NOS: 12820- |
| | (homologous Alu RNA binding protein) | 12823 |
| SRPX | Sushi-repeat containing protein, X-linked | SEQ ID NOS: 12824- |
| | | 12827 |
| SRPX2 | Sushi-repeat containing protein, X-linked 2 | SEQ ID NOS: 12828- |
| | | 12831 |
| SSC4D | Scavenger receptor cysteine rich family, 4 | SEQ ID NO: 12832 |
| | domains | |
| SSC5D | Scavenger receptor cysteine rich family, 5 | SEQ ID NOS: 12833- |
| | domains | 12836 |
| SSPO | SCO-spondin | SEQ ID NO: 12837 |
| SSR2 | Signal sequence receptor, beta (translocon- | SEQ ID NOS: 12838- |
| | associated protein beta) | 12847 |
| SST | Somatostatin | SEQ ID NO: 12848 |
| ST3GAL1 | ST3 beta-galactoside alpha-2,3- | SEQ ID NOS: 12849- |
| | sialyltransferase 1 | 12856 |
| ST3GAL4 | ST3 beta-galactoside alpha-2,3- | SEQ ID NOS: 12857- |
| | sialyltransferase 4 | 12872 |
| ST6GAL1 | ST6 beta-galactosamide alpha-2,6- | SEQ ID NOS: 12873- |
| | sialyltranferase 1 | 12888 |
| ST6GALNAC2 | ST6 (alpha-N-acetyl-neuraminyl-2,3-beta- | SEQ ID NOS: 12889- |
| | galactosyl-1,3)-N-acetylgalactosaminide | 12893 |
| | alpha-2,6-sialyltransferase 2 | |
| ST6GALNAC5 | ST6 (alpha-N-acetyl-neuraminyl-2,3-beta- | SEQ ID NOS: 12894- |
| | galactosyl-1,3)-N-acetylgalactosaminide | 12895 |
| | alpha-2,6-sialyltransferase 5 | |
| ST6GALNAC6 | ST6 (alpha-N-acetyl-neuraminyl-2,3-beta- | SEQ ID NOS: 12896- |
| | galactosyl-1,3)-N-acetylgalactosaminide | 12903 |
| | alpha-2,6-sialyltransferase 6 | |
| ST8SIA2 | ST8 alpha-N-acetyl-neuraminide alpha-2,8- | SEQ ID NOS: 12904- |
| | sialyltransferase 2 | 12906 |
| ST8SIA4 | ST8 alpha-N-acetyl-neuraminide alpha-2,8- | SEQ ID NOS: 12907- |
| | sialyltransferase 4 | 12909 |
| ST8SIA6 | ST8 alpha-N-acetyl-neuraminide alpha-2,8- | SEQ ID NOS: 12910- |
| | sialyltransferase 6 | 12911 |
| STARD7 | StAR-related lipid transfer (START) | SEQ ID NOS: 12912- |
| | domain containing 7 | 12913 |
| STATH | Statherin | SEQ ID NOS: 12914- |
| | | 12916 |
| STC1 | Stanniocalcin 1 | SEQ ID NOS: 12917- |
| | | 12918 |
| STC2 | Stanniocalcin 2 | SEQ ID NOS: 12919- |
| | | 12921 |
| STMND1 | Stathmin domain containing 1 | SEQ ID NOS: 12922- |
| | | 12923 |
| STOML2 | Stomatin (EPB72)-like 2 | SEQ ID NOS: 12926- |
| | | 12929 |
| STOX1 | Storkhead box 1 | SEQ ID NOS: 12930- |
| | | 12934 |
| STRC | Stereocilin | SEQ ID NOS: 12935- |
| | | 12940 |
| SUCLG1 | Succinate-CoA ligase, alpha subunit | SEQ ID NOS: 12941- |
| | | 12942 |
| SUDS3 | SDS3 homolog, SIN3A corepressor | SEQ ID NO: 12943 |
| | complex component | |
| SULF1 | Sulfatase 1 | SEQ ID NOS: 12944- |
| | | 12954 |
| SULF2 | Sulfatase 2 | SEQ ID NOS: 12955- |
| | | 12959 |
| SUMF1 | Sulfatase modifying factor 1 | SEQ ID NOS: 12960- |
| | | 12964 |
| SUMF2 | Sulfatase modifying factor 2 | SEQ ID NOS: 12965- |
| | | 12978 |
| SUSD1 | Sushi domain containing 1 | SEQ ID NOS: 12979- |
| | | 12984 |
| SUSD5 | Sushi domain containing 5 | SEQ ID NOS: 12985- |
| | | 12986 |
| SVEP1 | Sushi, von Willebrand factor type A, EGF | SEQ ID NOS: 12987- |
| | and pentraxin domain containing 1 | 12989 |
| SWSAP1 | SWIM-type zinc finger 7 associated protein | SEQ ID NO: 12990 |
| | 1 | |
| SYAP1 | Synapse associated protein 1 | SEQ ID NO: 12991 |
| SYCN | Syncollin | SEQ ID NO: 12992 |
| TAC1 | Tachykinin, precursor 1 | SEQ ID NOS: 12993- |
| | | 12995 |
| TAC3 | Tachykinin 3 | SEQ ID NOS: 12996- |
| | | 13005 |
| TAC4 | Tachykinin 4 (hemokinin) | SEQ ID NOS: 13006- |
| | | 13011 |
| TAGLN2 | Transgelin 2 | SEQ ID NOS: 13012- |
| | | 13015 |
| TAPBP | TAP binding protein (tapasin) | SEQ ID NOS: 13016- |
| | | 13021 |
| TAPBPL | TAP binding protein-like | SEQ ID NOS: 13022- |
| | | 13023 |
| TBL2 | Transducin (beta)-like 2 | SEQ ID NOS: 13024- |
| | | 13036 |
| TBX10 | T-box 10 | SEQ ID NO: 13037 |
| TCF12 | Transcription factor 12 | SEQ ID NOS: 13038- |
| | | 13051 |
| TCN1 | Transcobalamin I (vitamin B12 binding | SEQ ID NO: 13052 |
| | protein, R binder family) | |
| TCN2 | Transcobalamin II | SEQ ID NOS: 13053- |
| | | 13056 |
| TCTN1 | Tectonic family member 1 | SEQ ID NOS: 13057- |
| | | 13075 |
| TCTN3 | Tectonic family member 3 | SEQ ID NOS: 13076- |
| | | 13080 |
| TDP2 | Tyrosyl-DNA phosphodiesterase 2 | SEQ ID NOS: 13081- |
| | | 13082 |
| TEK | TEK tyrosine kinase, endothelial | SEQ ID NOS: 13097- |
| | | 13101 |
| TEPP | Testis, prostate and placenta expressed | SEQ ID NOS: 13102- |
| | | 13103 |
| TEX101 | Testis expressed 101 | SEQ ID NOS: 13104- |
| | | 13105 |
| TEX264 | Testis expressed 264 | SEQ ID NOS: 13106- |
| | | 13117 |
| TF | Transferrin | SEQ ID NOS: 13121- |
| | | 13127 |
| TFAM | Transcription factor A, mitochondrial | SEQ ID NOS: 13128- |
| | | 13130 |
| TFF1 | Trefoil factor 1 | SEQ ID NO: 13131 |
| TFF2 | Trefoil factor 2 | SEQ ID NO: 13132 |
| TFF3 | Trefoil factor 3 (intestinal) | SEQ ID NOS: 13133- |
| | | 13135 |
| TFPI | Tissue factor pathway inhibitor (lipoprotein- | SEQ ID NOS: 13136- |
| | associated coagulation inhibitor) | 13145 |
| TFPI2 | Tissue factor pathway inhibitor 2 | SEQ ID NOS: 13146- |
| | | 13147 |
| TG | Thyroglobulin | SEQ ID NOS: 13148- |
| | | 13157 |
| TGFB1 | Transforming growth factor, beta 1 | SEQ ID NOS: 13158- |
| | | 13159 |
| TGFB2 | Transforming growth factor, beta 2 | SEQ ID NOS: 13160- |
| | | 13161 |
| TGFB3 | Transforming growth factor, beta 3 | SEQ ID NOS: 13162- |
| | | 13163 |
| TGFBI | Transforming growth factor, beta-induced, | SEQ ID NOS: 13164- |
| | 68 kDa | 13171 |
| TGFBR1 | Transforming growth factor, beta receptor 1 | SEQ ID NOS: 13172- |
| | | 13181 |
| TGFBR3 | Transforming growth factor, beta receptor | SEQ ID NOS: 13182- |
| | III | 13188 |
| THBS1 | Thrombospondin 1 | SEQ ID NOS: 13189- |
| | | 13190 |
| THBS2 | Thrombospondin 2 | SEQ ID NOS: 13191- |
| | | 13193 |
| THBS3 | Thrombospondin 3 | SEQ ID NOS: 13194- |
| | | 13198 |
| THBS4 | Thrombospondin 4 | SEQ ID NOS: 13199- |
| | | 13200 |
| THOC3 | THO complex 3 | SEQ ID NOS: 13201- |
| | | 13210 |
| THPO | Thrombopoietin | SEQ ID NOS: 13211- |
| | | 13216 |
| THSD4 | Thrombospondin, type I, domain containing | SEQ ID NOS: 13217- |
| | 4 | 13220 |
| THY1 | Thy-1 cell surface antigen | SEQ ID NOS: 13221- |
| | | 13226 |
| TIE1 | Tyrosine kinase with immunoglobulin-like | SEQ ID NOS: 13227- |
| | and EGF-like domains 1 | 13228 |
| TIMMDC1 | Translocase of inner mitochondrial | SEQ ID NOS: 13229- |
| | membrane domain containing 1 | 13236 |
| TIMP1 | TIMP metallopeptidase inhibitor 1 | SEQ ID NOS: 13237- |
| | | 13241 |
| TIMP2 | TIMP metallopeptidase inhibitor 2 | SEQ ID NOS: 13242- |
| | | 13246 |
| TIMP3 | TIMP metallopeptidase inhibitor 3 | SEQ ID NO: 13247 |
| TIMP4 | TIMP metallopeptidase inhibitor 4 | SEQ ID NO: 13248 |
| TINAGL1 | Tubulointerstitial nephritis antigen-like 1 | SEQ ID NOS: 13249- |
| | | 13251 |
| TINF2 | TERF1 (TRF1)-interacting nuclear factor 2 | SEQ ID NOS: 13252- |
| | | 13261 |
| TLL2 | Tolloid-like 2 | SEQ ID NO: 13262 |
| TLR1 | Toll-like receptor 1 | SEQ ID NOS: 13263- |
| | | 13268 |
| TLR3 | Toll-like receptor 3 | SEQ ID NOS: 13269- |
| | | 13271 |
| TM2D2 | TM2 domain containing 2 | SEQ ID NOS: 13272- |
| | | 13277 |
| TM2D3 | TM2 domain containing 3 | SEQ ID NOS: 13278- |
| | | 13285 |
| TM7SF3 | Transmembrane 7 superfamily member 3 | SEQ ID NOS: 13286- |
| | | 13300 |
| TM9SF1 | Transmembrane 9 superfamily member 1 | SEQ ID NOS: 13301- |
| | | 13311 |
| TMCO6 | Transmembrane and coiled-coil domains 6 | SEQ ID NOS: 13312- |
| | | 13319 |
| TMED1 | Transmembrane p24 trafficking protein 1 | SEQ ID NOS: 13320- |
| | | 13326 |
| TMED2 | Transmembrane p24 trafficking protein 2 | SEQ ID NOS: 13327- |
| | | 13329 |
| TMED3 | Transmembrane p24 trafficking protein 3 | SEQ ID NOS: 13330- |
| | | 13333 |
| TMED4 | Transmembrane p24 trafficking protein 4 | SEQ ID NOS: 13334- |
| | | 13336 |
| TMED5 | Transmembrane p24 trafficking protein 5 | SEQ ID NOS: 13337- |
| | | 13340 |
| TMED7 | Transmembrane p24 trafficking protein 7 | SEQ ID NOS: 13341- |
| | | 13342 |
| TMED7- | TMED7-TICAM2 readthrough | SEQ ID NOS: 13343- |
| TICAM2 | | 13344 |
| TMEM108 | Transmembrane protein 108 | SEQ ID NOS: 13345- |
| | | 13353 |
| TMEM116 | Transmembrane protein 116 | SEQ ID NOS: 13354- |
| | | 13365 |
| TMEM119 | Transmembrane protein 119 | SEQ ID NOS: 13366- |
| | | 13369 |
| TMEM155 | Transmembrane protein 155 | SEQ ID NOS: 13370- |
| | | 13373 |
| TMEM168 | Transmembrane protein 168 | SEQ ID NOS: 13374- |
| | | 13379 |
| TMEM178A | Transmembrane protein 178A | SEQ ID NOS: 13380- |
| | | 13381 |
| TMEM179 | Transmembrane protein 179 | SEQ ID NOS: 13382- |
| | | 13387 |
| TMEM196 | Transmembrane protein 196 | SEQ ID NOS: 13388- |
| | | 13392 |
| TMEM199 | Transmembrane protein 199 | SEQ ID NOS: 13393- |
| | | 13396 |
| TMEM205 | Transmembrane protein 205 | SEQ ID NOS: 13397- |
| | | 13410 |
| TMEM213 | Transmembrane protein 213 | SEQ ID NOS: 13411- |
| | | 13414 |
| TMEM25 | Transmembrane protein 25 | SEQ ID NOS: 13415- |
| | | 13431 |
| TMEM30C | Transmembrane protein 30C | SEQ ID NO: 13432 |
| TMEM38B | Transmembrane protein 38B | SEQ ID NOS: 13433- |
| | | 13437 |
| TMEM44 | Transmembrane protein 44 | SEQ ID NOS: 13438- |
| | | 13447 |
| TMEM52 | Transmembrane protein 52 | SEQ ID NOS: 13448- |
| | | 13452 |
| TMEM52B | Transmembrane protein 52B | SEQ ID NOS: 13453- |
| | | 13455 |
| TMEM59 | Transmembrane protein 59 | SEQ ID NOS: 13456- |
| | | 13463 |
| TMEM67 | Transmembrane protein 67 | SEQ ID NOS: 13464- |
| | | 13475 |
| TMEM70 | Transmembrane protein 70 | SEQ ID NOS: 13476- |
| | | 13478 |
| TMEM87A | Transmembrane protein 87A | SEQ ID NOS: 13479- |
| | | 13488 |
| TMEM94 | Transmembrane protein 94 | SEQ ID NOS: 13489- |
| | | 13504 |
| TMEM95 | Transmembrane protein 95 | SEQ ID NOS: 13505- |
| | | 13507 |
| TMIGD1 | Transmembrane and immunoglobulin | SEQ ID NOS: 13508- |
| | domain containing 1 | 13509 |
| TMPRSS12 | Transmembrane (C-terminal) protease, | SEQ ID NOS: 13510- |
| | serine 12 | 13511 |
| TMPRSS5 | Transmembrane protease, serine 5 | SEQ ID NOS: 13512- |
| | | 13523 |
| TMUB1 | Transmembrane and ubiquitin-like domain | SEQ ID NOS: 13524- |
| | containing 1 | 13530 |
| TMX2 | Thioredoxin-related transmembrane protein | SEQ ID NOS: 13531- |
| | 2 | 13538 |
| TMX3 | Thioredoxin-related transmembrane protein | SEQ ID NOS: 13539- |
| | 3 | 13546 |
| TNC | Tenascin C | SEQ ID NOS: 13547- |
| | | 13555 |
| TNFAIP6 | Tumor necrosis factor, alpha-induced | SEQ ID NO: 13556 |
| | protein 6 | |
| TNFRSF11A | Tumor necrosis factor receptor superfamily, | SEQ ID NOS: 13557- |
| | member 11a, NFKB activator | 13561 |
| TNFRSF11B | Tumor necrosis factor receptor superfamily, | SEQ ID NOS: 13562- |
| | member 11b | 13563 |
| TNFRSF12A | Tumor necrosis factor receptor superfamily, | SEQ ID NOS: 13564- |
| | member 12A | 13569 |
| TNFRSF14 | Tumor necrosis factor receptor superfamily, | SEQ ID NOS: 13570- |
| | member 14 | 13576 |
| TNFRSF18 | Tumor necrosis factor receptor superfamily, | SEQ ID NOS: 13577- |
| | member 18 | 13580 |
| TNFRSF1A | Tumor necrosis factor receptor superfamily, | SEQ ID NOS: 13581- |
| | member 1A | 13589 |
| TNFRSF1B | Tumor necrosis factor receptor superfamily, | SEQ ID NOS: 13590- |
| | member 1B | 13591 |
| TNFRSF25 | Tumor necrosis factor receptor superfamily, | SEQ ID NOS: 13592- |
| | member 25 | 13603 |
| TNFRSF6B | Tumor necrosis factor receptor superfamily, | SEQ ID NO: 13604 |
| | member 6b, decoy | |
| TNFSF11 | Tumor necrosis factor (ligand) superfamily, | SEQ ID NOS: 13605- |
| | member 11 | 13609 |
| TNFSF12 | Tumor necrosis factor (ligand) superfamily, | SEQ ID NOS: 13610- |
| | member 12 | 13611 |
| TNFSF12- | TNFSF12-TNFSF13 readthrough | SEQ ID NO: 13612 |
| TNFSF13 | | |
| TNFSF15 | Tumor necrosis factor (ligand) superfamily, | SEQ ID NOS: 13613- |
| | member 15 | 13614 |
| TNN | Tenascin N | SEQ ID NOS: 13615- |
| | | 13617 |
| TNR | Tenascin R | SEQ ID NOS: 13618- |
| | | 13620 |
| TNXB | Tenascin XB | SEQ ID NOS: 13621- |
| | | 13627 |
| TOMM7 | Translocase of outer mitochondrial | SEQ ID NOS: 13634- |
| | membrane 7 homolog (yeast) | 13637 |
| TOP1MT | Topoisomerase (DNA) I, mitochondrial | SEQ ID NOS: 13638- |
| | | 13652 |
| TOR1A | Torsin family 1, member A (torsin A) | SEQ ID NO: 13653 |
| TOR1B | Torsin family 1, member B (torsin B) | SEQ ID NOS: 13654- |
| | | 13655 |
| TOR2A | Torsin family 2, member A | SEQ ID NOS: 13656- |
| | | 13662 |
| TOR3A | Torsin family 3, member A | SEQ ID NOS: 13663- |
| | | 13667 |
| TPD52 | Tumor protein D52 | SEQ ID NOS: 13668- |
| | | 13680 |
| TPO | Thyroid peroxidase | SEQ ID NOS: 13681- |
| | | 13691 |
| TPP1 | Tripeptidyl peptidase I | SEQ ID NOS: 13692- |
| | | 13709 |
| TPSAB1 | Tryptase alpha/beta 1 | SEQ ID NOS: 13710- |
| | | 13712 |
| TPSB2 | Tryptase beta 2 (gene/pseudogene) | SEQ ID NOS: 13713- |
| | | 13715 |
| TPSD1 | Tryptase delta 1 | SEQ ID NOS: 13716- |
| | | 13717 |
| TPST1 | Tyrosylprotein sulfotransferase 1 | SEQ ID NOS: 13718- |
| | | 13720 |
| TPST2 | Tyrosylprotein sulfotransferase 2 | SEQ ID NOS: 13721- |
| | | 13729 |
| TRABD2A | TraB domain containing 2A | SEQ ID NOS: 13730- |
| | | 13732 |
| TRABD2B | TraB domain containing 2B | SEQ ID NO: 13733 |
| TREH | Trehalase (brush-border membrane | SEQ ID NOS: 13734- |
| | glycoprotein) | 13736 |
| TREM1 | Triggering receptor expressed on myeloid | SEQ ID NOS: 13737- |
| | cells 1 | 13740 |
| TREM2 | Triggering receptor expressed on myeloid | SEQ ID NOS: 13741- |
| | cells 2 | 13743 |
| TRH | Thyrotropin-releasing hormone | SEQ ID NOS: 13744- |
| | | 13745 |
| TRIM24 | Tripartite motif containing 24 | SEQ ID NOS: 13746- |
| | | 13747 |
| TRIM28 | Tripartite motif containing 28 | SEQ ID NOS: 13748- |
| | | 13753 |
| TRIO | Trio Rho guanine nucleotide exchange | SEQ ID NOS: 13754- |
| | factor | 13760 |
| TRNP1 | TMF1-regulated nuclear protein 1 | SEQ ID NOS: 13761- |
| | | 13762 |
| TSC22D4 | TSC22 domain family, member 4 | SEQ ID NOS: 13763- |
| | | 13766 |
| TSHB | Thyroid stimulating hormone, beta | SEQ ID NOS: 13767- |
| | | 13768 |
| TSHR | Thyroid stimulating hormone receptor | SEQ ID NOS: 13769- |
| | | 13776 |
| TSKU | Tsukushi, small leucine rich proteoglycan | SEQ ID NOS: 13777- |
| | | 13781 |
| TSLP | Thymic stromal lymphopoietin | SEQ ID NOS: 13782- |
| | | 13784 |
| TSPAN3 | Tetraspanin 3 | SEQ ID NOS: 13785- |
| | | 13790 |
| TSPAN31 | Tetraspanin 31 | SEQ ID NOS: 13791- |
| | | 13797 |
| TSPEAR | Thrombospondin-type laminin G domain | SEQ ID NOS: 13798- |
| | and EAR repeats | 13801 |
| TTC13 | Tetratricopeptide repeat domain 13 | SEQ ID NOS: 13802- |
| | | 13808 |
| TTC19 | Tetratricopeptide repeat domain 19 | SEQ ID NOS: 13809- |
| | | 13814 |
| TTC9B | Tetratricopeptide repeat domain 9B | SEQ ID NO: 13815 |
| TTLL11 | Tubulin tyrosine ligase-like family member | SEQ ID NOS: 13816- |
| | 11 | 13820 |
| TTR | Transthyretin | SEQ ID NOS: 13821- |
| | | 13823 |
| TWSG1 | Twisted gastrulation BMP signaling | SEQ ID NOS: 13824- |
| | modulator 1 | 13826 |
| TXNDC12 | Thioredoxin domain containing 12 | SEQ ID NOS: 13827- |
| | (endoplasmic reticulum) | 13829 |
| TXNDC15 | Thioredoxin domain containing 15 | SEQ ID NOS: 13830- |
| | | 13836 |
| TXNDC5 | Thioredoxin domain containing 5 | SEQ ID NOS: 13837- |
| | (endoplasmic reticulum) | 13838 |
| TXNRD2 | Thioredoxin reductase 2 | SEQ ID NOS: 13839- |
| | | 13851 |
| TYRP1 | Tyrosinase-related protein 1 | SEQ ID NOS: 13852- |
| | | 13854 |
| UBAC2 | UBA domain containing 2 | SEQ ID NOS: 13855- |
| | | 13859 |
| UBALD1 | UBA-like domain containing 1 | SEQ ID NOS: 13860- |
| | | 13868 |
| UBAP2 | Ubiquitin associated protein 2 | SEQ ID NOS: 13869- |
| | | 13875 |
| UBXN8 | UBX domain protein 8 | SEQ ID NOS: 13876- |
| | | 13882 |
| UCMA | Upper zone of growth plate and cartilage | SEQ ID NOS: 13883- |
| | matrix associated | 13884 |
| UCN | Urocortin | SEQ ID NO: 13885 |
| UCN2 | Urocortin 2 | SEQ ID NO: 13886 |
| UCN3 | Urocortin 3 | SEQ ID NO: 13887 |
| UGGT2 | UDP-glucose glycoprotein | SEQ ID NOS: 13888- |
| | glucosyltransferase 2 | 13893 |
| UGT1A10 | UDP glucuronosyltransferase 1 family, | SEQ ID NOS: 13894- |
| | polypeptide A10 | 13895 |
| UGT2A1 | UDP glucuronosyltransferase 2 family, | SEQ ID NOS: 13896- |
| | polypeptide A1, complex locus | 13900 |
| UGT2B11 | UDP glucuronosyltransferase 2 family, | SEQ ID NO: 13901 |
| | polypeptide B11 | |
| UGT2B28 | UDP glucuronosyltransferase 2 family, | SEQ ID NOS: 13902- |
| | polypeptide B28 | 13903 |
| UGT2B4 | UDP glucuronosyltransferase 2 family, | SEQ ID NOS: 13904- |
| | polypeptide B4 | 13907 |
| UGT2B7 | UDP glucuronosyltransferase 2 family, | SEQ ID NOS: 13908- |
| | polypeptide B7 | 13911 |
| UGT3A1 | UDP glycosyltransferase 3 family, | SEQ ID NOS: 13912- |
| | polypeptide A1 | 13917 |
| UGT3A2 | UDP glycosyltransferase 3 family, | SEQ ID NOS: 13918- |
| | polypeptide A2 | 13921 |
| UGT8 | UDP glycosyltransferase 8 | SEQ ID NOS: 13922- |
| | | 13924 |
| ULBP3 | UL16 binding protein 3 | SEQ ID NOS: 13925- |
| | | 13926 |
| UMOD | Uromodulin | SEQ ID NOS: 13927- |
| | | 13938 |
| UNC5C | Unc-5 netrin receptor C | SEQ ID NOS: 13939- |
| | | 13943 |
| UPK3B | Uroplakin 3B | SEQ ID NOS: 13944- |
| | | 13946 |
| USP11 | Ubiquitin specific peptidase 11 | SEQ ID NOS: 13947- |
| | | 13950 |
| USP14 | Ubiquitin specific peptidase 14 (tRNA- | SEQ ID NOS: 13951- |
| | guanine transglycosylase) | 13957 |
| USP3 | Ubiquitin specific peptidase 3 | SEQ ID NOS: 13958- |
| | | 13973 |
| UTS2 | Urotensin 2 | SEQ ID NOS: 13984- |
| | | 13986 |
| UTS2B | Urotensin 2B | SEQ ID NOS: 13987- |
| | | 13992 |
| UTY | Ubiquitously transcribed tetratricopeptide | SEQ ID NOS: 13993- |
| | repeat containing, Y-linked | 14005 |
| UXS1 | UDP-glucuronate decarboxylase 1 | SEQ ID NOS: 14006- |
| | | 14013 |
| VASH1 | Vasohibin 1 | SEQ ID NOS: 14014- |
| | | 14016 |
| VCAN | Versican | SEQ ID NOS: 14017- |
| | | 14023 |
| VEGFA | Vascular endothelial growth factor A | SEQ ID NOS: 14024- |
| | | 14049 |
| VEGFB | Vascular endothelial growth factor B | SEQ ID NOS: 14050- |
| | | 14052 |
| VEGFC | Vascular endothelial growth factor C | SEQ ID NO: 14053 |
| VGF | VGF nerve growth factor inducible | SEQ ID NOS: 14055- |
| | | 14057 |
| VIP | Vasoactive intestinal peptide | SEQ ID NOS: 14058- |
| | | 14060 |
| VIPR2 | Vasoactive intestinal peptide receptor 2 | SEQ ID NOS: 14061- |
| | | 14064 |
| VIT | Vitrin | SEQ ID NOS: 14065- |
| | | 14072 |
| VKORC1 | Vitamin K epoxide reductase complex, | SEQ ID NOS: 14073- |
| | subunit 1 | 14080 |
| VLDLR | Very low density lipoprotein receptor | SEQ ID NOS: 14081- |
| | | 14083 |
| VMO1 | Vitelline membrane outer layer 1 homolog | SEQ ID NOS: 14084- |
| | (chicken) | 14087 |
| VNN1 | Vanin 1 | SEQ ID NO: 14088 |
| VNN2 | Vanin 2 | SEQ ID NOS: 14089- |
| | | 14102 |
| VNN3 | Vanin 3 | SEQ ID NOS: 14103- |
| | | 14114 |
| VOPP1 | Vesicular, overexpressed in cancer, | SEQ ID NOS: 14115- |
| | prosurvival protein 1 | 14127 |
| VPREB1 | Pre-B lymphocyte 1 | SEQ ID NOS: 14128- |
| | | 14129 |
| VPREB3 | Pre-B lymphocyte 3 | SEQ ID NOS: 14130- |
| | | 14131 |
| VPS37B | Vacuolar protein sorting 37 homolog B | SEQ ID NOS: 14132- |
| | (S. cerevisiae) | 14134 |
| VPS51 | Vacuolar protein sorting 51 homolog | SEQ ID NOS: 14135- |
| | (S. cerevisiae) | 14146 |
| VSIG1 | V-set and immunoglobulin domain | SEQ ID NOS: 14147- |
| | containing 1 | 14149 |
| VSIG10 | V-set and immunoglobulin domain | SEQ ID NOS: 14150- |
| | containing 10 | 14151 |
| VSTM1 | V-set and transmembrane domain | SEQ ID NOS: 14152- |
| | containing 1 | 14158 |
| VSTM2A | V-set and transmembrane domain | SEQ ID NOS: 14159- |
| | containing 2A | 14162 |
| VSTM2B | V-set and transmembrane domain | SEQ ID NO: 14163 |
| | containing 2B | |
| VSTM2L | V-set and transmembrane domain | SEQ ID NOS: 14164- |
| | containing 2 like | 14166 |
| VSTM4 | V-set and transmembrane domain | SEQ ID NOS: 14167- |
| | containing 4 | 14168 |
| VTN | Vitronectin | SEQ ID NOS: 14169- |
| | | 14170 |
| VWA1 | Von Willebrand factor A domain containing | SEQ ID NOS: 14171- |
| | 1 | 14174 |
| VWA2 | Von Willebrand factor A domain containing | SEQ ID NOS: 14175- |
| | 2 | 14176 |
| VWA5B2 | Von Willebrand factor A domain containing | SEQ ID NOS: 14177- |
| | 5B2 | 14178 |
| VWA7 | Von Willebrand factor A domain containing | SEQ ID NO: 14179 |
| | 7 | |
| VWC2 | Von Willebrand factor C domain containing | SEQ ID NO: 14180 |
| | 2 | |
| VWC2L | Von Willebrand factor C domain containing | SEQ ID NOS: 14181- |
| | protein 2-like | 14182 |
| VWCE | Von Willebrand factor C and EGF domains | SEQ ID NOS: 14183- |
| | | 14187 |
| VWDE | Von Willebrand factor D and EGF domains | SEQ ID NOS: 14188- |
| | | 14193 |
| VWF | Von Willebrand factor | SEQ ID NOS: 14194- |
| | | 14196 |
| WDR25 | WD repeat domain 25 | SEQ ID NOS: 14197- |
| | | 14203 |
| WDR81 | WD repeat domain 81 | SEQ ID NOS: 14204- |
| | | 14213 |
| WDR90 | WD repeat domain 90 | SEQ ID NOS: 14214- |
| | | 14221 |
| WFDC1 | WAP four-disulfide core domain 1 | SEQ ID NOS: 14222- |
| | | 14224 |
| WFDC10A | WAP four-disulfide core domain 10A | SEQ ID NO: 14225 |
| WFDC10B | WAP four-disulfide core domain 10B | SEQ ID NOS: 14226- |
| | | 14227 |
| WFDC11 | WAP four-disulfide core domain 11 | SEQ ID NOS: 14228- |
| | | 14230 |
| WFDC12 | WAP four-disulfide core domain 12 | SEQ ID NO: 14231 |
| WFDC13 | WAP four-disulfide core domain 13 | SEQ ID NO: 14232 |
| WFDC2 | WAP four-disulfide core domain 2 | SEQ ID NOS: 14233- |
| | | 14237 |
| WFDC3 | WAP four-disulfide core domain 3 | SEQ ID NOS: 14238- |
| | | 14241 |
| WFDC5 | WAP four-disulfide core domain 5 | SEQ ID NOS: 14242- |
| | | 14243 |
| WFDC6 | WAP four-disulfide core domain 6 | SEQ ID NOS: 14244- |
| | | 14245 |
| WFDC8 | WAP four-disulfide core domain 8 | SEQ ID NOS: 14246- |
| | | 14247 |
| WFIKKN1 | WAP, follistatin/kazal, immunoglobulin, | SEQ ID NO: 14248 |
| | kunitz and netrin domain containing 1 | |
| WFIKKN2 | WAP, follistatin/kazal, immunoglobulin, | SEQ ID NOS: 14249- |
| | kunitz and netrin domain containing 2 | 14250 |
| WIF1 | WNT inhibitory factor 1 | SEQ ID NOS: 14255- |
| | | 14257 |
| WISP1 | WNT1 inducible signaling pathway protein | SEQ ID NOS: 14258- |
| | 1 | 14262 |
| WISP2 | WNT1 inducible signaling pathway protein | SEQ ID NOS: 14263- |
| | 2 | 14265 |
| WISP3 | WNT1 inducible signaling pathway protein | SEQ ID NOS: 14266- |
| | 3 | 14273 |
| WNK1 | WNK lysine deficient protein kinase 1 | SEQ ID NOS: 14274- |
| | | 14287 |
| WNT1 | Wingless-type MMTV integration site | SEQ ID NOS: 14288- |
| | family, member 1 | 14289 |
| WNT10B | Wingless-type MMTV integration site | SEQ ID NOS: 14290- |
| | family, member 10B | 14294 |
| WNT11 | Wingless-type MMTV integration site | SEQ ID NOS: 14295- |
| | family, member 11 | 14297 |
| WNT16 | Wingless-type MMTV integration site | SEQ ID NOS: 14298- |
| | family, member 16 | 14299 |
| WNT2 | Wingless-type MMTV integration site | SEQ ID NOS: 14300- |
| | family member 2 | 14302 |
| WNT3 | Wingless-type MMTV integration site | SEQ ID NO: 14303 |
| | family, member 3 | |
| WNT3A | Wingless-type MMTV integration site | SEQ ID NO: 14304 |
| | family, member 3A | |
| WNT5A | Wingless-type MMTV integration site | SEQ ID NOS: 14305- |
| | family, member 5A | 14308 |
| WNT5B | Wingless-type MMTV integration site | SEQ ID NOS: 14309- |
| | family, member 5B | 14315 |
| WNT6 | Wingless-type MMTV integration site | SEQ ID NO: 14316 |
| | family, member 6 | |
| WNT7A | Wingless-type MMTV integration site | SEQ ID NO: 14317 |
| | family, member 7A | |
| WNT7B | Wingless-type MMTV integration site | SEQ ID NOS: 14318- |
| | family, member 7B | 14322 |
| WNT8A | Wingless-type MMTV integration site | SEQ ID NOS: 14323- |
| | family, member 8A | 14326 |
| WNT8B | Wingless-type MMTV integration site | SEQ ID NO: 14327 |
| | family, member 8B | |
| WNT9A | Wingless-type MMTV integration site | SEQ ID NO: 14328 |
| | family, member 9A | |
| WNT9B | Wingless-type MMTV integration site | SEQ ID NOS: 14329- |
| | family, member 9B | 14331 |
| WSB1 | WD repeat and SOCS box containing 1 | SEQ ID NOS: 14332- |
| | | 14341 |
| WSCD1 | WSC domain containing 1 | SEQ ID NOS: 14342- |
| | | 14351 |
| WSCD2 | WSC domain containing 2 | SEQ ID NOS: 14352- |
| | | 14355 |
| XCL1 | Chemokine (C motif) ligand 1 | SEQ ID NO: 14356 |
| XCL2 | Chemokine (C motif) ligand 2 | SEQ ID NO: 14357 |
| XPNPEP2 | X-prolyl aminopeptidase (aminopeptidase | SEQ ID NOS: 14358- |
| | P) 2, membrane-bound | 14359 |
| XXbac- | | SEQ ID NOS: 679-680 |
| BPG116M5.17 | | |
| XXbac- | | SEQ ID NO: 681 |
| BPG181M17.5 | | |
| XXbac- | | SEQ ID NO: 682 |
| BPG32J3.20 | | |
| XXYLT1 | Xyloside xylosyltransferase 1 | SEQ ID NOS: 14360- |
| | | 14365 |
| XYLT1 | Xylosyltransferase I | SEQ ID NO: 14366 |
| XYLT2 | Xylosyltransferase II | SEQ ID NOS: 14367- |
| | | 14372 |
| ZFYVE21 | Zinc finger, FYVE domain containing 21 | SEQ ID NOS: 14373- |
| | | 14377 |
| ZG16 | Zymogen granule protein 16 | SEQ ID NO: 14378 |
| ZG16B | Zymogen granule protein 16B | SEQ ID NOS: 14379- |
| | | 14382 |
| ZIC4 | Zic family member 4 | SEQ ID NOS: 14383- |
| | | 14391 |
| ZNF207 | Zinc finger protein 207 | SEQ ID NOS: 14392- |
| | | 14402 |
| ZNF26 | Zinc finger protein 26 | SEQ ID NOS: 14403- |
| | | 14406 |
| ZNF34 | Zinc finger protein 34 | SEQ ID NOS: 14407- |
| | | 14410 |
| ZNF419 | Zinc finger protein 419 | SEQIDNOS: 14411- |
| | | 14425 |
| ZNF433 | Zinc finger protein 433 | SEQ ID NOS: 14426- |
| | | 14435 |
| ZNF449 | Zinc finger protein 449 | SEQ ID NOS: 14436- |
| | | 14437 |
| ZNF488 | Zinc finger protein 488 | SEQ ID NOS: 14438- |
| | | 14439 |
| ZNF511 | Zinc finger protein 511 | SEQ ID NOS: 14440- |
| | | 14441 |
| ZNF570 | Zinc finger protein 570 | SEQ ID NOS: 14442- |
| | | 14447 |
| ZNF691 | Zinc finger protein 691 | SEQ ID NOS: 14448- |
| | | 14455 |
| ZNF98 | Zinc finger protein 98 | SEQ ID NOS: 14456- |
| | | 14459 |
| ZPBP | Zona pellucida binding protein | SEQ ID NOS: 14460- |
| | | 14463 |
| ZPBP2 | Zona pellucida binding protein 2 | SEQ ID NOS: 14464- |
| | | 14467 |
| ZSCAN29 | Zinc finger and SCAN domain containing | SEQ ID NOS: 14468- |
| | 29 | 14474 |

### Cas-Clover

[0874] The disclosure provides a composition comprising a guide RNA and a fusion protein or a sequence encoding the fusion protein wherein the fusion protein comprises a dCas9 and a Clo051 endonuclease or a nuclease domain thereof.

### Small Cas9 (SaCas9)

[0875] The disclosure provides compositions comprising a small, Cas9 (Cas9) operatively-linked to an effector. In certain embodiments, the disclosure provides a fusion protein comprising, consisting essentially of or consisting of a DNA localization component and an effector molecule, wherein the effector comprises a small, Cas9 (Cas9). In certain embodiments, a small Cas9 construct of the disclosure may comprise an effector comprising a type IIS endonuclease.

[0876] Amino acid sequence of Staphylococcus aureus Cas9 with an active catalytic site.

| (SEQ ID NO: 18040) | |
|---|---|
| 1 | mkrnyilgld igitsvgygi idyetrdvid agvrlfkean vennegrrsk rgarrlkrrr |
| 61 | rhriqrvkkl lfdynlltdh selsginpye arvkglsqkl seeefsaall hlakrrgvhn |
| 121 | vneveedtgn elstkeqisr nskaleekyv aelqlerlkk dgevrgsinr fktsdyvkea |
| 181 | kqllkvqkay hqldqsfidt yidlletrrt yyegpgegsp fgwkdikewy emlmghctyf |
| 241 | peelrsvkya ynadlynaln dlnnlvitrd enekleyyek fqiienvfkq kkkptlkqia |
| 301 | keilvneedi kgyrvtstgk peftnlkvyh dikditarke iienaelldq iakiltiyqs |
| 361 | sediqeeltn lnseltqeei eqisnlkgyt gthnlslkai nlildelwht ndnqiaifnr |
| 421 | lklvpkkvdl sqqkeipttl vddfilspvv krsfiqsikv inaiikkygl pndiiielar |
| 481 | eknskdaqkm inemqkrnrq tnerieeiir ttgkenakyl iekiklhdmq egkclyslea |
| 541 | ipledllnnp fnyevdhiip rsysfdnsfn nkvlvkqeen skkgnrtpfq ylsssdskis |
| 601 | yetfkkhiln lakgkgrisk tkkeylleer dinrfsvqkd finrnlvdtr yatrglmnll |
| 661 | rsyfrvnnld vkvksinggf tsflrrkwkf kkernkgykh haedaliian adfifkewkk |
| 721 | ldkakkvmen qmfeekqaes mpeieteqey keifitphqi khikdfkdyk yshrvdkkpn |
| 781 | relindtlys trkddkgntl ivnnlnglyd kdndklkkli nkspekllmy hhdpqtyqkl |
| 841 | klimeqygde knplykyyee tgnyltkysk kdngpvikki kyygnklnah lditddypns |
| 901 | rnkvvklslk pyrfdvyldn gvykfvtvkn ldvikkenyy evnskcyeea kklkkisnqa |
| 961 | efiasfynnd likingelyr vigvnndlln rievnmidit yreylenmnd krppriikti |
| 1021 | asktqsikky stdilgnlye vkskkhpqii kkg. |

Inactivated, Small Cas9 (dsaCas9)

[0877] The disclosure provides compositions comprising an inactivated, small, Cas9 (dSaCas9) operatively-linked to an effector. In certain embodiments, the disclosure provides a fusion protein comprising, consisting essentially of or consisting of a DNA localization component and an effector molecule, wherein the effector comprises a small, inactivated Cas9 (dSaCas9). In certain embodiments, a small, inactivated Cas9 (dSaCas9) construct of the disclosure may comprise an effector comprising a type IIS endonuclease.

[0878] dSaCas9 Sequence: D10A and N580A mutations (bold, capitalized, and underlined) inactivate the catalytic site.

| (SEQ ID NO: 18041) | |
|---|---|
| 1 | mkrnyilglA igitsvgygi idyetrdvid agvrlfkean vennegrrsk rgarrlkrrr |
| 61 | rhriqrvkkl lfdynlltdh selsginpye arvkglsqkl seeefsaall hlakrrgvhn |
| 121 | vneveedtgn elstkeqisr nskaleekyv aelqlerlkk dgevrgsinr fktsdyvkea |
| 181 | kqllkvqkay hqldqsfidt yidlletrrt yyegpgegsp fgwkdikewy emlmghctyf |
| 241 | peelrsvkya ynadlynaln dlnnlvitrd enekleyyek fqiienvfkq kkkptlkqia |
| 301 | keilvneedi kgyrvtstgk peftnlkvyh dikditarke iienaelldq iakiltiyqs |
| 361 | sediqeeltn lnseltqeei eqisnlkgyt gthnlslkai nlildelwht ndnqiaifnr |
| 421 | lklvpkkvdl sqqkeipttl vddfilspvv krsfiqsikv inaiikkygl pndiiielar |
| 481 | eknskdaqkm inemqkrnrq tnerieeiir ttgkenakyl iekiklhdmq egkclyslea |
| 541 | ipledllnnp fnyevdhiip rsysfdnsfn nkvlvkqeeA skkgnrtpfq ylsssdskis |
| 601 | yetfkkhiln lakgkgrisk tkkeylleer dinrfsvqkd finrnlvdtr yatrglmnll |
| 661 | rsyfrvnnld vkvksinggf tsflrrkwkf kkernkgykh haedaliian adfifkewkk |
| 721 | ldkakkvmen qmfeekqaes mpeieteqey keifitphqi khikdfkdyk yshrvdkkpn |
| 781 | relindtlys trkddkgntl ivnnlnglyd kdndklkkli nkspekllmy hhdpqtyqkl |
| 841 | klimeqygde knplykyyee tgnyltkysk kdngpvikki kyygnklnah lditddypns |
| 901 | rnkvvklslk pyrfdvyldn gvykfvtvkn ldvikkenyy evnskcyeea kklkkisnqa |
| 961 | efiasfynnd likingelyr vigvnndlln rievnmidit yreylenmnd krppriikti |
| 1021 | asktqsikky stdilgnlye vkskkhpqii kkg. |

Inactivated Cas9 (dCas9)

[0879] The disclosure provides compositions comprising an inactivated Cas9 (dCas9) operatively-linked to an effector. In certain embodiments, the disclosure provides a fusion protein comprising, consisting essentially of or consisting of a DNA localization component and an effector molecule, wherein the effector comprises an inactivated Cas9 (dCas9). In certain embodiments, an inactivated Cas9 (dCas9) construct of the disclosure may comprise an effector comprising a type IIS endonuclease.

[0880] In certain embodiments, the dCas9 of the disclosure comprises a dCas9 isolated or derived from Staphyloccocus pyogenes. In certain embodiments, the dCas9 comprises a dCas9 with substitutions at positions 10 and 840 of the amino acid sequence of the dCas9 that inactivate the catalytic site. In certain embodiments, these substitutions are D10A and H840A. In certain embodiments, the amino acid sequence of the dCas9 comprises the sequence of:

| (SEQ ID NO: 18042) | |
|---|---|
| 1 | XDKKYSIGLA IGTNSVGWAV ITDEYKVPSK KFKVLGNTDR HSIKKNLIGA LLFDSGETAE |
| 61 | ATRLKRTARR RYTRRKNRIC YLQEIFSNEM AKVDDSFFHR LEESFLVEED KKHERHPIFG |
| 121 | NIVDEVAYHE KYPTIYHLRK KLVDSTDKAD LRLIYLALAH MIKFRGHFLI EGDLNPDNSD |
| 181 | VDKLFIQLVQ TYNQLFEENP INASGVDAKA ILSARLSKSR RLENLIAQLP GEKKNGLFGN |
| 241 | LIALSLGLTP NFKSNFDLAE DAKLQLSKDT YDDDLDNLLA QIGDQYADLF LAAKNLSDAI |
| 301 | LLSDILRVNT EITKAPLSAS MIKRYDEHHQ DLTLLKALVR QQLPEKYKEI FFDQSKNGYA |
| 361 | GYIDGGASQE EFYKFIKPIL EKMDGTEELL VKLNREDLLR KQRTFDNGSI PHQIHLGELH |
| 421 | AILRRQEDFY PFLKDNREKI EKILTFRIPY YVGPLARGNS RFAWMTRKSE ETITPWNFEE |
| 481 | VVDKGASAQS FIERMTNFDK NLPNEKVLPK HSLLYEYFTV YNELTKVKYV TEGMRKPAFL |
| 541 | SGEQKKAIVD LLFKTNRKVT VKQLKEDYFK KIECFDSVEI SGVEDRFNAS LGTYHDLLKI |
| 601 | IKDKDFLDNE ENEDILEDIV LTLTLFEDRE MIEERLKTYA HLFDDKVMKQ LKRRRYTGWG |
| 661 | RLSRKLINGI RDKQSGKTIL DFLKSDGFAN RNFMQLIHDD SLTFKEDIQK AQVSGQGDSL |
| 721 | HEHIANLAGS PAIKKGILQT VKVVDELVKV MGRHKPENIV IEMARENQTT QKGQKNSRER |
| 781 | MKRIEEGIKE LGSQILKEHP VENTQLQNEK LYLYYLQNGR DMYVDQELDI NRLSDYDVDA |
| 841 | IVPQSFLKDD SIDNKVLTRS DKNRGKSDNV PSEEVVKKMK NYWRQLLNAK LITQRKFDNL |
| 901 | TKAERGGLSE LDKAGFIKRQ LVETRQITKH VAQILDSRMN TKYDENDKLI REVKVITLKS |
| 961 | KLVSDFRKDF QFYKVREINN YHHAHDAYLN AVVGTALIKK YPKLESEFVY GDYKVYDVRK |
| 1021 | MIAKSEQEIG KATAKYFFYS NIMNFFKTEI TLANGEIRKR PLIETNGETG EIVWDKGRDF |
| 1081 | ATVRKVLSMP QVNIVKKTEV QTGGFSKESI LPKRNSDKLI ARKKDWDPKK YGGFDSPTVA |
| 1141 | YSVLVVAKVE KGKSKKLKSV KELLGITIME RSSFEKNPID FLEAKGYKEV KKDLIIKLPK |
| 1201 | YSLFELENGR KRMLASAGEL QKGNELALPS KYVNFLYLAS HYEKLKGSPE DNEQKQLFVE |
| 1261 | QHKHYLDEII EQISEFSKRV ILADANLDKV LSAYNKHRDK PIREQAENII HLFTLTNLGA |
| 1321 | PAAFKYFDTT IDRKRYTSTK EVLDATLIHQ SITGLYETRI DLSQLGGD. |

[0881] In certain embodiments, the amino acid sequence of the dCas9 comprises the sequence of:

| (SEQ ID NO: 18043) | |
|---|---|
| 1 | MDKKYSIGLA IGTNSVGWAV ITDEYKVPSK KFKVLGNTDR HSIKKNLIGA LLFDSGETAE |
| 61 | ATRLKRTARR RYTRRKNRIC YLQEIFSNEM AKVDDSFFHR LEESFLVEED KKHERHPIFG |
| 121 | NIVDEVAYHE KYPTIYHLRK KLVDSTDKAD LRLIYLALAH MIKFRGHFLI EGDLNPDNSD |
| 181 | VDKLFIQLVQ TYNQLFEENP INASGVDAKA ILSARLSKSR RLENLIAQLP GEKKNGLFGN |
| 241 | LIALSLGLTP NFKSNFDLAE DAKLQLSKDT YDDDLDNLLA QIGDQYADLF LAAKNLSDAI |
| 301 | LLSDILRVNT EITKAPLSAS MIKRYDEHHQ DLTLLKALVR QQLPEKYKEI FFDQSKNGYA |
| 361 | GYIDGGASQE EFYKFIKPIL EKMDGTEELL VKLNREDLLR KQRTFDNGSI PHQIHLGELH |
| 421 | AILRRQEDFY PFLKDNREKI EKILTFRIPY YVGPLARGNS RFAWMTRKSE ETITPWNFEE |
| 481 | VVDKGASAQS FIERMTNFDK NLPNEKVLPK HSLLYEYFTV YNELTKVKYV TEGMRKPAFL |
| 541 | SGEQKKAIVD LLFKTNRKVT VKQLKEDYFK KIECFDSVEI SGVEDRFNAS LGTYHDLLKI |
| 601 | IKDKDFLDNE ENEDILEDIV LTLTLFEDRE MIEERLKTYA HLFDDKVMKQ LKRRRYTGWG |
| 661 | RLSRKLINGI RDKQSGKTIL DFLKSDGFAN RNFMQLIHDD SLTFKEDIQK AQVSGQGDSL |
| 721 | HEHIANLAGS PAIKKGILQT VKVVDELVKV MGRHKPENIV IEMARENQTT QKGQKNSRER |
| 781 | MKRIEEGIKE LGSQILKEHP VENTQLQNEK LYLYYLQNGR DMYVDQELDI NRLSDYDVDA |
| 841 | IVPQSFLKDD SIDNKVLTRS DKNRGKSDNV PSEEVVKKMK NYWRQLLNAK LITQRKFDNL |
| 901 | TKAERGGLSE LDKAGFIKRQ LVETRQITKH VAQILDSRMN TKYDENDKLI REVKVITLKS |
| 961 | KLVSDFRKDF QFYKVREINN YHHAHDAYLN AVVGTALIKK YPKLESEFVY GDYKVYDVRK |
| 1021 | MIAKSEQEIG KATAKYFFYS NIMNFFKTEI TLANGEIRKR PLIETNGETG EIVWDKGRDF |
| 1081 | ATVRKVLSMP QVNIVKKTEV QTGGFSKESI LPKRNSDKLI ARKKDWDPKK YGGFDSPTVA |
| 1141 | YSVLVVAKVE KGKSKKLKSV KELLGITIME RSSFEKNPID FLEAKGYKEV KKDLIIKLPK |
| 1201 | YSLFELENGR KRMLASAGEL QKGNELALPS KYVNFLYLAS HYEKLKGSPE DNEQKQLFVE |
| 1261 | QHKHYLDEII EQISEFSKRV ILADANLDKV LSAYNKHRDK PIREQAENII HLFTLTNLGA |
| 1321 | PAAFKYFDTT IDRKRYTSTK EVLDATLIHQ SITGLYETRI DLSQLGGD. |

### Clo05 Endonuclease

[0882] An exemplary Clo051 nuclease domain may comprise, consist essentially of or consist of, the amino acid sequence of:

(SEQ ID NO: 18044)
EGIKSNISLLKDELRGQISHISHEYLSLIDLAFDSKQNRLFEMKVL
ELLVNEYGFKGRHLGGSRKPDGIVYSTTLEDNFGIIVDTKAYSEG
YSLPISQADEMERYVRENSNRDEEVNPNKWWENFSEEVKKYYFVF
ISGSFKGKFEEQLRRLSMTTGVNGSAVNVVNLLLGAEKIRSGEMT
IEELERAMENNSEFILKY.

### Cas-Clover Fusion Protein

[0883] In certain embodiments, an exemplary dCas9-Clo051 fusion protein (embodiment 1) may comprise, consist essentially of or consist of, the amino acid sequence of (Clo051 sequence underlined, linker bold italics, dCas9 sequence (Streptoccocus pyogenes) in italics):

(SEQ ID NO: 18045)
MAPKKKRKVEGIKSNISLLKDELRGQISHISHEYLSLIDLAFDSKQNRLF
EMKVLELLVNEYGFKGRHLGGSRKPDGIVYSTTLEDNFGIIVDTKAYSEG
YSLPISQADEMERYVRENSNRDEEVNPNKWWENFSEEVKKYYFVFISGSF
KGKFEEQLRRLSMTTGVNGSAVNVVNLLLGAEKIRSGEMTIEELERAMFN
NSEFILKYGGGGSDKKYSIGLAIGTNSVGWAVITDEYKVPSKKFKVLGNT
DRHSIKKNLIGALLFDSGETAEATRLKRTARRRYTRRKNRICYLQEIFSN
EMAKVDDSFFHRLEESFLVEEDKKHERHPIFGNIVDEVAYHEKYPTIYHL
RKKLVDSTDKADLRLIYLALAHMIKFRGHFLIEGDLNPDNSDVDKLFIQL
VQTYNQLFEENPINASGVDAKAILSARLSKSRRLENLIAQLPGEKKNGLF
GNLIALSLGLTPNFKSNFDLAEDAKLQLSKDTYDDDLDNLLAQIGDQYAD
LFLAAKNLSDAILLSDILRVNTEITKAPLSASMIKRYDEHHQDLTLLKAL
VRQQLPEKYKEIFFDQSKNGYAGYIDGGASQEEFYKFIKPILEKMDGTEE
LLVKLNREDLLRKQRTFDNGSIPHQIHLGELHAILRRQEDFYPFLKDNRE
KIEKILTFRIPYYVGPLARGNSRFAWMTRKSEETITPWNFEEVVDKGASA
QSFIERMTNFDKNLPNEKVLPKHSLLYEYFTVYNELTKVKYVTEGMRKPA
FLSGEQKKAIVDLLFKTNRKVTVKQLKEDYFKKIECFDSVEISGVEDRFN
ASLGTYHDLLKIIKDKDFLDNEENEDILEDIVLTLTLFEDREMIEERLKT
YAHLFDDKVMKQLKRRRYTGWGRLSRKLINGIRDKQSGKTILDFLKSDGF
ANRNFMQLIHDDSLTFKEDIQKAQVSGQGDSLHEHIANLAGSPAIKKGIL
QTVKVVDELVKVMGRHKPENIVIEMARENQTTQKGQKNSRERMKRIEEGI
KELGSQILKEHPVENTQLQNEKLYLYYLQNGRDMYVDQELDINRLSDYDV
DAIVPQSFLKDDSIDNKVLTRSDKNRGKSDNVPSEEVVKKMKNYWRQLLN
AKLITQRKFDNLTKAERGGLSELDKAGFIKRQLVETRQITKHVAQILDSR
MNTKYDENDKLIREVKVITLKSKLVSDFRKDFQFYKVREINNYHHAHDAY
LNAVVGTALIKKYPKLESEFVYGDYKVYDVRKMIAKSEQEIGKATAKYFF
YSNIMNFFKTEITLANGEIRKRPLIETNGETGEIVWDKGRDFATVRKVLS
MPQVNIVKKTEVQTGGFSKESILPKRNSDKLIARKKDWDPKKYGGFDSPT
VAYSVLVVAKVEKGKSKKLKSVKELLGITIMERSSFEKNPIDFLEAKGYK
EVKKDLIIKLPKYSLFELENGRKRMLASAGELQKGNELALPSKYVNFLYL
ASHYEKLKGSPEDNEQKQLFVEQHKHYLDEIIEQISEFSKRVILADANLD
KVLSAYNKHRDKPIREQAENIIHLFTLTNLGAPAAFKYFDTTIDRKRYTS
TKEVLDATLIHQSITGLYETRIDLSQLGGDGSPKKKRKVSS.

[0884] In certain embodiments, an exemplary dCas9-Clo051 fusion protein (embodiment 1) may comprise, consist essentially of or consist of, the nucleic acid sequence of (dCas9 sequence derived from Streptoccocus pyogenes):

| (SEQ ID NO: 18046) | |
|---|---|
| 1 | atggcaccaa agaagaaaag aaaagtggag ggcatcaagt caaacatcag cctgctgaaa |
| 61 | gacgaactgc ggggacagat tagtcacatc agtcacgagt acctgtcact gattgatctg |
| 121 | gccttcgaca gcaagcagaa tagactgttt gagatgaaag tgctggaact gctggtcaac |
| 181 | gagtatggct tcaagggcag acatctgggc gggtctagga aacctgacgg catcgtgtac |
| 241 | agtaccacac tggaagacaa cttcggaatc attgtcgata ccaaggctta ttccgagggc |
| 301 | tactctctgc caattagtca ggcagatgag atggaaaggt acgtgcgcga aaactcaaat |
| 361 | agggacgagg aagtcaaccc caataagtgg tgggagaatt tcagcgagga agtgaagaaa |
| 421 | tactacttcg tctttatctc aggcagcttc aaagggaagt ttgaggaaca gctgcggaga |
| 481 | ctgtccatga ctaccggggt gaacggatct gctgtcaacg tggtcaatct gctgctgggc |
| 541 | gcagaaaaga tcaggtccgg ggagatgaca attgaggaac tggaacgcgc catgttcaac |
| 601 | aattctgagt ttatcctgaa gtatggaggc gggggaagcg ataagaaata ctccatcgga |
| 661 | ctggccattg gcaccaattc cgtgggctgg gctgtcatca cagacgagta caaggtgcca |
| 721 | agcaagaagt tcaaggtcct ggggaacacc gatcgccaca gtatcaagaa aaatctgatt |
| 781 | ggagccctgc tgttcgactc aggcgagact gctgaagcaa cccgactgaa gcggactgct |
| 841 | aggcgccgat atacccggag aaaaaatcgg atctgctacc tgcaggaaat tttcagcaac |
| 901 | gagatggcca aggtggacga tagtttcttt caccgcctgg aggaatcatt cctggtggag |
| 961 | gaagataaga aacacgagcg gcatcccatc tttggcaaca ttgtggacga agtcgcttat |
| 1021 | cacgagaagt accctactat ctatcatctg aggaagaaac tggtggactc caccgataag |
| 1081 | gcagacctgc gcctgatcta tctggccctg gctcacatga tcaagttccg ggggcatttt |
| 1141 | ctgatcgagg gagatctgaa ccctgacaat tctgatgtgg acaagctgtt catccagctg |
| 1201 | gtccagacat acaatcagct gtttgaggaa aacccaatta atgcctcagg cgtggacgca |
| 1261 | aaggccatcc tgagcgccag actgtccaaa tctaggcgcc tggaaaacct gatcgctcag |
| 1321 | ctgccaggag agaagaaaaa cggcctgttt gggaatctga ttgcactgtc cctgggcctg |
| 1381 | acacccaact tcaagtctaa ttttgatctg gccgaggacg ctaagctgca gctgtccaaa |
| 1441 | gacacttatg acgatgacct ggataacctg ctggctcaga tcggcgatca gtacgcagac |
| 1501 | ctgttcctgg ccgctaagaa tctgagtgac gccatcctgc tgtcagatat tctgcgcgtg |
| 1561 | aacacagaga ttactaaggc cccactgagt gcttcaatga tcaaaagata tgacgagcac |
| 1621 | catcaggatc tgaccctgct gaaggctctg gtgaggcagc agctgcccga gaaatacaag |
| 1681 | gaaatcttct ttgatcagag caagaatgga tacgccggct atattgacgg cggggcttcc |
| 1741 | caggaggagt tctacaagtt catcaagccc attctggaaa agatggacgg caccgaggaa |
| 1801 | ctgctggtga agctgaatcg ggaggacctg ctgagaaaac agaggacatt tgataacgga |
| 1861 | agcatccctc accagattca tctgggcgaa ctgcacgcca tcctgcgacg gcaggaggac |
| 1921 | ttctacccat ttctgaagga taaccgcgag aaaatcgaaa agatcctgac cttcagaatc |
| 1981 | ccctactatg tggggcctct ggcacgggga aatagtagat ttgcctggat gacaagaaag |
| 2041 | tcagaggaaa ctatcacccc ctggaacttc gaggaagtgg tcgataaagg cgctagcgca |
| 2101 | cagtccttca ttgaaaggat gacaaatttt gacaagaacc tgccaaatga gaaggtgctg |
| 2161 | cccaaacaca gcctgctgta cgaatatttc acagtgtata acgagctgac taaagtgaag |
| 2221 | tacgtcaccg aagggatgcg caagcccgca ttcctgtccg gagagcagaa gaaagccatc |
| 2281 | gtggacctgc tgtttaagac aaatcggaaa gtgactgtca aacagctgaa ggaagactat |
| 2341 | ttcaagaaaa ttgagtgttt cgattcagtg gaaatcagcg gcgtcgagga caggtttaac |
| 2401 | gcctccctgg ggacctacca cgatctgctg aagatcatca aggataagga cttcctggac |
| 2461 | aacgaggaaa atgaggacat cctggaggac attgtgctga cactgactct gtttgaggat |
| 2521 | cgcgaaatga tcgaggaacg actgaagact tatgcccatc tgttcgatga caaagtgatg |
| 2581 | aagcagctga aaagaaggcg ctacaccgga tggggacgcc tgagccgaaa actgatcaat |
| 2641 | gggattagag acaagcagag cggaaaaact atcctggact ttctgaagtc cgatggcttc |
| 2701 | gccaacagga acttcatgca gctgattcac gatgactctc tgaccttcaa ggaggacatc |
| 2761 | cagaaagcac aggtgtctgg ccagggggac agtctgcacg agcatatcgc aaacctggcc |
| 2821 | ggcagccccg ccatcaagaa agggattctg cagaccgtga aggtggtgga cgaactggtc |
| 2881 | aaggtcatgg gacgacacaa acctgagaac atcgtgattg agatggcccg cgaaaatcag |
| 2941 | acaactcaga agggccagaa aaacagtcga gaacggatga agagaatcga ggaaggcatc |
| 3001 | aaggagctgg ggtcacagat cctgaaggag catcctgtgg aaaacactca gctgcagaat |
| 3061 | gagaaactgt atctgtacta tctgcagaat ggacgggata tgtacgtgga ccaggagctg |
| 3121 | gatattaaca gactgagtga ttatgacgtg gatgccatcg tccctcagag cttcctgaag |
| 3181 | gatgactcca ttgacaacaa ggtgctgacc aggtccgaca agaaccgcgg caaatcagat |
| 3241 | aatgtgccaa gcgaggaagt ggtcaagaaa atgaagaact actggaggca gctgctgaat |
| 3301 | gccaagctga tcacacagcg gaaatttgat aacctgacta aggcagaaag aggaggcctg |
| 3361 | tctgagctgg acaaggccgg cttcatcaag cggcagctgg tggagacaag acagatcact |
| 3421 | aagcacgtcg ctcagattct ggatagcaga atgaacacaa agtacgatga aaacgacaag |
| 3481 | ctgatcaggg aggtgaaagt cattactctg aaatccaagc tggtgtctga ctttagaaag |
| 3541 | gatttccagt tttataaagt cagggagatc aacaactacc accatgctca tgacgcatac |
| 3601 | ctgaacgcag tggtcgggac cgccctgatt aagaaatacc ccaagctgga gtccgagttc |
| 3661 | gtgtacggag actataaagt gtacgatgtc cggaagatga tcgccaaatc tgagcaggaa |
| 3721 | attggcaagg ccaccgctaa gtatttcttt tacagtaaca tcatgaattt ctttaagacc |
| 3781 | gaaatcacac tggcaaatgg ggagatcaga aaaaggcctc tgattgagac caacggggag |
| 3841 | acaggagaaa tcgtgtggga caagggaagg gattttgcta ccgtgcgcaa agtcctgtcc |
| 3901 | atgccccaag tgaatattgt caagaaaact gaagtgcaga ccgggggatt ctctaaggag |
| 3961 | agtattctgc ctaagcgaaa ctctgataaa ctgatcgccc ggaagaaaga ctgggacccc |
| 4021 | aagaagtatg gcgggttcga ctctccaaca gtggcttaca gtgtcctggt ggtcgcaaag |
| 4081 | gtggaaaagg ggaagtccaa gaaactgaag tctgtcaaag agctgctggg aatcactatt |
| 4141 | atggaacgca gctccttcga gaagaatcct atcgattttc tggaagccaa gggctataaa |
| 4201 | gaggtgaaga aagacctgat cattaagctg ccaaaatact cactgtttga gctggaaaac |
| 4261 | ggacgaaagc gaatgctggc aagcgccgga gaactgcaga agggcaatga gctggccctg |
| 4321 | ccctccaaat acgtgaactt cctgtatctg gctagccact acgagaaact gaaggggtcc |
| 4381 | cctgaggata acgaacagaa gcagctgttt gtggagcagc acaaacatta tctggacgag |
| 4441 | atcattgaac agatttcaga gttcagcaag agagtgatcc tggctgacgc aaatctggat |
| 4501 | aaagtcctga gcgcatacaa caagcaccga gacaaaccaa tccgggagca ggccgaaaat |
| 4561 | atcattcatc tgttcaccct gacaaacctg ggcgcccctg cagccttcaa gtattttgac |
| 4621 | accacaatcg atcggaagag atacacttct accaaagagg tgctggatgc taccctgatc |
| 4681 | caccagagta ttaccggcct gtatgagaca cgcatcgacc tgtcacagct gggaggcgat |
| 4741 | gggagcccca agaaaaagcg gaaggtgtct agttaa. |

[0885] In certain embodiments, the nucleic acid sequence encoding a dCas9-Clo051 fusion protein (embodiment 1) of the disclosure may comprise a DNA. In certain embodiments, the nucleic acid sequence encoding a dCas9-Clo051 fusion protein (embodiment 1) of the disclosure may comprise an RNA.

[0886] In certain embodiments, an exemplary dCas9-Clo051 fusion protein (embodiment 2) may comprise, consist essentially of or consist of, the amino acid sequence of (Clo051 sequence underlined, linker bold italics, dCas9 sequence (Streptoccocus pyogenes) in italics):

| (SEQ ID NO: 18047) | |
|---|---|
| 1 | MPKKKRKVEG IKSNISLLKD ELRGQISHIS HEYLSLIDLA FDSKQNRLFE MKVLELLVNE |
| 61 | YGFKGRHLGG SRKPDGIVYS TTLEDNFGII VDTKAYSEGY SLPISQADEM ERYVRENSNR |
| 121 | DEEVNPNKWW ENFSEEVKKY YFVFISGSFK GKFEEQLRRL SMTTGVNGSA VNVVNLLLGA |
| 181 | EKIRSGEMTI EELERAMFNN SEFILKYGGG GSDKKYSIGL AIGTNSVGWA VITDEYKVPS |
| 241 | KKFKVLGNTD RHSIKKNLIG ALLFDSGETA EATRLKRTAR RRYTRRKNRI CYLQEIFSNE |
| 301 | MAKVDDSFFH RLEESFLVEE DKKHERHPIF GNIVDEVAYH EKYPTIYHLR KKLVDSTDKA |
| 361 | DLRLIYLALA HMIKFRGHFL IEGDLNPDNS DVDKLFIQLV QTYNQLFEEN PINASGVDAK |
| 421 | AILSARLSKS RRLENLIAQL PGEKKNGLFG NLIALSLGLT PNFKSNFDLA EDAKLQLSKD |
| 481 | TYDDDLDNLL AQIGDQYADL FLAAKNLSDA ILLSDILRVN TEITKAPLSA SMIKRYDEHH |
| 541 | QDLTLLKALV RQQLPEKYKE IFFDQSKNGY AGYIDGGASQ EEFYKFIKPI LEKMDGTEEL |
| 601 | LVKLNREDLL RKQRTFDNGS IPHQIHLGEL HAILRRQEDF YPFLKDNREK IEKILTFRIP |
| 661 | YYVGPLARGN SRFAWMTRKS EETITPWNFE EVVDKGASAQ SFIERMTNED KNLPNEKVLP |
| 721 | KHSLLYEYFT VYNELTKVKY VTEGMRKPAF LSGEQKKAIV DLLFKTNRKV TVKQLKEDYF |
| 781 | KKIECFDSVE ISGVEDRFNA SLGTYHDLLK IIKDKDFLDN EENEDILEDI VLTLTLFEDR |
| 841 | EMIEERLKTY AHLFDDKVMK QLKRRRYTGW GRLSRKLING IRDKQSGKTI LDFLKSDGFA |
| 901 | NRNFMQLIHD DSLTFKEDIQ KAQVSGQGDS LHEHIANLAG SPAIKKGILQ TVKVVDELVK |
| 961 | VMGRHKPENI VIEMARENQT TQKGQKNSRE RMKRIEEGIK ELGSQILKEH PVENTQLQNE |
| 1021 | KLYLYYLQNG RDMYVDQELD INRLSDYDVD AIVPQSFLKD DSIDNKVLTR SDKNRGKSDN |
| 1081 | VPSEEVVKKM KNYWRQLLNA KLITQRKFDN LTKAERGGLS ELDKAGFIKR QLVETRQITK |
| 1141 | HVAQILDSRM NTKYDENDKL IREVKVITLK SKLVSDFRKD FQFYKVREIN NYHHAHDAYL |
| 1201 | NAVVGTALIK KYPKLESEFV YGDYKVYDVR KMIAKSEQEI GKATAKYFFY SNIMNFFKTE |
| 1261 | ITLANGEIRK RPLIETNGET GEIVWDKGRD FATVRKVLSM PQVNIVKKTE VQTGGFSKES |
| 1321 | ILPKRNSDKL IARKRDWDPK KYGGFDSPTV AYSVLVVAKV EKGKSKKLKS VKELLGITIM |
| 1381 | ERSSFEKNPI DFLEAKGYKE VRKDLIIKLP KYSLFELENG RKRMLASAGE LQKGNELALP |
| 1441 | SKYVNFLYLA SHYEKLKGSP EDNEQKQLFV EQHKHYLDEI IEQISEFSKR VILADANLDK |
| 1501 | VLSAYNKHRD KPIREQAENI IHLFTLTNLG APAAFKYFDT TIDRKRYTST KEVLDATLIH |
| 1561 | QSITGLYETR IDLSQLGGDG SPKKKRKV. |

[0887] In certain embodiments, an exemplary dCas9-Clo051 fusion protein (embodiment 2) may comprise, consist essentially of or consist of, the nucleic acid sequence of (dCas9 sequence derived from Streptoccocus pyogenes):

| (SEQ ID NO: 18048) | |
|---|---|
| 1 | atgcctaaga agaagcggaa ggtggaaggc atcaaaagca acatctccct cctgaaagac |
| 61 | gaactccggg ggcagattag ccacattagt cacgaatacc tctccctcat cgacctggct |
| 121 | ttcgatagca agcagaacag gctctttgag atgaaagtgc tggaactgct cgtcaatgag |
| 181 | tacgggttca agggtcgaca cctcggcgga tctaggaaac cagacggcat cgtgtatagt |
| 241 | accacactgg aagacaactt tgggatcatt gtggatacca aggcatactc tgagggttat |
| 301 | agtctgccca tttcacaggc cgacgagatg gaacggtacg tgcgcgagaa ctcaaataga |
| 361 | gatgaggaag tcaaccctaa caagtggtgg gagaacttct ctgaggaagt gaagaaatac |
| 421 | tacttcgtct ttatcagcgg gtccttcaag ggtaaatttg aggaacagct caggagactg |
| 481 | agcatgacta ccggcgtgaa tggcagcgcc gtcaacgtgg tcaatctgct cctgggcgct |
| 541 | gaaaagattc ggagcggaga gatgaccatc gaagagctgg agagggcaat gtttaataat |
| 601 | agcgagttta tcctgaaata cggtggcggt ggatccgata aaaagtattc tattggttta |
| 661 | gccatcggca ctaattccgt tggatgggct gtcataaccg atgaatacaa agtaccttca |
| 721 | aagaaattta aggtgttggg gaacacagac cgtcattcga ttaaaaagaa tcttatcggt |
| 781 | gccctcctat tcgatagtgg cgaaacggca gaggcgactc gcctgaaacg aaccgctcgg |
| 841 | agaaggtata cacgtcgcaa gaaccgaata tgttacttac aagaaatttt tagcaatgag |
| 901 | atggccaaag ttgacgattc tttctttcac cgtttggaag agtccttcct tgtcgaagag |
| 961 | gacaagaaac atgaacggca ccccatcttt ggaaacatag tagatgaggt ggcatatcat |
| 1021 | gaaaagtacc caacgattta tcacctcaga aaaaagctag ttgactcaac tgataaagcg |
| 1081 | gacctgaggt taatctactt ggctcttgcc catatgataa agttccgtgg gcactttctc |
| 1141 | attgagggtg atctaaatcc ggacaactcg gatgtcgaca aactgttcat ccagttagta |
| 1201 | caaacctata atcagttgtt tgaagagaac cctataaatg caagtggcgt ggatgcgaag |
| 1261 | gctattctta gcgcccgcct ctctaaatcc cgacggctag aaaacctgat cgcacaatta |
| 1321 | cccggagaga agaaaaatgg gttgttcggt aaccttatag cgctctcact aggcctgaca |
| 1381 | ccaaatttta agtcgaactt cgacttagct gaagatgcca aattgcagct tagtaaggac |
| 1441 | acgtacgatg acgatctcga caatctactg gcacaaattg gagatcagta tgcggactta |
| 1501 | tttttggctg ccaaaaacct tagcgatgca atcctcctat ctgacatact gagagttaat |
| 1561 | actgagatta ccaaggcgcc gttatccgct tcaatgatca aaaggtacga tgaacatcac |
| 1621 | caagacttga cacttctcaa ggccctagtc cgtcagcaac tgcctgagaa atataaggaa |
| 1681 | atattctttg atcagtcgaa aaacgggtac gcaggttata ttgacggcgg agcgagtcaa |
| 1741 | gaggaattct acaagtttat caaacccata ttagagaaga tggatgggac ggaagagttg |
| 1801 | cttgtaaaac tcaatcgcga agatctactg cgaaagcagc ggactttcga caacggtagc |
| 1861 | attccacatc aaatccactt aggcgaattg catgctatac ttagaaggca ggaggatttt |
| 1921 | tatccgttcc tcaaagacaa tcgtgaaaag attgagaaaa tcctaacctt tcgcatacct |
| 1981 | tactatgtgg gacccctggc ccgagggaac tctcggttcg catggatgac aagaaagtcc |
| 2041 | gaagaaacga ttactccatg gaattttgag gaagttgtcg ataaaggtgc gtcagctcaa |
| 2101 | tcgttcatcg agaggatgac caactttgac aagaatttac cgaacgaaaa agtattgcct |
| 2161 | aagcacagtt tactttacga gtatttcaca gtgtacaatg aactcacgaa agttaagtat |
| 2221 | gtcactgagg gcatgcgtaa acccgccttt ctaagcggag aacagaagaa agcaatagta |
| 2281 | gatctgttat tcaagaccaa ccgcaaagtg acagttaagc aattgaaaga ggactacttt |
| 2341 | aagaaaattg aatgcttcga ttctgtcgag atctccgggg tagaagatcg atttaatgcg |
| 2401 | tcacttggta cgtatcatga cctcctaaag ataattaaag ataaggactt cctggataac |
| 2461 | gaagagaatg aagatatctt agaagatata gtgttgactc ttaccctctt tgaagatcgg |
| 2521 | gaaatgattg aggaaagact aaaaacatac gctcacctgt tcgacgataa ggttatgaaa |
| 2581 | cagttaaaga ggcgtcgcta tacgggctgg ggacgattgt cgcggaaact tatcaacggg |
| 2641 | ataagagaca agcaaagtgg taaaactatt ctcgattttc taaagagcga cggcttcgcc |
| 2701 | aataggaact ttatgcagct gatccatgat gactctttaa ccttcaaaga ggatatacaa |
| 2761 | aaggcacagg tttccggaca aggggactca ttgcacgaac atattgcgaa tcttgctggt |
| 2821 | tcgccagcca tcaaaaaggg catactccag acagtcaaag tagtggatga gctagttaag |
| 2881 | gtcatgggac gtcacaaacc ggaaaacatt gtaatcgaga tggcacgcga aaatcaaacg |
| 2941 | actcagaagg ggcaaaaaaa cagtcgagag cggatgaaga gaatagaaga gggtattaaa |
| 3001 | gaactgggca gccagatctt aaaggagcat cctgtggaaa atacccaatt gcagaacgag |
| 3061 | aaactttacc tctattacct acaaaatgga agggacatgt atgttgatca ggaactggac |
| 3121 | ataaaccgtt tatctgatta cgacgtcgat gccattgtac cccaatcctt tttgaaggac |
| 3181 | gattcaatcg acaataaagt gcttacacgc tcggataaga accgagggaa aagtgacaat |
| 3241 | gttccaagcg aggaagtcgt aaagaaaatg aagaactatt ggcggcagct cctaaatgcg |
| 3301 | aaactgataa cgcaaagaaa gttcgataac ttaactaaag ctgagagggg tggcttgtct |
| 3361 | gaacttgaca aggccggatt tattaaacgt cagctcgtgg aaacccgcca aatcacaaag |
| 3421 | catgttgcac agatactaga ttcccgaatg aatacgaaat acgacgagaa cgataagctg |
| 3481 | attcgggaag tcaaagtaat cactttaaag tcaaaattgg tgtcggactt cagaaaggat |
| 3541 | tttcaattct ataaagttag ggagataaat aactaccacc atgcgcacga cgcttatctt |
| 3601 | aatgccgtcg tagggaccgc actcattaag aaatacccga agctagaaag tgagtttgtg |
| 3661 | tatggtgatt acaaagttta tgacgtccgt aagatgatcg cgaaaagcga acaggagata |
| 3721 | ggcaaggcta cagccaaata cttcttttat tctaacatta tgaatttctt taagacggaa |
| 3781 | atcactctgg caaacggaga gatacgcaaa cgacctttaa ttgaaaccaa tggggagaca |
| 3841 | ggtgaaatcg tatgggataa gggccgggac ttcgcgacgg tgagaaaagt tttgtccatg |
| 3901 | ccccaagtca acatagtaaa gaaaactgag gtgcagaccg gagggttttc aaaggaatcg |
| 3961 | attcttccaa aaaggaatag tgataagctc atcgctcgta aaaaggactg ggacccgaaa |
| 4021 | aagtacggtg gcttcgatag ccctacagtt gcctattctg tcctagtagt ggcaaaagtt |
| 4081 | gagaagggaa aatccaagaa actgaagtca gtcaaagaat tattggggat aacgattatg |
| 4141 | gagcgctcgt cttttgaaaa gaaccccatc gacttccttg aggcgaaagg ttacaaggaa |
| 4201 | gtaaaaaagg atctcataat taaactacca aagtatagtc tgtttgagtt agaaaatggc |
| 4261 | cgaaaacgga tgttggctag cgccggagag cttcaaaagg ggaacgaact cgcactaccg |
| 4321 | tctaaatacg tgaatttcct gtatttagcg tcccattacg agaagttgaa aggttcacct |
| 4381 | gaagataacg aacagaagca actttttgtt gagcagcaca aacattatct cgacgaaatc |
| 4441 | atagagcaaa tttcggaatt cagtaagaga gtcatcctag ctgatgccaa tctggacaaa |
| 4501 | gtattaagcg catacaacaa gcacagggat aaacccatac gtgagcaggc ggaaaatatt |
| 4561 | atccatttgt ttactcttac caacctcggc gctccagccg cattcaagta ttttgacaca |
| 4621 | acgatagatc gcaaacgata cacttctacc aaggaggtgc tagacgcgac actgattcac |
| 4681 | caatccatca cgggattata tgaaactcgg atagatttgt cacagcttgg gggtgacgga |
| 4741 | tcccccaaga agaagaggaa agtctga. |

[0888] In certain embodiments, the nucleic acid sequence encoding a dCas9-Clo051 fusion protein (embodiment 2) of the disclosure may comprise a DNA. In certain embodiments, the nucleic acid sequence encoding a dCas9-Clo051 fusion protein (embodiment 2) of the disclosure may comprise an RNA.

### EXAMPLES

### Example 1: Knock Down Efficiency of Checkpoint Signaling Proteins on Armored T-Cells

[0889] To create armored T-cells that have enhanced therapeutic potential, genetic modifications may be made in order to render the T-cells less sensitive to immunologic and/or metabolic checkpoints. One mechanism to produce armored T-cells is to inhibit checkpoint signaling is to knockout various checkpoint receptors. The Cas-CLOVER™ platform was used to target and knockout the checkpoint receptors PD-1, TGFβR2, LAG-3, Tim-3, and CTLA-4 in resting (or quiescent) primary pan T cells. As measured by flow cytometry, gene editing resulted in 30-70% loss of protein expression at the cell surface (FIG. 11). These results show that Cas-CLOVER™ is able to efficiently target the knockout of these genes resulting in loss of target protein expression on the T-cell surface. Knockout efficiency can significantly be increased by further optimization of guide RNA pairs, or by using additional guide RNA pairs targeting the same gene and/or regulators or promoters of the target gene.

### Example 2: Strategies for the Expression of Null or Switch Intracellular Signaling Proteins on Armored T-Cells

[0890] Another strategy to produce armored T-cells is to reduce or inhibit endogenous checkpoint signaling by expressing various modified/chimeric checkpoint receptors that have an altered or absent intracellular signaling domain. Checkpoint signals that could be targeted using this strategy include PD-1 or TGFβRII of T-cells, which bind to the PD-L1 ligand and TGFβcytokine, respectively. FIG. 12 shows a schematic diagram of various strategies for producing decoy/null/dominant negative receptor (Null receptors) for two different inhibitory receptors (PD-1 (top panel) and TGFβRII (bottom panel)). To design Null receptors, the intracellular domain (ICD) of PD1 or TGFβRII can be mutated (mutated null) or deleted (truncated null). As a result, binding of the cognate ligand(s) of the null receptor does not result in delivery of the checkpoint signal to the T-cells. Furthermore, since the Null receptor competes with wildtype receptors for binding of the endogenous ligand(s), any binding by the Null receptor sequesters endogenous ligand(s) from binding the wildtype receptor. This results in dilution of the overall level of checkpoint signaling effectively delivered to the T-cell, thus, reducing or blocking checkpoint inhibition. FIG. 12 also shows switch receptor design strategies for the inhibitory receptors PD-1 (top panel) and TGFβRII (bottom panel). In switch receptors, wildtype ICD is replaced with the ICD from either an immuno-stimulatory molecule (Co-stimulatory switch) or a different inhibitory molecule (Inhibitory switch). Immuno-stimulatory molecules include but are not limited to CD3z, CD28, 4-1BB and the examples listed in Table 1. Inhibitory molecules include but are not limited to CTLA4, PD1, Lag3 and the examples listed in Tables 1 and 9. In the former case, binding of the endogenous ligand by the modified switch receptor results in the delivery of a positive signal to the T-cells, thereby helping to enhance stimulation of the T-cell, facilitating continuation of tumor targeting and killing. In the latter case, binding of the endogenous ligand by the modified switch receptor results in the delivery of a negative signal to the T-cells, thereby helping to reduce stimulation and activity of the T-cell.

### Example 3: Enhancing Surface Expression of PD1 and TGFβRII Null or Switch Intracellular Signaling Proteins on Armored T-Cells

[0891] To create armored T-cells, a number of truncated null receptors expressing alternative signal peptides (SP) and transmembrane domains™ designed and tested for maximal expression on the surface of modified T-cells. FIG. 13 shows schematic diagrams of several null receptor constructs for PD-1 (top) and TGFβRII (bottom). Extracellular domains (ECD) of these proteins were modified such that the wildtype signal peptide (SP) and/or the transmembrane domains™ were replaced with that from the human T cell CD8a receptor (red arrows). Each of the six truncated null constructs shown in FIG. 13 were DNA synthesized and then subcloned into an mRNA IVT DNA vector (pRT). High quality mRNA was produced via IVT for each. Transfection of mRNA encoding each of the six molecules was performed using electroporation (EP) delivery into primary human T cells and FACS analysis was performed 24 hours post-EP to evaluate expression level of each construct on the cell surface (FIG. 14). By flow cytometry, replacement of the WT SP with the alternative CD8a (02.8aSP-PD-1 and 02.8aSP-TGFβRII) resulted in the highest level of expression at the T cell surface. 02.8aSP-PD-1 Null receptor exhibited an MFI of 43,680, which is 177-fold higher than endogenous T cell PD-1 expression and 2.8-fold higher than the WT PD-1 Null receptor. 02.8aSP-TGFβRII Null receptor exhibited an MFI of 13,809, which is 102-fold higher than endogenous T cell TGFβRII expression and 1.8-fold higher than the WT TGFβRII Null receptor. These results show that replacement of wildtype SP with the alternative CD8a SP for both PD1 and TGFβRII inhibitory proteins leads to enhanced surface expression of the Null or Switch receptor. This in turn will maximize checkpoint inhibition or co-stimulation, respectively, upon binding of the natural ligand(s).

### Example 4: Design of NF-KB Inducible Vectors for Expression in Modified T-Cells

[0892] Two T cell activation NF-KB inducible vectors were developed (FIGS. 15A and 15B); one with the gene expression system (GES) in the forward orientation (A) and the other in the complementary direction (B), both preceding the constitutive EF1a promoter. These vectors also direct expression of a CAR molecule and a DHFR selection gene, separated by a T2A sequence. Both the conditional NF-KB inducible system and the EF1a directed genes are a part of a piggyBac transposon, which can be permanently integrated into T cells using EP. Once integrated into the genome, the T cells constitutively express the CAR on the membrane surface and the DHFR within the cell, while expression of the NF-KB inducible gene, GFP, will be expressed to the highest level only upon T cell activation.

### Example 5: NF-KB Inducible Vectors for GFP Expression in Modified T-Cells

[0893] T cells were nucleofected with a piggyBac vector expressing an anti-BCMA CAR and a DHFR mutein gene under control of an EF1a promoter along with the absence (No gene expression system (GES) control) or presence of an NF-KB inducible expression system driving GFP expression in either the forward (pNFKB-GFP forward) or reverse orientation (pNFKB-GFP reverse). Cells were cultured in the presence of methotrexate selection until the cells were almost completely resting (Day 19) and GFP expression was assessed at Day 5 and Day 19. At Day 5, all T cells are proliferating and highly stimulated, with cells harboring the NF-KB inducible expression cassette producing high levels of GFP due to strong NFxB activity (see FIG. 16). The No GES control cells did not express detectable levels of GFP. By Day 19, the GES T cells were almost fully resting and GFP expression was significantly lower than Day 5 (~1/8 MFI), since NFxB activity is lower. GFP expression is still observed at Day 19, which may due to the long half-life of GFP protein (~30 hr), or, basal level of NFKB activity through, for example, a TCR, a CAR, a cytokine receptor, or a growth factor receptor signal.

### Example 6: NF-KB Inducible Vectors for Anti-BCMA CAR-Mediated GFP Expression in Modified T-Cells

[0894] T cells were either unmodified (Mock T cells) or nucleofected with a piggyBac vector expressing an anti-BCMA CAR and a DHFR mutein gene under control of an EF1a promoter along with the absence (No GES control) or presence of an NF-KB inducible expression system driving GFP expression in either the forward (pNFKB-GFP forward) or reverse orientation (pNFKB-GFP reverse). All cells were cultured for 22 days, either with or without methotrexate selection (Mock T cells), until the cells were almost completely resting. Cells were then stimulated for 3 days in the absence (No stimulation) or presence of BCMA-(K562), BMCA+(RPMI 8226), or positive control anti-CD3 anti-CD28 activation reagent (CD3/28 stimulation). GFP expression was undetectable under all conditions with the No GES control or Mock T cells. However, while pNFKB-GFP forward- and reverse-transposed cells exhibited little GFP expression over the No stimulation control when cultured with BCMA- K562 cells, they both demonstrated dramatic upregulation of gene expression either in the presence of BCMA+ tumor cells or under positive control conditions (FIG. 17). Little difference in GFP expression was observed between the pNFKB-GFP forward- and reverse-transposed cells that were cocultured with BCMA+ tumor cells.

### Example 7: Control of Anti-BCMA CAR-Mediated Expression in Modified T-Cells

[0895] The expression level of inducible gene can be regulated by the number of response elements upstream or preceding the inducible promoter. T cells were nucleofected with a piggyBac vector encoding an anti-BCMA CARTyrin followed by a selection gene, both under control of a human EF1a promoter (FIG. 18). Further, vectors either additionally encoded the conditional NF-KB inducible gene expression system driving expression of a truncated CD19 protein (dCD19) and included a number of NFKB response elements (RE) varying from 0-5, no GES (No GES), or received an electroporation pulse but no piggyBac nucleic acid (Mock). Data are shown for only the GES in the reverse (opposite) direction/orientation. All cells were cultured for 18 days and included selection for piggyBac-modified T cells using methotrexate addition. Cells were then stimulated for 3 days using anti-CD3 anti-CD28 bead activation reagent and dCD19 surface expression was assessed by FACS at Days 0, 3 and 18, and data are shown as FACS histograms and MFI of target protein staining. Surface dCD19 expression was detected at low levels at Day 0 in all T cells transposed with vectors encoding the GES. At 3 days post-stimulation, dramatic upregulation of dCD19 expression was observed for all T cells expressing the GES, with a greater fold increase in surface expression in those with higher numbers of REs. Thus, surface dCD19 expression was directly proportional with the number of REs encoded in the GES. No dCD19 was detected on the surface of T cells that did not harbor the GES: No GES and Mock controls.

### INCORPORATION BY REFERENCE

[0896] Every document cited herein, including any cross referenced or related patent or application is hereby incorporated herein by reference in its entirety unless expressly excluded or otherwise limited. The citation of any document is not an admission that it is prior art with respect to any invention disclosed or claimed herein or that it alone, or in any combination with any other reference or references, teaches, suggests or discloses any such invention. Further, to the extent that any meaning or definition of a term in this document conflicts with any meaning or definition of the same term in a document incorporated by reference, the meaning or definition assigned to that term in this document shall govern.

### Other Embodiments

[0897] While particular embodiments of the disclosure have been illustrated and described, various other changes and modifications can be made without departing from the spirit and scope of the disclosure. The scope of the appended claims includes all such changes and modifications that are within the scope of this disclosure.

1.-237. (canceled)

238. A composition comprising a polynucleotide comprising a nucleotide sequence encoding a chimeric antigen receptor (CAR) comprising:
(a) an ectodomain comprising an antigen recognition region, wherein the antigen recognition region comprises at least one VH that specifically binds to B-Cell Maturation Antigen (BCMA);
(b) a transmembrane domain, and
(c) an endodomain comprising at least one costimulatory domain;
wherein the VH comprises:
a complementarity determining region 1 (CDR1) comprising an amino acid sequence of SEQ ID NO: 18056;
a complementarity determining region 2 (CDR2) comprising an amino acid sequence of SEQ ID NO: 18060; and
a complementarity determining region 3 (CDR3) comprising an amino acid sequence of SEQ ID NO: 18064.

239. The composition of claim 238, wherein the VH comprises or consists of a recombinant or chimeric sequence.

240. The composition of claim 238, wherein the VH comprises or consists of a human or humanized sequence.

241. The composition of claim 238, wherein the ectodomain of (a) further comprises a signal peptide.

242. The composition of claim 241, wherein the signal peptide comprises an amino acid sequence of a human CD2, CD3δ, CD3ε, CD3γ, CD3ξ, CD4, CD8α, CD19, CD28, 4-1BB or GM-CSFR signal peptide.

243. The composition of claim 242, wherein the signal peptide comprises an amino acid sequence of a human CD8a signal peptide.

244. The composition of claim 243, wherein the human CD8a signal peptide comprises an amino acid sequence of SEQ ID NO: 18012.

245. The composition of claim 238, wherein the ectodomain of (a) further comprises a hinge between the antigen recognition region and the transmembrane domain.

246. The composition of claim 245, wherein the hinge comprises an amino acid sequence of a human CD8α, IgG4, CD4 hinge or any combination thereof.

247. The composition of claim 246, wherein the hinge comprises an amino acid sequence of a human CD8α hinge.

248. The composition of claim 247, wherein the human CD8α hinge comprises an amino acid sequence of SEQ ID NO: 18020.

249. The composition of claim 238, wherein the transmembrane domain comprises an amino acid sequence of a human CD2, CD3δ, CD3ε, CD3γ, CD3ξ, CD4, CD8α, CD19, CD28, 4-1BB or GM-CSFR transmembrane domain.

250. The composition of claim 249, wherein the transmembrane domain comprises an amino acid sequence of a human CD8α transmembrane domain.

251. The composition of claim 250, wherein the human CD8α transmembrane domain comprises an amino acid sequence of SEQ ID NO: 18014.

252. The composition of claim 238, wherein the endodomain comprises an amino acid sequence of a human CD3ξ endodomain.

253. The composition of claim 252, wherein the human CD3ξ endodomain comprises an amino acid sequence of SEQ ID NO: 18016.

254. The composition of claim 238, wherein the at least one costimulatory domain comprises an amino acid sequence of a human 4-1BB, CD28, CD40, ICOS, MyD88, OX-40 intracellular segment, or any combination thereof.

255. The composition of claim 254, wherein the at least one costimulatory domain comprises an amino acid sequence of a human 4-1BB costimulatory domain.

256. The composition of claim 255, wherein the human 4-1BB costimulatory domain comprises an amino acid sequence of SEQ ID NO: 18018.

257. The composition of claim 238, wherein the VH comprises an amino acid sequence of SEQ ID NO: 18051.

258. The composition of claim 238, wherein the CAR comprises amino acids 22-362 of the amino acid sequence of SEQ ID NO: 18006.

259. A method of treating a disease or disorder in a subject in need thereof, comprising administering to the subject a therapeutically effective amount of the composition of claim 238, wherein the disease or disorder is associated with BCMA expression.

260. The method of claim 259, wherein the disease or disorder is a BCMA-positive cancer.

261. The method of claim 259, wherein the disease or disorder is an autoimmune condition, wherein the autoimmune cell is a B cell.

262. A method of treating a disease or disorder in a subject in need thereof, comprising administering to the subject a composition comprising a cell comprising a chimeric antigen receptor (CAR) comprising:
(a) an ectodomain comprising an antigen recognition region, wherein the antigen recognition region comprises at least one VHH domain that specifically binds to B-Cell Maturation Antigen (BCMA), and wherein the VH comprises an amino acid sequence of SEQ ID NO: 18051;
(b) a hinge domain comprising a human CD8α hinge domain comprising the amino acid sequence of SEQ ID NO: 18020;
(c) a human CD8α transmembrane domain comprising the amino acid sequence of SEQ ID NO: 18014; and
(d) an endodomain comprising a human 4-1BB costimulatory domain comprising the amino acid sequence of SEQ ID NO: 18018 and a human CD3ξ endodomain comprising the amino acid sequence of SEQ ID NO: 18016;
and a pharmaceutically acceptable carrier
wherein the disease or disorder is associated with BCMA expression.

The application's sequence listing, which the Patent Office published only in electronic form, follows.

SEQUENCE LISTING (18080 sequences)

SEQ ID NO: 1 - protein, 306 aa, Homo sapiens
LTCQAHLETPDFQLFKNGVAQEPVHLDSPAIKHQFLLTGDTQGRYRCRSGLSTGWTQLSKLLELTGPKSLPAPWLSMAPVSWITPGLKTTAVCRGVLRGVTFLLRREGDHEFLEVPEAQEDVEATFPVHQPGNYSCSYRTDGEGALSEPSATVTIEELGPGPGSWPHGCLGLMVAKEFGQRMPKEWKAAPPPPVLMHHGESSQVLHPGNKVTLTCVAPLSGVDFQLRRGEKELLVPRSSTSPDRIFFHLNAVALGDGGHYTCRYRLHDNQNGWSGDSAPVELILSDETLPAPEFSPEPESGRALRL

SEQ ID NO: 2 - protein, 495 aa, Homo sapiens
MSMLVVFLLLWGVTWGPVTEAAIFYETQPSLWAESESLLKPLANVTLTCQAHLETPDFQLFKNGVAQEPVHLDSPAIKHQFLLTGDTQGRYRCRSGLSTGWTQLSKLLELTGPKSLPAPWLSMAPVSWITPGLKTTAVCRGVLRGVTFLLRREGDHEFLEVPEAQEDVEATFPVHQPGNYSCSYRTDGEGALSEPSATVTIEELAAPPPPVLMHHGESSQVLHPGNKVTLTCVAPLSGVDFQLRRGEKELLVPRSSTSPDRIFFHLNAVALGDGGHYTCRYRLHDNQNGWSGDSAPVELILSDETLPAPEFSPEPESGRALRLRCLAPLEGARFALVREDRGGRRVHRFQSPAGTEALFELHNISVADSANYSCVYVDLKPPFGGSAPSERLELHVDGPPPRPQLRATWSGAVLAGRDAVLRCEGPIPDVTFELLREGETKAVKTVRTPGAAANLELIFVGPQHAGNYRCRYRSWVPHTFESELSDPVELLVAES

SEQ ID NO: 3 - protein, 90 aa, Homo sapiens
MGKNKLLHPSLVLLLLVLLPTDASVSGKPQYMVLVPSLLHTETTEKGCVLLSYLNETVTVSASLESVRGNRSLFTDLEAENDVLHCVAFA

SEQ ID NO: 4 - protein, 168 aa, Homo sapiens
MGKNKLLHPSLVLLLLVLLPTDASVSGKPQYMVLVPSLLHTETTEKGCVLLSYLNETVTVSASLESVRGNRSLFTDLEAENDVLHCVAFAVPKSSSNEEVMFLTVQVKGPTQEFKKRTTVMVKNEDSLVFVQTDKSIYKPGQTVKFRVVSMDENFHPLNELIPLVYIQ

SEQ ID NO: 5 - protein, 1474 aa, Homo sapiens
MGKNKLLHPSLVLLLLVLLPTDASVSGKPQYMVLVPSLLHTETTEKGCVLLSYLNETVTVSASLESVRGNRSLFTDLEAENDVLHCVAFAVPKSSSNEEVMFLTVQVKGPTQEFKKRTTVMVKNEDSLVFVQTDKSIYKPGQTVKFRVVSMDENFHPLNELIPLVYIQDPKGNRIAQWQSFQLEGGLKQFSFPLSSEPFQGSYKVVVQKKSGGRTEHPFTVEEFVLPKFEVQVTVPKIITILEEEMNVSVCGLYTYGKPVPGHVTVSICRKYSDASDCHGEDSQAFCEKFSGQLNSHGCFYQQVKTKVFQLKRKEYEMKLHTEAQIQEEGTVVELTGRQSSEITRTITKLSFVKVDSHFRQGIPFFGQVRLVDGKGVPIPNKVIFIRGNEANYYSNATTDEHGLVQFSINTTNVMGTSLTVRVNYKDRSPCYGYQWVSEEHEEAHHTAYLVFSPSKSFVHLEPMSHELPCGHTQTVQAHYILNGGTLLGLKKLSFYYLIMAKGGIVRTGTHGLLVKQEDMKGHFSISIPVKSDIAPVARLLIYAVLPTGDVIGDSAKYDVENCLANKVDLSFSPSQSLPASHAHLRVTAAPQSVCALRAVDQSVLLMKPDAELSASSVYNLLPEKDLTGFPGPLNDQDNEDCINRHNVYINGITYTPVSSTNEKDMYSFLEDMGLKAFTNSKIRKPKMCPQLQQYEMHGPEGLRVGFYESDVMGRGHARLVHVEEPHTETVRKYFPETWIWDLVVVNSAGVAEVGVTVPDTITEWKAGAFCLSEDAGLGISSTASLRAFQPFFVELTMPYSVIRGEAFTLKATVLNYLPKCIRVSVQLEASPAFLAVPVEKEQAPHCICANGRQTVSWAVTPKSLGNVNFTVSAEALESQELCGTEVPSVPEHGRKDTVIKPLLVEPEGLEKETTFNSLLCPSGGEVSEELSLKLPPNVVEESARASVSVLGDILGSAMQNTQNLLQMPYGCGEQNMVLFAPNIYVLDYLNETQQLTPEIKSKAIGYLNTGYQRQLNYKHYDGSYSTFGERYGRNQGNTWLTAFVLKTFAQARAYIFIDEAHITQALIWLSQRQKDNGCFRSSGSLLNNAIKGGVEDEVTLSAYITIALLEIPLTVTHPVVRNALFCLESAWKTAQEGDHGSHVYTKALLAYAFALAGNQDKRKEVLKSLNEEAVKKDNSVHWERPQKPKAPVGHFYEPQAPSAEVEMTSYVLLAYLTAQPAPTSEDLTSATNIVKWITKQQNAQGGFSSTQDTVVALHALSKYGAATFTRTGKAAQVTIQSSGTFSSKFQVDNNNRLLLQQVSLPELPGEYSMKVTGEGCVYLQTSLKYNILPEKEEFPFALGVQTLPQTCDEPKAHTSFQISLSVSYTGSRSASNMAIVDVKMVSGFIPLKPTVKMLERSNHVSRTEVSSNHVLIYLDKVSNQTLSLFFTVLQDVPVRDLKPAIVKVYDYYETDEFAIAEYNAPCSKDLGNA

SEQ ID NO: 6 - protein, 73 aa, Homo sapiens
NGGTLLGLKKLSFYYLIMAKGGIVRTGTHGLLVKQEDMKGHFSISIPVKSDIAPVARFTTCYQKRTSLASLGL

SEQ ID NO: 7 - protein, 183 aa, Homo sapiens
MLGELIGKGSLVMEGQKHLNSKKKGLKASFSLSLTFTSRLAPDPSLVIYAIFPSGGVVADKIQFSVEMCFDNQVSLGFSPSQQLPGAEVELQLQAAPGSLCALRAVDESVLLLRPDRELSNRSVYGMFPFWYGHYPYQVAEYDQCPVSGPWDFPQPLIDPMPQGHSSQRSIIWRPSFSEGTDL

SEQ ID NO: 8 - protein, 963 aa, Homo sapiens
MLIGKGSLVMEGQKHLNSKKKGLKASFSLSLTFTSRLAPDPSLVIYAIFPSGGVVADKIQFSVEMCFDNQVSLGFSPSQQLPGAEVELQLQAAPGSLCALRAVDESVLLLRPDRELSNRSVYGMFPFWYGHYPYQVAEYDQCPVSGPWDFPQPLIDPMPQGHSSQRSIIWRPSFSEGTDLFSFFRDVGLKILSNAKIKKPVDCSHRSPEYSTAMGAGGGHPEAFESSTPLHQAEDSQVRQYFPETWLWDLFPIGNSGKEAVHVTVPDAITEWKAMSFCTSQSRGFGLSPTVGLTAFKPFFVDLTLPYSVVRGESFRLTATIFNYLKDCIRVQTDLAKSHEYQLESWADSQTSSCLCADDAKTHHWNITAVKLGHINFTISTKILDSNEPCGGQKGFVPQKGRSDTLIKPVLVKPEGVLVEKTHSSLLCPKGKVASESVSLELPVDIVPDSTKAYVTVLGDIMGTALQNLDGLVQMPSGCGEQNMVLFAPIIYVLQYLEKAGLLTEEIRSRAVGFLEIGYQKELMYKHSNGSYSAFGERDGNGNTWLTAFVTKCFGQAQKFIFIDPKNIQDALKWMAGNQLPSGCYANVGNLLHTAMKGGVDDEVSLTAYVTAALLEMGKDVDDPMVSQGLRCLKNSATSTTNLYTQALLAYIFSLAGEMDIRNILLKQLDQQAIISGESIYWSQKPTPSSNASPWSEPAAVDVELTAYALLAQLTKPSLTQKEIAKATSIVAWLAKQHNAYGGFSSTQDTVVALQALAKYATTAYMPSEEINLVVKSTENFQRTFNIQSVNRLVFQQDTLPNVPGMYTLEASGQGCVYVQTVLRYNILPPTNMKTFSLSVEIGKARCEQPTSPRSLTLTIHTSYVGSRSSSNMAIVEVKMLSGFSPMEGTNQLLLQQPLVKKVEFGTDTLNIYLDELIKNTQTYTFTISQSVLVTNLKPATIKVYDYYLPDEQATIQYSDPCE

SEQ ID NO: 9 - protein, 81 aa, Homo sapiens
MVRNNFYAVRLLPSTCVVLSQTSNCRRSHQDPLAASCICQASGCWLIGKGSLVMEGQKHLNSKKKGLKASFSLSLTFTSRL

SEQ ID NO: 10 - protein, 1454 aa, Homo sapiens
MWAQLLLGMLALSPAIAEELPNYLVTLPARLNFPSVQKVCLDLSPGYSDVKFTVTLETKDKTQKLLEYSGLKKRHLHCISFLVPPPAGGTEEVATIRVSGVGNNISFEEKKKVLIQRQGNGTFVQTDKPLYTPGQQVYFRIVTMDSNFVPVNDKYSMVELQDPNSNRIAQWLEVVPEQGIVDLSFQLAPEAMLGTYTVAVAEGKTFGTFSVEEYVLPKFKVEVVEPKELSTVQESFLVKICCRYTYGKPMLGAVQVSVCQKANTYWYREVEREQLPDKCRNLSGQTDKTGCFSAPVDMATFDLIGYAYSHQINIVATVVEEGTGVEANATQNIYISPQMGSMTFEDTSNFYHPNFPFSGKIRVRGHDDSFLKNHLVFLVIYGTNGTFNQTLVTDNNGLAPFTLETSGWNGTDVSLEGKFQMEDLVYNPEQVPRYYQNAYLHLRPFYSTTRSFLGIHRLNGPLKCGQPQEVLVDYYIDPADASPDQEISFSYYLIGKGSLVMEGQKHLNSKKKGLKASFSLSLTFTSRLAPDPSLVIYAIFPSGGVVADKIQFSVEMCFDNQVSLGFSPSQQLPGAEVELQLQAAPGSLCALRAVDESVLLLRPDRELSNRSVYGMFPFWYGHYPYQVAEYDQCPVSGPWDFPQPLIDPMPQGHSSQRSIIWRPSFSEGTDLFSFFRDVGLKILSNAKIKKPVDCSHRSPEYSTAMGAGGGHPEAFESSTPLHQAEDSQVRQYFPETWLWDLFPIGNSGKEAVHVTVPDAITEWKAMSFCTSQSRGFGLSPTVGLTAFKPFFVDLTLPYSVVRGESFRLTATIFNYLKDCIRVQTDLAKSHEYQLESWADSQTSSCLCADDAKTHHWNITAVKLGHINFTISTKILDSNEPCGGQKGFVPQKGRSDTLIKPVLVKPEGVLVEKTHSSLLCPKGKVASESVSLELPVDIVPDSTKAYVTVLGDIMGTALQNLDGLVQMPSGCGEQNMVLFAPIIYVLQYLEKAGLLTEEIRSRAVGFLEIGYQKELMYKHSNGSYSAFGERDGNGNTWLTAFVTKCFGQAQKFIFIDPKNIQDALKWMAGNQLPSGCYANVGNLLHTAMKGGVDDEVSLTAYVTAALLEMGKDVDDPMVSQGLRCLKNSATSTTNLYTQALLAYIFSLAGEMDIRNILLKQLDQQAIISGESIYWSQKPTPSSNASPWSEPAAVDVELTAYALLAQLTKPSLTQKEIAKATSIVAWLAKQHNAYGGFSSTQDTVVALQALAKYATTAYMPSEEINLVVKSTENFQRTFNIQSVNRLVFQQDTLPNVPGMYTLEASGQGCVYVQTVLRYNILPPTNMKTFSLSVEIGKARCEQPTSPRSLTLTIHTSYVGSRSSSNMAIVEVKMLSGFSPMEGTNQLLLQQPLVKKVEFGTDTLNIYLDELIKNTQTYTFTISQSVLVTNLKPATIKVYDYYLPDEQATIQYSDPCE

SEQ ID NO: 11 - protein, 1004 aa, Homo sapiens
SFLGIHRLNGPLKCGQPQEVLVDYYIDPADASPDQEISFSYYLIGKGSLVMEGQKHLNSKKKGLKASFSLSLTFTSRLAPDPSLVIYAIFPSGGVVADKIQFSVEMCFDNQVSLGFSPSQQLPGAEVELQLQAAPGSLCALRAVDESVLLLRPDRELSNRSVYGMFPFWYGHYPYQVAEYDQCPVSGPWDFPQPLIDPMPQGHSSQRSIIWRPSFSEGTDLFSFFRDVGLKILSNAKIKKPVDCSHRSPEYSTAMGAGGGHPEAFESSTPLHQAEDSQVRQYFPETWLWDLFPIGNSGKEAVHVTVPDAITEWKAMSFCTSQSRGFGLSPTVGLTAFKPFFVDLTLPYSVVRGESFRLTATIFNYLKDCIRVQTDLAKSHEYQLESWADSQTSSCLCADDAKTHHWNITAVKLGHINFTISTKILDSNEPCGGQKGFVPQKGRSDTLIKPVLVKPEGVLVEKTHSSLLCPKGKVASESVSLELPVDIVPDSTKAYVTVLGDIMGTALQNLDGLVQMPSGCGEQNMVLFAPIIYVLQYLEKAGLLTEEIRSRAVGFLEIGYQKELMYKHSNGSYSAFGERDGNGNTWLTAFVTKCFGQAQKFIFIDPKNIQDALKWMAGNQLPSGCYANVGNLLHTAMKGGVDDEVSLTAYVTAALLEMGKDVDDPMVSQGLRCLKNSATSTTNLYTQALLAYIFSLAGEMDIRNILLKQLDQQAIISGESIYWSQKPTPSSNASPWSEPAAVDVELTAYALLAQLTKPSLTQKEIAKATSIVAWLAKQHNAYGGFSSTQDTVVALQALAKYATTAYMPSEEINLVVKSTENFQRTFNIQSVNRLVFQQDTLPNVPGMYTLEASGQGCVYVQTVLRYNILPPTNMKTFSLSVEIGKARCEQPTSPRSLTLTIHTSYVGSRSSSNMAIVEVKMLSGFSPMEGTNQLLLQQPLVKKVEFGTDTLNIYLDELIKNTQTYTFTISQSVLVTNLKPATIKVYDYYLPDEQATIQYSDPCE

SEQ ID NO: 12 - protein, 182 aa, Homo sapiens
  SITE 1: note = misc_feature - Xaa can be any naturally occurring amino acid
XRTFNIQSVNRLVFQQDTLPNVPGMYTLEASGQGCVYVQTVLRYNILPPTNMKTFSLSVEIGKARCEQPTSPRSLTLTIHTSYVGSRSSSNMAIVEVKMLSGFSPMEGTNQLLLQQPLVKKVEFGTDTLNIYLDELIKNTQTYTFTISQSVLVTNLKPATIKVYDYYLPDEQATIQYSDPCE

SEQ ID NO: 13 - protein, 340 aa, Homo sapiens
MRKELQLSLSVTLLLVCGFLYQFTLKSSCLFCLPSFKSHQGLEALLSHRRGIVFLETSERMEPPHLVSCSVESAAKIYPEWPVVFFMKGLTDSTPMPSNSTYPAFSFLSAIDNVFLFPLDMKRLLEDTPLFSWYNQINASAERNWLHISSDASRLAIIWKYGGIYMDTDVISIRPIPEENFLAAQASRYSSNGIFGFLPHHPFLWECMENFVEHYNSAIWGNQGPELMTRMLRVWCKLEDFQEVSDLRCLNISFLHPQRFYPISYREWRRYYEVWDTEPSFNVSYALHLWNHMNQEGRAVIRGSNTLVENLYRKHCPRTYRDLIKGPEGSVTGELGPGNK

SEQ ID NO: 14 - protein, 401 aa, Homo sapiens
MGLKALCLGLLCVLFVSHFYTPMPDNIEESWKIMALDAIAKTCTFTAMCFENMRIMRYEEFISMIFRLDYTQPLSDEYITVTDTTFVDIPVRLYLPKRKSETRRRAVIYFHGGGFCFGSSKQRAFDFLNRWTANTLDAVVVGVDYRLAPQHHFPAQFEDGLAAVKFFLLEKILTKYGVDPTRICIAGDSSGGNLATAVTQQVQNDAEIKHKIKMQVLLYPGLQITDSYLPSHRENEHGIVLTRDVAIKLVSLYFTKDEALPWAMRRNQHMPLESRHLFKFVNWSILLPEKYRKDYVYTEPILGGLSYSLPGLTDSRALPLLANDSQLQNLPLTYILTCQHDLLRDDGLMYVTRLRNVGVQVVHEHIEDGIHGALSFMTSPFYLRLGLRIRDMYVSWLDKNL

SEQ ID NO: 15 - protein, 53 aa, Homo sapiens
MGLKALCLGLLCVLFVSHFYTPMPDNIEESWKIMALDAIAKTCTFTNRGLLTS

SEQ ID NO: 16 - protein, 252 aa, Homo sapiens
MEPQSMKGQKRPFGGPWRLKVLGGPPWLRRTLPKLGRPKEAPVARMSTQSTHPLKPEAPRLPPGIPESPSCQRRHTLPASEFRCLTPEDAVSAFEIEREAFISVLGVCPLYLDEIRHFLTLCPELSLGWFEEGCLVAFIIGSLWDKERLMQESLTLHRSGGHIAHLHVLAVHRAFRQQGRGPILLWRYLHHLGSQPAVRRAALMCEDALVPFYERFSFHAVGPCAITVGSLTFMELHCSLRGHPFLRRNSGC

SEQ ID NO: 17 - protein, 152 aa, Homo sapiens [sequence omitted]

SEQ ID NO: 18 - protein, 207 aa, Homo sapiens
MSTQSTHPLKPEAPRLPPGIPESPSCQRRHTLPASEFRCLTPEDAVSAFEIEREAFISVLGVCPLYLDEIRHFLTLCPELSLGWFEEGCLVAFIIGSLWDKERLMQESLTLHRSGGHIAHLHVLAVHRAFRQQGRGPILLWRYLHHLGSQPAVRRAALMCEDALVPFYERFSFHAVGPCAITVGSLTFMELHCSLRGHPFLRRNSGC

SEQ ID NO: 19 - protein, 92 aa, Homo sapiens
MSTQSTHPLKPEAPRLPPGIPESPSCQRRHTLPASEFRCLTPEDAVSAFEIEREDSGREAQRLPVTHLSLLPQPSSPSWASAPCTWMRSGTS

SEQ ID NO: 20 - protein, 257 aa, Homo sapiens
MACLMAAFSVGTAMNASSYSAEMTEPKSVCVSVDEVVSSNMEATETDLLNGHLKKVDNNLTEAQRFSSLPRRAAVNIEFRDLSYSVPEGPWWRKKGYKTLLKGISGKFNSGELVAIMGPSGAGKSTLMNILAGYRETGMKGAVLINGLPRDLRCFRKVSCYIMQDDMLLPHLTVQEAMMVKEILTALGLLSCANTRTGSLSGGQRKRLAIALELVNNPPVMFFDEPTSGLDSASCFQVVSLMKGLAQGGRSIICTIH

SEQ ID NO: 21 - protein, 678 aa, Homo sapiens
MACLMAAFSVGTAMNASSYSAEMTEPKSVCVSVDEVVSSNMEATETDLLNGHLKKVDNNLTEAQRFSSLPRRAAVNIEFRDLSYSVPEGPWWRKKGYKTLLKGISGKFNSGELVAIMGPSGAGKSTLMNILAGYRETGMKGAVLINGLPRDLRCFRKVSCYIMQDDMLLPHLTVQEAMMVSAHLKLQEKDEGRREMVKEILTALGLLSCANTRTGSLSGGQRKRLAIALELVNNPPVMFFDEPTSGLDSASCFQVVSLMKGLAQGGRSIICTIHQPSAKLFELFDQLYVLSQGQCVYRGKVCNLVPYLRDLGLNCPTYHNPADFVMEVASGEYGDQNSRLVRAVREGMCDSDHKRDLGGDAEVNPFLWHRPSEEVKQTKRLKGLRKDSSSMEGCHSFSASCLTQFCILFKRTFLSIMRDSVLTHLRITSHIGIGLLIGLLYLGIGNEAKKVLSNSGFLFFSMLFLMFAALMPTVLTFPLEMGVFLREHLNYWYSLKAYYLAKTMADVPFQIMFPVAYCSIVYWMTSQPSDAVRFVLFAALGTMTSLVAQSLGLLIGAASTSLQVATFVGPVTAIPVLLFSGFFVSFDTIPTYLQWMSYISYVRYGFEGVILSIYGLDREDLHCDIDETCHFQKSEAILRELDVENAKLYLDFIVLGIFFISLRLIAYFVLRYKIRAER

SEQ ID NO: 22 - protein, 666 aa, Homo sapiens
MACLMAAFSVGTAMNASSYSAEMTEPKSVCVSVDEVVSSNMEATETDLLNGHLKKVDNNLTEAQRFSSLPRRAAVNIEFRDLSYSVPEGPWWRKKGYKTLLKGISGKFNSGELVAIMGPSGAGKSTLMNILAGYRETGMKGAVLINGLPRDLRCFRKVSCYIMQDDMLLPHLTVQEAMMVSAHLKLQEKDEGRREMVKEILTALGLLSCANTRTGSLSGGQRKRLAIALELVNNPPVMFFDEPTSGLDSASCFQVVSLMKGLAQGGRSIICTIHQPSAKLFELFDQLYVLSQGQCVYRGKVCNLVPYLRDLGLNCPTYHNPADFVMEVASGEYGDQNSRLVRAVREGMCDSDHKRDLGGDAEVNPFLWHRPSEEDSSSMEGCHSFSASCLTQFCILFKRTFLSIMRDSVLTHLRITSHIGIGLLIGLLYLGIGNEAKKVLSNSGFLFFSMLFLMFAALMPTVLTFPLEMGVFLREHLNYWYSLKAYYLAKTMADVPFQIMFPVAYCSIVYWMTSQPSDAVRFVLFAALGTMTSLVAQSLGLLIGAASTSLQVATFVGPVTAIPVLLFSGFFVSFDTIPTYLQWMSYISYVRYGFEGVILSIYGLDREDLHCDIDETCHFQKSEAILRELDVENAKLYLDFIVLGIFFISLRLIAYFVLRYKIRAER

SEQ ID NO: 23 - protein, 663 aa, Homo sapiens
MIMRLPQPHGTNASSYSAEMTEPKSVCVSVDEVVSSNMEATETDLLNGHLKKVDNNLTEAQRFSSLPRRAAVNIEFRDLSYSVPEGPWWRKKGYKTLLKGISGKFNSGELVAIMGPSGAGKSTLMNILAGYRETGMKGAVLINGLPRDLRCFRKVSCYIMQDDMLLPHLTVQEAMMVSAHLKLQEKDEGRREMVKEILTALGLLSCANTRTGSLSGGQRKRLAIALELVNNPPVMFFDEPTSGLDSASCFQVVSLMKGLAQGGRSIICTIHQPSAKLFELFDQLYVLSQGQCVYRGKVCNLVPYLRDLGLNCPTYHNPADFVMEVASGEYGDQNSRLVRAVREGMCDSDHKRDLGGDAEVNPFLWHRPSEEDSSSMEGCHSFSASCLTQFCILFKRTFLSIMRDSVLTHLRITSHIGIGLLIGLLYLGIGNEAKKVLSNSGFLFFSMLFLMFAALMPTVLTFPLEMGVFLREHLNYWYSLKAYYLAKTMADVPFQIMFPVAYCSIVYWMTSQPSDAVRFVLFAALGTMTSLVAQSLGLLIGAASTSLQVATFVGPVTAIPVLLFSGFFVSFDTIPTYLQWMSYISYVRYGFEGVILSIYGLDREDLHCDIDETCHFQKSEAILRELDVENAKLYLDFIVLGIFFISLRLIAYFVLRYKIRAER

SEQ ID NO: 24 - protein, 824 aa, Homo sapiens
MLAVQQTEHLPACPPARRWSSNFCPESTEGGPSLLGLRDMVRRGWSVCTAILLARLWCLVPTHTFLSEYPEAAEYPHPGWVYWLQMAVAPGHLRAWVMRNNVTTNIPSAFSGTLTHEEKAVLTVFTGTATAVHVQVAALASAKLESSVFVTDCVSCKIENVCDSALQGKRVPMSGLQGSSIVIMPPSNRPLASAASCTWSVQVQGGPHHLGVVAISGKVLSAAHGAGRAYGWGFPGDPMEEGYKTLLKGISGKFNSGELVAIMGPSGAGKSTLMNILAGYRETGMKGAVLINGLPRDLRCFRKVSCYIMQDDMLLPHLTVQEAMMVSAHLKLQEKDEGRREMVKEILTALGLLSCANTRTGSLSGGQRKRLAIALELVNNPPVMFFDEPTSGLDSASCFQVVSLMKGLAQGGRSIICTIHQPSAKLFELFDQLYVLSQGQCVYRGKVCNLVPYLRDLGLNCPTYHNPADFVMEVASGEYGDQNSRLVRAVREGMCDSDHKRDLGGDAEVNPFLWHRPSEEVKQTKRLKGLRKDSSSMEGCHSFSASCLTQFCILFKRTFLSIMRDSVLTHLRITSHIGIGLLIGLLYLGIGNEAKKVLSNSGFLFFSMLFLMFAALMPTVLTFPLEMGVFLREHLNYWYSLKAYYLAKTMADVPFQIMFPVAYCSIVYWMTSQPSDAVRFVLFAALGTMTSLVAQSLGLLIGAASTSLQVATFVGPVTAIPVLLFSGFFVSFDTIPTYLQWMSYISYVRYGFEGVILSIYGLDREDLHCDIDETCHFQKSEAILRELDVENAKLYLDFIVLGIFFISLRLIAYFVLRYKIRAER

SEQ ID NO: 25 - protein, 668 aa, Homo sapiens
MLGTQGWTKQRKPCPQNASSYSAEMTEPKSVCVSVDEVVSSNMEATETDLLNGHLKKVDNNLTEAQRFSSLPRRAAVNIEFRDLSYSVPEGPWWRKKGYKTLLKGISGKFNSGELVAIMGPSGAGKSTLMNILAGYRETGMKGAVLINGLPRDLRCFRKVSCYIMQDDMLLPHLTVQEAMMVSAHLKLQEKDEGRREMVKEILTALGLLSCANTRTGSLSGGQRKRLAIALELVNNPPVMFFDEPTSGLDSASCFQVVSLMKGLAQGGRSIICTIHQPSAKLFELFDQLYVLSQGQCVYRGKVCNLVPYLRDLGLNCPTYHNPADFVMEVASGEYGDQNSRLVRAVREGMCDSDHKRDLGGDAEVNPFLWHRPSEEDSSSMEGCHSFSASCLTQFCILFKRTFLSIMRDSVLTHLRITSHIGIGLLIGLLYLGIGNEAKKVLSNSGFLFFSMLFLMFAALMPTVLTFPLEMGVFLREHLNYWYSLKAYYLAKTMADVPFQIMFPVAYCSIVYWMTSQPSDAVRFVLFAALGTMTSLVAQSLGLLIGAASTSLQVATFVGPVTAIPVLLFSGFFVSFDTIPTYLQWMSYISYVRYGFEGVILSIYGLDREDLHCDIDETCHFQKSEAILRELDVENAKLYLDFIVLGIFFISLRLIAYFVLRYKIRAER

SEQ ID NO: 26 - protein, 677 aa, Homo sapiens
MRISLPRAPERDGGVSASSLLDTVTNASSYSAEMTEPKSVCVSVDEVVSSNMEATETDLLNGHLKKVDNNLTEAQRFSSLPRRAAVNIEFRDLSYSVPEGPWWRKKGYKTLLKGISGKFNSGELVAIMGPSGAGKSTLMNILAGYRETGMKGAVLINGLPRDLRCFRKVSCYIMQDDMLLPHLTVQEAMMVSAHLKLQEKDEGRREMVKEILTALGLLSCANTRTGSLSGGQRKRLAIALELVNNPPVMFFDEPTSGLDSASCFQVVSLMKGLAQGGRSIICTIHQPSAKLFELFDQLYVLSQGQCVYRGKVCNLVPYLRDLGLNCPTYHNPADFVMEVASGEYGDQNSRLVRAVREGMCDSDHKRDLGGDAEVNPFLWHRPSEEDSSSMEGCHSFSASCLTQFCILFKRTFLSIMRDSVLTHLRITSHIGIGLLIGLLYLGIGNEAKKVLSNSGFLFFSMLFLMFAALMPTVLTFPLEMGVFLREHLNYWYSLKAYYLAKTMADVPFQIMFPVAYCSIVYWMTSQPSDAVRFVLFAALGTMTSLVAQSLGLLIGAASTSLQVATFVGPVTAIPVLLFSGFFVSFDTIPTYLQWMSYISYVRYGFEGVILSIYGLDREDLHCDIDETCHFQKSEAILRELDVENAKLYLDFIVLGIFFISLRLIAYFVLRYKIRAER

SEQ ID NO: 27 - protein, 177 aa, Homo sapiens
MAPGQTPSLCSWLLPLPSTWATTGHVCFSDILQTPDGGQLLLDWAKQPDSSQDPDPTTQPIVLLLPGITGSSQETYVLHLVNQALRDGYQAVVFNNRGCRGEELRTHRAFCASNTEDLETVVNHIKHRYPQAPLLAVGISFGGILVLNHLAQARQAAGLVAALTLSACWDSFETTRS

SEQ ID NO: 28 - protein, 102 aa, Homo sapiens
MAPGQTPSLCSWLLPLPSTWATTGHVCFSDILQTPDGGQLLLDWAKQPDSSQDPDPTTQPIVLLLPGITGSSQETYVLHLVNQALRDGYQPTGLFVPAILKI

SEQ ID NO: 29 - protein, 405 aa, Homo sapiens
MLSSFLSPQNGTWADTFSLLLALAVALYLGYYWACVLQRPRLVAGPQFLAFLEPHCSITTETFYPTLWCFEGRLQSIFQVLLQSQPLVLYQSDILQTPDGGQLLLDWAKQPDSSQDPDPTTQPIVLLLPGITGSSQETYVLHLVNQALRDGYQAVVFNNRGCRGEELRTHRAFCASNTEDLETVVNHIKHRYPQAPLLAVGISFGGILVLNHLAQARQAAGLVAALTLSACWDSFETTRSLETPLNSLLFNQPLTAGLCQLVERNRKVIEKVVDIDFVLQARTIRQFDERYTSVAFGYQDCVTYYKAASPRTKIDAIRIPVLYLSAADDPFSPVCALPIQAAQHSPYVALLITARGGHIGFLEGLLPWQHWYMSRLLHQYAKAIFQDPEGLPDLRALLPSEDRNS

SEQ ID NO: 30 - protein, 305 aa, Homo sapiens
MLSSFLSPQNGTWADTFSLLLALAVALYLGYYWACVLQRPRLVAGPQFLAFLEPHCSITTETFYPTLWCFEGRLQSIFQVLLQSQPLVLYQSDILQTPDGGQLLLDWAKQPDSSQDPDPTTQPIVLLLPGITGSSQETYVLHLVNQALRDGYQAVVFNNRGCRGEELRTHRAFCASNTEDLETVVNHIKHRYPQAPLLAVGISFGGILVLNHLAQARQAAGLVAALTLSACWDSFETTRSLETPLNSLLFNQPLTAGLCQLVERLSYGKTCRPVQSASLMSATHLWPLDIKTVLPTTKQQALEPR

SEQ ID NO: 31 - protein, 305 aa, Homo sapiens; identical to SEQ ID NO: 30

SEQ ID NO: 32 - protein, 205 aa, Homo sapiens
MAVARLAAVAAWVPCRSWGWAAVPFGPHRGLSVLLARIPQRAPRWLPACRQKTSLSFLNRPDLPNLAYKKLKGKSPGIIFIPGYLSYMNGTKALAIEEFCKSLGHACIRFDYSGVGSSDGNSEESTLGKWRKDVLSIIDDLADGPQILVGSSLGGWLMLHAAIARPEKVVALIGVATAADTLVTKFNQLPVEDSGRKNYISLHSA

SEQ ID NO: 33 - protein, 306 aa, Homo sapiens
MAVARLAAVAAWVPCRSWGWAAVPFGPHRGLSVLLARIPQRAPRWLPACRQKTSLSFLNRPDLPNLAYKKLKGKSPGIIFIPGYLSYMNGTKALAIEEFCKSLGHACIRFDYSGVGSSDGNSEESTLGKWRKDVLSIIDDLADGPQILVGSSLGGWLMLHAAIARPEKVVALIGVATAADTLVTKFNQLPVELKKEVEMKGVWSMPSKYSEEGVYNVQYSFIKEAEHHCLLHSPIPVNCPIRLLHGMKDDIVPWHTSMQVADRVLSTDVDVILRKHSDHRMREKADIQLLVYTIDDLIDKLSTIVN

SEQ ID NO: 34 - protein, 52 aa, Homo sapiens
MAVARLAAVAAWVPCRSWGWAAVPFGPHRGLSVLLARIPQRAPRWLPDSCWI

SEQ ID NO: 35 - protein, 75 aa, Homo sapiens
MAVARLAAVAAWVPCRSWGWAAVPFGPHRGLSVLLARIPQRAPRWLPGLITQELEVQMVTQRKAHWGNGEKMFFL

SEQ ID NO: 36 - protein, 229 aa, Homo sapiens [sequence omitted]

SEQ ID NO: 37 - protein, 225 aa, Homo sapiens [sequence omitted]

SEQ ID NO: 38 - protein, 153 aa, Homo sapiens [sequence omitted]

SEQ ID NO: 39 - protein, 124 aa, Homo sapiens
MVGALCGCWFRLGGARPLIPLGPTVVQTSMSRSQVALLGLSLLLMLLLYVGLPGPPEQTSCLWGDPNVTVLAGLTPGNSPIFYREVLPLNQAHRLQPLSCMESWTTSWLESHCGSSATCPTTLW

SEQ ID NO: 40 - protein, 271 aa, Homo sapiens
MVGALCGCWFRLGGARPLIPLGPTVVQTSMSRSQVALLGLSLLLMLLLYVGLPGPPEQTSCLWGDPNVTVLAGLTPGNSPIFYREVLPLNQAHRVEVVLLHGKAFNSHTWEQLGTLQLLSQRGYRAVALDLPGFGNSAPSKEASTEAGRAALLERALRDLEVQNAVLVSPSLSGHYALPFLMRGHHQLHGFVPIAPTSTQNYTQEQFWAVKTPTLILYGELDHILARESLRQLRHLPNHSVVKLRNAGHACYLHKPQDFHLVLLAFLDHLP

SEQ ID NO: 41 - protein, 468 aa, Homo sapiens
MPPWGAALALILAVLALLGLLGPRLRGPWGRAVGERTLPGAQDRDDGEEADGGGPADQFSDGREPLPGGCSLVCKPSALAQCLLRALRRSEALEAGPRSWFSGPHLQTLCHFVLPVAPGPELAREYLQLADDGLVALDWVVGPCVRGRRITSAGGLPAVLLVIPNAWGRLTRNVLGLCLLALERGYYPVIFHRRGHHGCPLVSPRLQPFGDPSDLKEAVTYIRFRHPAAPLFAVSEGSGSALLLSYLGECGSSSYVTGAACISPVLRCREWFEAGLPWPYERGFLLHQKIALSRYATALEDTVDTSRLFRSRSLREFEEALFCHTKSFPISWDTYWDRNDPLRDVDEAAVPVLCICSADDPVCGPPDHTLTTELFHSNPYFFLLLSRHGGHCGFLRQEPLPAWSHEVILESFRALTEFFRTEERIKGLSRHRASFLGGRRRGGALQRREVSSSSNLEEIFNWKRSYTR

SEQ ID NO: 42 - protein, 191 aa, Homo sapiens
CIVVLWYGWLHFYAEPKYLIVVRPAPPPSQKKSCSGKTRSRKPLQLVVGTLTPSSVFLSWGFLINPHHDWTLPSHCPNDRFYTIRYREKDKEKKWIFQICPATETIVENLKPNTVYEFGVKDNVEGGIWSKIFNHKTVVGSKKVNGKIQSTYDQDHTVPAYVPRKLIPITIIKQVIQNVTHKDSAKSPEKA

SEQ ID NO: 43 - protein, 60 aa, Homo sapiens
MRGGKCNMLSSLGCLLLCGSITLALGNAQKLPKANKRTELVIQHGWMSLIKMMLNERSQV

SEQ ID NO: 44 - protein, 161 aa, Homo sapiens
MRGGKCNMLSSLGCLLLCGSITLALGNAQKLPKDAEPKYLIVVRPAPPPSQKKSCSGKTRSRKPLQLVVGTLTPSSVFLSWGFLINPHHDWTLPSHCPNDRFYTIRYREKDKEKKWIFQICPATETIVENLKPNTVYEFGVKDNVEGGIWSKIFNHKTVVG

SEQ ID NO: 45 - protein, 1075 aa, Homo sapiens
MRGGKCNMLSSLGCLLLCGSITLALGNAQKLPKGKRPNLKVHINTTSDSILLKFLRPSPNVKLEGLLLGYGSNVSPNQYFPLPAEGKFTEAIVDAEPKYLIVVRPAPPPSQKKSCSGKTRSRKPLQLVVGTLTPSSVFLSWGFLINPHHDWTLPSHCPNDRFYTIRYREKDKEKKWIFQICPATETIVENLKPNTVYEFGVKDNVEGGIWSKIFNHKTVVGSKKVNGKIQSTYDQDHTVPAYVPRKLIPITIIKQVIQNVTHKDSAKSPEKAPLGGVILVHLIIPGLNETTVKLPASLMFEISDALKTQLAKNETLALPAESKTPEVEKISARPTTVTPETVPRSTKPTTSSALDVSETTLASSEKPWIVPTAKISEDSKVLQPQTATYDVFSSPTTSDEPEISDSYTATSDRILDSIPPKTSRTLEQPRATLAPSETPFVPQKLEIFTSPEMQPTTPAPQQTTSIPSTPKRRPRPKPPRTKPERTTSAGTITPKISKSPEPTWTTPAPGKTQFISLKPKIPLSPEVTHTKPAPKQTPRAPPKPKTSPRPRIPQTQPVPKVPQRVTAKPKTSPSPEVSYTTPAPKDVLLPHKPYPEVSQSEPAPLETRGIPFIPMISPSPSQEELQTTLEETDQSTQEPFTTKIPRTTELAKTTQAPHRFYTTVRPRTSDKPHIRPGVKQAPRPSGADRNVSVDSTHPTKKPGTRRPPLPPRPTHPRRKPLPPNNVTGKPGSAGIISSGPITTPPLRSTPRPTGTPLERIETDIKQPTVPASGEELENITDFSSSPTRETDPLGKPRFKGPHVRYIQKPDNSPCSITDSVKRFPKEEATEGNATSPPQNPPTNLTVVTVEGCPSFVILDWEKPLNDTVTEYEVISRENGSFSGKNKSIQMTNQTFSTVENLKPNTSYEFQVKPKNPLGEGPVSNTVAFSTESADPRVSEPVSAGRDAIWTERPFNSDSYSECKGKQYVKRTWYKKFVGVQLCNSLRYKIYLSDSLTGKFYNIGDQRGHGEDHCQFVDSFLDGRTGQQLTSDQLPIKEGYFRAVRQEPVQFGEIGGHTQINYVQWYECGTTIPGKW

SEQ ID NO: 46 - protein, 1777 aa, Homo sapiens
MRGGKCNMLSSLGCLLLCGSITLALGNAQKLPKGKRPNLKVHINTTSDSILLKFLRPSPNVKLEGLLLGYGSNVSPNQYFPLPAEGKFTEAIVDAEPKYLIVVRPAPPPSQKKSCSGKTRSRKPLQLVVGTLTPSSVFLSWGFLINPHHDWTLPSHCPNDRFYTIRYREKDKEKKWIFQICPATETIVENLKPNTVYEFGVKDNVEGGIWSKIFNHKTVVGSKKVNGKIQSTYDQDHTVPAYVPRKLIPITIIKQVIQNVTHKDSAKSPEKAPLGGVILVHLIIPGLNETTVKLPASLMFEISDALKTQLAKNETLALPAESKTPEVEKISARPTTVTPETVPRSTKPTTSSALDVSETTLVLSKRTPETLQTILIPQFELPLSTLAPKSLPEFPEAKTPFPFEKPRGTLASSEKPWIVPTAKISEDSKVLQPQTATYDVFSSPTTSDEPEISDSYTATSDRILDSIPPKTSRTLEQPRATLAPSETPFVPQKLEIFTSPEMQPTTPAPQQTTSIPSTPKRRPRPKPPRTKPERTTSAGTITPKISKSPEPTWTTPAPGKTQFISLKPKIPLSPEVTHTKPAPEPQTLLPSQSTIGPETPGTKPSTTLAPRKTKRPGRRPRPRPRPKTTPSPEVPKSKPALEPATIQPEPLVPTTASKPSERPKTTHRPDAPQIQPGSKPPKQLLPKPQTTAEPDMPPTKSVSEPVPFETEAPSMTIVPTTDIEPVTVRTEATVTTLAPKTSQRTRTRRPRPKHKTTPRPETLQTKLDFGPITPGTSSAPTTTTKRTRRPHPKPKTTPHPEVPQTKLVPATILEPVLRTEASGTTAAPKVPQRTHRPHPKPKTTLSPEELQTELVPATIFEPVSPIKEAPGTTFVPVTDLEPVTFRTEIPATTLATKTSKRTRPPRPRPKTTPSPQAPETKPVPATVLEPVTLRPEASTTLASKTSQRTRRPRLRTKTTPRPEAPESKPVPTAELKPVTLRTETWVTTQAPKTSQRTRRPRPKTKTTPSPEVPQTKLVPSTDLEPGTLRTEAPKTMVVTTVLEPDTFRTKFPETTLAPKTQRTRRPRPRPKTTSSPEVPQNKSVSVTGFEPVVHSTDAPGTTFALTELQTLILKPVTSPSLEMTESQPVSDVLESVTLSTESPKETIAPAKTDYVYPTAKAPLWPEEPKTEVVESITYVSEPPETTLETSPLPSQSITLPSPDEPQTEPAPKQTPRAPPKPKTSPRPRIPQTQPVPKVPQRVTAKPKTSPSPEVSYTTPAPKDVLLPHKPYPEVSQSEPAPLETRGIPFIPMISPSPSQEELQTTLEETDQSTQEPFTTKIPRTTELAKTTQAPHRFYTTVRPRTSDKPHIRPVLNRTTTRPTRPKPSGMPSGNGVGTGVKQAPRPSGADRNVSVDSTHPTKKPGTRRPPLPPRPTHPRRKPLPPNNVTGKPGSAGIISSGPITTPPLRSTPRPTGTPLERIETDIKQPTVPASGEELENITDFSSSPTRETDPLGKPRFKGPHVRYIQKPDNSPCSITDSVKRFPKEEATEGNATSPPQNPPTNLTVVTVEGCPSFVILDWEKPLNDTVTEYEVISRENGSFSGKNKSIQMTNQTFSTVENLKPNTSYEFQVKPKNPLGEGPVSNTVAFSTESADPRVSEPVSAGRDAIWTERPFNSDSYSECKGKQYVKRTWYKKFVGVQLCNSLRYKIYLSDSLTGKFYNIGDQRGHGEDHCQFVDSFLDGRTGQQLTSDQLPIKEGYFRAVRQEPVQFGEIGGHTQINYVQWYECGTTIPGKW

SEQ ID NO: 47 - protein, 1005 aa, Homo sapiens
MRGGKCNMLSSLGCLLLCGSITLALGNAQKLPKGKRPNLKVHINTTSDSILLKFLRPSPNVKLEGLLLGYGSNVSPNQYFPLPAEGKFTEAIVDAEPKYLIVVRPAPPPSQKKSCSGKTRSRKPLQLVVGTLTPSSVFLSWGFLINPHHDWTLPSHCPNDRFYTIRYREKDKEKKWIFQICPATETIVENLKPNTVYEFGVKDNVEGGIWSKIFNHKTVVGSKKVNGKIQSTYDQDHTVPAYVPRKLIPITIIKQVIQNVTHKDSAKSPEKAPLGGVILVHLIIPGLNETTVKLPASLMFEISDALKTQLAKNETLALPAESKTPEVEKISARPTTVTPETVPRSTKPTTSSALDVSETTLVLSKRTPETLQTILIPQFELPLSTLAPKSLPEFPEAKTPFPFEKPRGTLASSEKPWIVPTAKISEDSKVLQPQTATYDVFSSPTTSDEPEISDSYTATSDRILDSIPPKTSRTLEQPRATLAPSETPFVPQKLEIFTSPEMQPTTPAPQQTTSIPSTPKRRPRPKPPRTKPERTTSAGTITPKISKSPEPTWTTPAPGKTQFISLKPKIPLSPEVTHTKPAPEPQTLLPSQSTIGPETPGTKPSTTLAPRKTKRPGRRPRPRPRPKTTPSPEVPKSKPALEPATIQPEPLVPTTASKPSERPKTTHRPDAPQIQPGSKPPKQLLPKPQTTAEPDMPPTKSVSEPVPFETEAPSMTIVPTTDIEPVTVRTEATVTTLAPKTSQRTRTRRPRPKHKTTPRPETLQTKLDFGPITPGTSSAPTTTTKRTRRPHPKPKTTPHPEVPQTKLATKTSKRTRPPRPRPKTTPSPQAPETKPVPATVLEPVTLRPEASTTLASKTSQRTRRPRLRTKTTPRPEAPESKPVPTAELKPVTLRTETWVTTQAPKTSQRTRRPRPKTKTTPSPEVPQTKLVPSTDLEPGTLRTEAPKTMVVTTVLEPDTFRTKFPETTLAPKTQRTRRPRPRPKTTSSPEVPQNKSGKCMNPWLK

SEQ ID NO: 48 - protein, 188 aa, Homo sapiens [sequence omitted]

SEQ ID NO: 49 - protein, 233 aa, Homo sapiens
QRVTAKPKTSPSPEVSYTTPAPKDVLLPHKPYPEVSQSEPAPLETRGIPFIPMISPSPSQEELQTTLAPHRFYTTVRPRTSDKPHIRPGVKQAPRPSGADRNVSVDSTHPTKKPGTRRPPLPPRPTHPRRKPLPPNNVTGKPGSAGIISSGPITTPPLRSTPRPTGTPLERIETDIKQPTVPASGEELENITDFSSSPTRETDPLGKPRFKGPHVRYIQKPDNSPCSITDSVK

SEQ ID NO: 50 - protein, 158 aa, Homo sapiens
VSDVLESVTLSTESPKETIAPAKTDYVYPTAKAPLWPEEPKTEVVESITYVSEPPETTLETSPLPSQSITLPSPDEPQTEPAPKQTPRAPPKPKTSPRPRIPQTQPVPKVPQRVTAKPKTSPSPEVSYTTPAPLETRGIPFIPMISPSPSQEELQTTL

SEQ ID NO: 51 - protein, 84 aa, Homo sapiens
  SITE 1: note = misc_feature - Xaa can be any naturally occurring amino acid
XFEKPRGTLASSEKPWIVPTAKISEDSKVLQPQTATSDRILDSIPPKTSRTLEQPRATLAPSETPFVPQKLEIFTSPEMQPTTP

SEQ ID NO: 52 - protein, 187 aa, Homo sapiens
  SITE 1: note = misc_feature - Xaa can be any naturally occurring amino acid
XFISLKPKIPLSPEVTHTKPAPKTSQRTRTRRPRPKHKTTPRPETLQTKLDFGPITPGTSSAPTTTTKRTRRPHPKPKTTPHPEVPQTKLAPKQTPRAPPKPKTSPRPRIPQTQPVPKVPQRVTAKPKTSPSPEVSYTTPAPKDVLLPHKPYPEVSQSEPAPLETRGIPFIPMISPSPSQEELQTTL

SEQ ID NO: 53 - protein, 1131 aa, Homo sapiens
  SITE 1: note = misc_feature - Xaa can be any naturally occurring amino acid
XISLKPKIPLSPEVTHTKPAPEPQTLLPSQSTIGPETPGTKPSTTLALEPATIQPEPLVPTTASKPSERPKTTHRPDAPQIQPGSKPPKQLLPKPQTTAEPDMPPTKSVSEPVPFETEAPSMTIVPTTDIEPVTVRTEATVTTLAPKTSQRTRTRRPRPKHKTTPRPETLQTKLDFGPITPGTSSAPTTTTKRTRRPHPKPKTTPHPEVPQTKLVPATILEPVLRTEASGTTAVPATIFEPVSPIKEAPGTTFVPVTDLEPVTFRTEIPATTLATKTSKRTRPPRPRPKTTPSPQAPETKPVPATVLEPVTLRPEASTTLASKTSQRTRRPRLRTKTTPRPEAPESKPVPTAELKPVTLRTETWVTTQAPKTSQRTRRPRPKTKTTPSPEVPQTKLVPSTDLEPGTLRTEAPKTMVVTTVLEPDTFRTKFPETTLAPKTQRTRRPRPRPKTTSSPEVPQNKSVSVTGFEPVVHSTDAPGTTFALTELQTLILKPVTSPSLEMTESQPVSDVLESVTLSTESPKETIAPAKTDYVYPTAKAPLWPEEPKTEVVESITYVSEPPETTLETSPLPSQSITLPSPDEPQTEPAPKQTPRAPPKPKTSPRPRIPQTQPVPKVPQRVTAKPKTSPSPEVSYTTPAPKDVLLPHKPYPEVSQSEPAPLETRGIPFIPMISPSPSQEELQTTLEETDQSTQEPFTTKIPRTTELAKTTQAPHRFYTTVRPRTSDKPHIRPGVKQAPRPSGADRNVSVDSTHPTKKPGTRRPPLPPRPTHPRRKPLPPNNVTGKPGSAGIISSGPITTPPLRSTPRPTGTPLERIETDIKQPTVPASGEELENITDFSSSPTRETDPLGKPRFKGPHVRYIQKPDNSPCSITDSVKRFPKEEATEGNATSPPQNPPTNLTVVTVEGCPSFVILDWEKPLNDTVTEYEVISRENGSFSGKNKSIQMTNQTFSTVENLKPNTSYEFQVKPKNPLGEGPVSNTVAFSTESADPRVSEPVSAGRDAIWTERPFNSDSYSECKGKQYVKRTWYKKFVGVQLCNSLRYKIYLSDSLTGKFYNIGDQRGHGEDHCQFVDSFLDGRTGQQLTSDQLPIKEGYFRAVRQEPVQFGEIGGHTQINYVQWYECGTTIPGKW

SEQ ID NO: 54 - protein, 125 aa, Homo sapiens
  SITE 1: note = misc_feature - Xaa can be any naturally occurring amino acid
XKNETLALPAESKTPEVEKISARPTTVTPETVPRSTKPTTSSALDVSETTLAPKSLPEFPEAKTPFPFEKPRGTLASSEKPWIVPTAKISEDSKVLQPQTALTELQTLILKPVTSPSLEMTESQP

SEQ ID NO: 55 - protein, 187 aa, Homo sapiens
  SITE 1: note = misc_feature - Xaa can be any naturally occurring amino acid
XKTTPHPEVPQTKLAPKVPQRTHRPHPKPKTTLSPEELQTELVPATIFEPVSPIKEAPGTTFVPVTDLEPVTFRTEIPATTLATKTSKRTRPPRPRPKTTPSPQAPETKPAPKQTPRAPPKPKTSPRPRIPQTQPVPKVPQRVTAKPKTSPSPEVSYTTPAPLETRGIPFIPMISPSPSQEELQTTL

SEQ ID NO: 56 - protein, 187 aa, Homo sapiens
  SITE 1: note = misc_feature - Xaa can be any naturally occurring amino acid
XNGKIQSTYDQDHTVPAYVPRKLIPITIIKQVIQNVTHKDSAKSPEKAPLGGVILVHLIIPGLNETTVKLPASLMFEISDALKTQLAKNETLALPAESKTPEVEKISARPTTVTPETVPRSTKPTTSSALDVSETTLVLSKRTPETLQTILIPQFELPLSTLASSEKPWIVPTAKISEDSKVLQPQT

SEQ ID NO: 57 - protein, 150 aa, Homo sapiens
  SITE 1: note = misc_feature - Xaa can be any naturally occurring amino acid
XPETPGTKPSTTLAPRKTKRPGRRPRPRPRPKTTPSPEVPKSKPALEPATIQPEPLVPTTVPTTDIEPVTVRTEATVTTLAPKTSQRTRTRRPRPKHKTTPRPETLQTKLDFGPITPGTSSAPTTTTKRTRRPHPKPKTTPHPEVPQTKL

SEQ ID NO: 58 - protein, 308 aa, Homo sapiens
  SITE 1: note = misc_feature - Xaa can be any naturally occurring amino acid
XPKPKTTPHPEVPQTKLATKTSKRTRPPRPRPKTTPSPQAPETKPVPATVLEPVTLRPEASTTLASKTSQRTRRPRLRTKTTPRPEAPESKPVPTAELKPVTLRTETWVTTQAPKQTPRAPPKPKTSPRPRIPQTQPVPKVPQRVTAKPKTSPSPEVSYTTPAPKDVLLPHKPYPEVSQSEPAPLETRGIPFIPMISPSPSQEELQTTLEETDQSTQEPFTTKIPRTTELAKTTQAPHRFYTTVRPRTSDKPHIRPVLNRTTTRPTRPKPSGMPSGNGVGTGVKQAPRPSGADRNVSVDSTHPTKKPG

SEQ ID NO: 59 - protein, 87 aa, Homo sapiens
  SITE 1: note = misc_feature - Xaa can be any naturally occurring amino acid
XQTLLPSQSTIGPETPGTKPSTTLAPRKTKRPGRRPRPRPRPKTTPSPEVPKSKPALEPATIQPEPLVPTTVSEPVPFETEAPSMTI

SEQ ID NO: 60 - protein, 187 aa, Homo sapiens
  SITE 1: note = misc_feature - Xaa can be any naturally occurring amino acid
XRTTSAGTITPKISKSPEPTWTTPAPGKTQFISLKPKIPLSPEVTHTKPVPTTDIEPVTVRTEATVTTLAPKTSQRTRTRRPRPKHKTTPRPETLQTKLDFGPITPGTSSAPTTTTKRTRRPHPKPKTTPHPEVPQTKLAPKVPQRTHRPHPKPKTTLSPEELQTELVPATIFEPVSPIKEAPGTTF

SEQ ID NO: 61 - protein, 189 aa, Homo sapiens
  SITE 1: note = misc_feature - Xaa can be any naturally occurring amino acid
XTAKPKTSPSPEVSYTTPAPLETRGIPFIPMISPSPSQEELQTTLEETDQSTQEPFTTKIPRTTELAKTTQAPHRFYTTVRPRTSDKPHIRPVLNRTTTRPTRPKPSGMPSGNGVGTGVKQAPRPSGADRNVSVDSTHPTKKPGTRRPPLPPRPTHPRRKPLPPNNVTGKPGSAGIISSGPITTPPLRS

SEQ ID NO: 62 - protein, 303 aa, Homo sapiens
  SITE 1: note = misc_feature - Xaa can be any naturally occurring amino acid
XTPEVEKISARPTTVTPETVPRSTKPTTSSALDVSETTLASSEKPWIVPTAKISEDSKVLQPQTATYDVFSSPTTSDEPEISDSYTATSDRILDSIPPKTSRTLEQPRATLAPSETPFVPQKLEIFTSPEMQPTTPAPQQTTSIPSTPKRRPRPKPPRTKPERTTSAGTITPKISKSPEPTWTTPAPGKTQFISLKPKIPLSPEVTHTKPAPEPQTLLPSQSTIGPETPGTKPSTTLAPRKTKRPGRRPRPRPRPKTTPSPEVPKSKPALEPATIQPEPLVPTTASKPSERPKTTHRPDAPQI

SEQ ID NO: 63 - protein, 151 aa, Homo sapiens
  SITE 1: note = misc_feature - Xaa can be any naturally occurring amino acid
XVESITYVSEPPETTLETSPLPSQSITLPSPDEPQTEPAPKQTPRAPPKPKTSPRPRIPQTQPVPKVPQRVTAKPKTSPSPEVSYTTPAPKDVLLPHKPYPEVSQSEPVLQPVTFRFEPPKTTIAPLETRGIPFIPMISPSPSQEELQTTL

SEQ ID NO: 64 - protein, 198 aa, Homo sapiens
LLHKNLQEHFSNQDLVFLLLTPSIITESCSTHRLEHSLYKPQKGLFHRVPLVVANLGMSEQLGYKTVSGSCMSTGFSRAVQTHSSKFFEEDGSLKEVHKINEMYASLQEELKLYSFSECHLHPGSRLKEQPLFGTCPHGIRQRARKLVDYRREPPQLAHELIFQFISVYFQRTNWHDKSCINEKLHVKKHFTTYKAYL

SEQ ID NO: 65 - protein, 360 aa, Homo sapiens
MDDVEVVYTIDIQKYIPCYQLFSFYNSSGEVNEQALKKILSNVKKNVVGWYKFRRHSDQIMTFRERLLHKNLQEHFSNQDLVFLLLTPSIITESCSTHRLEHSLYKPQKGLFHRVPLVVANLGMSEQLGYKTVSGSCMSTGFSRAVQTHSSKFFEEDGSLKEVHKINEMYASLQEELKSICKKVEDSEQAVDKLVKDVNRLKREIEKRRGAQIQAAREKNIQKDPQENIFLCQALRTFFPNSEFLHSCVMSLKNRHVSKSSCNYNHHLDVVDNLTLMVEHTDIPEASPASTPQIIKHKALDLDDRWQFKRSRLLDTQDKRSKADTGSSNQDKASKMSSPETDEEIEKMKGFGEYSRSPTF

SEQ ID NO: 66 - protein, 74 aa, Homo sapiens
MEGESTSAVLSGFVLGALAFQHLNTDSDTEGFLLGEVKGEAKNSITDSQMDDVEVVYTIDIQKYIPCYQLFRMW

SEQ ID NO: 67 - protein, 409 aa, Homo sapiens
MEGESTSAVLSGFVLGALAFQHLNTDSDTEGFLLGEVKGEAKNSITDSQMDDVEVVYTIDIQKYIPCYQLFSFYNSSGEVNEQALKKILSNVKKNVVGWYKFRRHSDQIMTFRERLLHKNLQEHFSNQDLVFLLLTPSIITESCSTHRLEHSLYKPQKGLFHRVPLVVANLGMSEQLGYKTVSGSCMSTGFSRAVQTHSSKFFEEDGSLKEVHKINEMYASLQEELKSICKKVEDSEQAVDKLVKDVNRLKREIEKRRGAQIQAAREKNIQKDPQENIFLCQALRTFFPNSEFLHSCVMSLKNRHVSKSSCNYNHHLDVVDNLTLMVEHTDIPEASPASTPQIIKHKALDLDDRWQFKRSRLLDTQDKRSKADTGSSNQDKASKMSSPETDEEIEKMKGFGEYSRSPTF

SEQ ID NO: 68 - protein, 37 aa, Homo sapiens
MEGESTSAVLSGFVLGALAFQHLNTDSDTVGRGGSRL

SEQ ID NO: 69 - protein, 189 aa, Homo sapiens
MEGESTSAVLSGFVLGALAFQHLNTDSDTVSRGTGRGPASPGKSPARGLPPRCCSGPRPLPRRRRASSLRSRLCLLSPSAVPEEGFLLGEVKGEAKNSITDSQMDDVEVVYTIDIQKYIPCYQLFSFYNSSGEVNEQALKKILSNVKKNVVGWYKFRRHSDQIMTFRERLLHKNLQEHFSNQDLVFLLL

SEQ ID NO: 70 - protein, 220 aa, Homo sapiens
MKTSSPKENCLFLCFTSMKNGQEGFLLGEVKGEAKNSITDSQMDDVEVVYTIDIQKYIPCYQLFSFYNSSGEVNEQALKKILSNVKKNVVGWYKFRRHSDQIMTFRERLLHKNLQEHFSNQDLVFLLLTPSIITESCSTHRLEHSLYKPQKGLFHRVPLVVANLGMSEQLGYKTVSGSCMSTGFSRAVQTHSSKFFEEDGSLKEVHKINEMYASLQEELK

SEQ ID NO: 71 - protein, 82 aa, Homo sapiens
MMLKLFIQLMESHSVAQTGVKWHDLGSLQPLPLEVKRFSCLGLRSSWDYRHTQPCPANFFCIFSRDGVSPCWPGWSRTPDLK

SEQ ID NO: 72 - protein, 536 aa, Homo sapiens
MGAWAFPAALFLLCLTSESLQGGLPLLPPGLGKVYGPHSGLGAGYDGGVKPQKPGFVVRHGLGTQPDTEGGMKPQNLGFRTFAGAAAQPGYGNGLGAAAFPVAGAQSGPAAQNGFGPGFGGGGKPQKPGPTTQNGYRPGYVGAVKPQKPGFQYRIGLGAQPGFRGDMKAQEPGLGNGNGLSAQPVLTAQNRFGFGAGLGGNVKPLKPGYGKRLRAGAFPGAGTQPEYGHGNGPGVQPGLGAGMKPQMPGLGAPNGYGPGRGRAGVPGGPERRPWVPHLLPFSSPGYLGVMKAQKPGPLAQNGYRAGAGEGMKPQKPGLRGTLKPQKSGHGHENGPWPGPCNARVAPMLLPRLPTPGVPSDKEGGWGLKSQPPSAVQNGKLPAPMPAIQWGLKPQKAGHQPPNGYGPGAEPGFNGGLEPQKIGLGYGNGVLGARVFPEAHPQPGFHGANGFRNRDGVEALVYPKAAALAPEGNGQAGVLWNSRWPTLQAWGAGLKPGYQAGDEYAEARSQPGGPDVKRGSNGQLGNGYGGRCPLGKC

SEQ ID NO: 73 - protein, 195 aa, Homo sapiens
MPNFLGLHRARSFTVLCFWSTADVLNASGPRRQWHPLASCSSWSRPQSQGSTPGVLCKTGMGREPIPETQCHFANSMCSLHVSVPYFGNSPNISNFFRWSLALSPRQWCDLGSLQPPSPRFKGFSCLSLPSSWDYRRAPSPANFCILVEMGFHHVGQADLELLTSADLPTSASQSAGITGVSHHAWPQTLSLLLY

SEQ ID NO: 74 - protein, 130 aa, Homo sapiens
MGGTWASKEPLRPRCRPINATLAVEKEGCPVCITVNTTICAGYCPTMTRVLQGVLPALPQVVCNYRDVRFESIRLPGCPRGVNPVVSYAVALSCQCALCRRSTTDCGGPKDHPLTCDDPRFQDSSSSKAP

SEQ ID NO: 75 - protein, 77 aa, Homo sapiens
MSKGLLLLLLLSMGGTWASKEPLRPRCRPINATLAVEKEGCPVCITVNTTICAGYCPTMTRVLQGVLPALPQVVCNY

SEQ ID NO: 76 - protein, 165 aa, Homo sapiens
MDAEGLALLLPPVTLAALVDSWLREDCPGLNYAALVSGAGPSQAALWAKSPGVLAGQPFFDAIFTQLNCQVSWFLPEGSKLVPVARVAEVRGPAHCLLLGERVALNTLARCSGIASAAAAAVEAARGAGWTGHVAGTRKTTPGFRLVEKYGLLVGGAASHRYDLG

SEQ ID NO: 77 - protein, 210 aa, Homo sapiens [sequence omitted]

SEQ ID NO: 78 - protein, 83 aa, Homo sapiens [sequence omitted]

SEQ ID NO: 79 - protein, 105 aa, Homo sapiens
MKGWGWLALLLGALLGTAWARRSQDLHCGACRALVDELEWEIAQVDPKKTIQMGSFRINPDGSQSVVENASCLVLAARHASASSTNLKDILADLIPKEQARIKTF

SEQ ID NO: 80 - protein, 263 aa, Homo sapiens
MKGWGWLALLLGALLGTAWARRSQDLHCGACRALVDELEWEIAQVDPKKTIQMGSFRINPDGSQSVVEVPYARSEAHLTELLEEICDRMKEYGEQIDPSTHRKNYVRVVGRNGESSELDLQGIRIDSDISGTLKFACESIVEEYEDELIEFFSREADNVKDKLCSKRTDGGTSKNRDRKGKMDVTNSAEKSRRSPAMALLTAAARLLGTKNASCLVLAARHASASSTNLKDILADLIPKEQARIKTFRQQHGKTVVGQITVDM

SEQ ID NO: 81 - protein, 171 aa, Homo sapiens
MPETSHIVALTSKSEQELYIPSVVSNSPSTVQSIENTSKSHGEIFKKDVCAENNNNMAMLICLIIIAVLFLICTFLFLSTVVLANKVSSLRRSKQVGKRQPRSNGDFLASGLWPAESDTWKRTKQLTGPNLVMQSTGVLTATRERKDEEGTEKLTNKQIAKSPKCPVRTRI

SEQ ID NO: 82 - protein, 123 aa, Homo sapiens
  SITE 1: note = misc_feature - Xaa can be any naturally occurring amino acid
XCAENNNNMAMLICLIIIAVLFLICTFLFLSTVVLANKVSSLRRSKQVGKRQPRSNGDFLASGLWPAESDTWKRTKQLTGPNLVMQSTGVLTATRERKDEEGTEKLTNKQIAKSPKCPVRTRI

SEQ ID NO: 83 - protein, 117 aa, Homo sapiens
  SITE 1: note = misc_feature - Xaa can be any naturally occurring amino acid
XCAENNNNMAMLICLIIIAVLFLICTFLFLSTVVLANKVSSLRRSKQVGKRQPRSNGDFLASGLWPAESDTWKRTKQLTGPNLVMQSTGVLTATRERKDEEGTEKLTNKQIDNEEIF

SEQ ID NO: 84 - protein, 153 aa, Homo sapiens
  SITE 1: note = misc_feature - Xaa can be any naturally occurring amino acid
XCAENNNNMAMLICLIIIAVLFLICTFLFLSTVVLANKVSSLRRSKQVGKRQPRSNGDFLASGLWPAESDTWKRTKQLTGPNLVMQSTGVLTATRERKDEEGTEKLTNKQIEEETVTQKCRVLPKVIQVNRTHHSLLMRRNLTKLFQFARGTF

SEQ ID NO: 85 - protein, 104 aa, Homo sapiens
MGSTWGSPGWVRLALCLTGLVLSLYALHVKAARARDRDYRALCDVGTAISCSRVFSSRAAATELNSWSVVLGSLQREGLSPGAEEVGVAALQLPRAYNHYSQGS

SEQ ID NO: 86 - protein, 166 aa, Homo sapiens
MGSTWGSPGWVRLALCLTGLVLSLYALHVKAARARDRDYRALCDVGTAISCSRVFSSRWGRGFGLVEHVLGQDSILNQSNSIFGCIFYTLQLLLGLQAAQRACGQRGPGPPKPQEGNTVPGEWPWQASVRRQGAHICSGSLVADTWVLTAAHCFEKAAATELNSWS

SEQ ID NO: 87 - protein, 121 aa, Homo sapiens
  SITE 1: note = misc_feature - Xaa can be any naturally occurring amino acid
XDVGTAISCSRVFSSRWGRGFGLVEHVLGQDSILNQSNSIFGCIFYTLQLLLGCLRTRWASVLMLLSSLVSLAGSVYLAWILFFVLYDFCIVCITTYAINVSLMWLSFRKVQEPQGKAKRH

SEQ ID NO: 88 - protein, 199 aa, Homo sapiens
MALLLRFVLLCRVADFIRGWSITTPEQMIEKAKGETAYLPCKFTLSPEDQGPLDIEWLISPADNQKVDQVIILYSGDKIYDDYYPDLKGRVHFKSNDLKSGDASINVTNFQLSDIGTDQCKVKRAPGVANRKIQLVVLGKMCRLQRAARPLPEATAVIIHPWDPYLLPTWKDIPRLSINKYQVKTLNALLRVRLSHLLR

SEQ ID NO: 89 - protein, 116 aa, Homo sapiens
MEFGLNWVFLVAIIKGAQCEVQLVESGGGLVQPGGSLRLSCPDSGFTFSNHYMSWVRQAPGKGLEWISYISGDSGYTNYADSVKGRFTISRDNANNSPYLQMNSLRAEDTAVYYCV

SEQ ID NO: 90 - protein, 124 aa, Homo sapiens
MLCPRAAFLVGSFHGVFPGPPASSHWEFWVPSTPVGAYFCPPQPQLTPPNTPKLVSEVEELYKSITALREKLLQAEQSLRNLKDIHMSLEKDVTAMTNSVFIDRQKCMAHRTCYPTILQLAGYQ

SEQ ID NO: 91 - protein, 117 aa, Homo sapiens
MKHLWFFLLLVAAPRWVLSQVQLQESGPGLVKPSETLSLTCTVSGYSISSGYYWGWIRQPPGKGLEWIGSIYHSGSTYYNPSLKSRVTISVDTSKNQFSLKLSSVTAADTAVYYCAR

SEQ ID NO: 92 - protein, 67 aa, Homo sapiens
MESPSAPPHRWCIPWQRLLLTASLLTFWNPPTTAKLTIESTPFNVAEGKEVLLLAHNLPQNRIGYSW

SEQ ID NO: 93 - protein, 152 aa, Homo sapiens
MESPSAPPHRWCIPWQRLLLTASLLTFWNPPTTAKLTIESTPFNVAEGKEVLLLVHNLPQHLFGYSWYKGERVDGNRQIIGYVIGTQQATPGPAYSGREIIYPNASLLIQNIIQNDTGFYTLHVIKSDLVNEEATGQFRVYPELPKPSISSN

SEQ ID NO: 94 - protein, 155 aa, Homo sapiens
MSPAKCKICFPDREVKPSMSGLHLVKRGREHKKLDLHRDFTVASPAEFVTRFGGDRVIEKVLIANNGIAAVKCMRSIRRWAYEMFRNERAIRFVVMVTPEDLKANAEYIKMADHYVPVPGGPNNNNYANVELIVDIAKRIPVQAVWAGWGHASEN

SEQ ID NO: 95 - protein, 143 aa, Homo sapiens
MTDSKPITKSKSEANLIPSQEPFPASDNSGETPQRNGEGHTLPKTPSQAEPASHKGPKDAGRRRNSLPPSHQKPPRNPLSSSDAAPSPELQANGTGTQGLEATDTNGLSSSARPQGQQAGSPSKEDKKQANIKRQLMTNFILG

SEQ ID NO: 96 - protein, 858 aa, Homo sapiens
MTVPISITNPDLLRHSTELFMDSGFSPLCQRMGAMVAFRRFEDFTRNFDEVISCFANVPKDTPLFSEARTSLYSEDDCKSLREEPIHILNVSIQCADHLEDEALVPILRTFVQSKKNILVDYGLRRITFLIAQEKEFPKFFTFRARDEFAEDRIYRHLEPALAFQLELNRMRNFDLTAVPCANHKMHLYLGAAKVKEGVEVTDHRFFIRAIIRHSDLITKEASFEYLQNEGERLLLEAMDELEVAFNNTSVRTDCNHIFLNFVPTVIMDPFKIEESVRYMVMRYGSRLWKLRVLQAEVKINIRQTTTGSAVPIRLFITNESGYYLDISLYKEVTDSRSGNIMFHSFGNKQGPQHGMLINTPYVTKDLLQAKRFQAQTLGTTYIYDFPEMFRQALFKLWGSPDKYPKDILTYTELVLDSQGQLVEMNRLPGGNEVGMVAFKMRFKTQEYPEGRDVIVIGNDITFRIGSFGPGEDLLYLRASEMARAEGIPKIYVAANSGARIGMAEEIKHMFHVAWVDPEDPHKGFKYLYLTPQDYTRISSLNSVHCKHIEEGGESRYMITDIIGKDDGLGVENLRGSGMIAGESSLAYEEIVTISLVTCRAIGIGAYLVRLGQRVIQVENSHIILTGASALNKVLGREVYTSNNQLGGVQIMHYNGVSHITVPDDFEGVYTILEWLSYMPKDNHSPVPIITPTDPIDREIEFLPSRAPYDPRWMLAGRPHPTLKGTWQSGFFDHGSFKEIMAPWAQTVVTGRARLGGIPVGVIAVETRTVEVAVPADPANLDSEAKIIQQAGQVWFPDSAYKTAQAVKDFNREKLPLMIFANWRGFSGGMKGCLGTWRDVSWWKIRAMLPMHIGEGSV

SEQ ID NO: 97 - protein, 2458 aa, Homo sapiens
MVLLLCLSCLIFSCLTFSWLKIWGKMTDSKPITKSKSEANLIPSQEPFPASDNSGETPQRNGEGHTLPKTPSQAEPASHKGPKDAGRRRNSLPPSHQKPPRNPLSSSDAAPSPELQANGTGTQGLEATDTNGLSSSARPQGQQAGSPSKEDKKQANIKRQLMTNFILGSFDDYSSDEDSVAGSSRESTRKGSRASLGALSLEAYLTTGEAETRVPTMRPSMSGLHLVKRGREHKKLDLHRDFTVASPAEFVTRFGGDRVIEKVLIANNGIAAVKCMRSIRRWAYEMFRNERAIRFVVMVTPEDLKANAEYIKMADHYVPVPGGPNNNNYANVELIVDIAKRIPVQAVWAGWGHASENPKLPELLCKNGVAFLGPPSEAMWALGDKIASTVVAQTLQVPTLPWSGSGLTVEWTEDDLQQGKRISVPEDVYDKGCVKDVDEGLEAAERIGFPLMIKASEGGGGKGIRKAESAEDFPILFRQVQSEIPGSPIFLMKLAQHARHLEVQILADQYGNAVSLFGRDCSIQRRHQKIVEEAPATIAPLAIFEFMEQCAIRLAKTVGYVSAGTVEYLYSQDGSFHFLELNPRLQVEHPCTEMIADVNLPAAQLQIAMGVPLHRLKDIRLLYGESPWGVTPISFETPSNPPLARGHVIAARITSENPDEGFKPSSGTVQELNFRSSKNVWGYFSVAATGGLHEFADSQFGHCFSWGENREEAISNMVVALKELSIRGDFRTTVEYLINLLETESFQNNDIDTGWLDYLIAEKVQAEKPDIMLGVVCGALNVADAMFRTCMTDFLHSLERGQVLPADSLLNLVDVELIYGGVKYILKVARQSLTMFVLIMNGCHIEIDAHRLNDGGLLLSYNGNSYTTYMKEEVDSYRITIGNKTCVFEKENDPTVLRSPSAGKLTQYTVEDGGHVEAGSSYAEMEVMKMIMTLNVQERGRVKYIKRPGAVLEAGCVVARLELDDPSKVHPAEPFTGELPAQQTLPILGEKLHQVFHSVLENLTNVMSGFCLPEPVFSIKLKEWVQKLMMTLRHPSLPLLELQEIMTSVAGRIPAPVEKSVRRVMAQYASNITSVLCQFPSQQIATILDCHAATLQRKADREVFFINTQSIVQLVQRYRSGIRGYMKTVVLDLLRRYLRVEHHFQQAHYDKCVINLREQFKPDMSQVLDCIFSHAQVAKKNQLVIMLIDELCGPDPSLSDELISILNELTQLSKSEHCKVALRARQILIASHLPSYELRHNQVESIFLSAIDMYGHQFCPENLKKLILSETTIFDVLPTFFYHANKVVCMASLEVYVRRGYIAYELNSLQHRQLPDGTCVVEFQFMLPSSHPNRMTVPISITNPDLLRHSTELFMDSGFSPLCQRMGAMVAFRRFEDFTRNFDEVISCFANVPKDTPLFSEARTSLYSEDDCKSLREEPIHILNVSIQCADHLEDEALVPILRTFVQSKKNILVDYGLRRITFLIAQEKEFPKFFTFRARDEFAEDRIYRHLEPALAFQLELNRMRNFDLTAVPCANHKMHLYLGAAKVKEGVEVTDHRFFIRAIIRHSDLITKEASFEYLQNEGERLLLEAMDELEVAFNNTSVRTDCNHIFLNFVPTVIMDPFKIEESVRYMVMRYGSRLWKLRVLQAEVKINIRQTTTGSAVPIRLFITNESGYYLDISLYKEVTDSRSGNIMFHSFGNKQGPQHGMLINTPYVTKDLLQAKRFQAQTLGTTYIYDFPEMFRQALFKLWGSPDKYPKDILTYTELVLDSQGQLVEMNRLPGGNEVGMVAFKMRFKTQEYPEGRDVIVIGNDITFRIGSFGPGEDLLYLRASEMARAEGIPKIYVAANSGARIGMAEEIKHMFHVAWVDPEDPHKGFKYLYLTPQDYTRISSLNSVHCKHIEEGGESRYMITDIIGKDDGLGVENLRGSGMIAGESSLAYEEIVTISLVTCRAIGIGAYLVRLGQRVIQVENSHIILTGASALNKVLGREVYTSNNQLGGVQIMHYNGVSHITVPDDFEGVYTILEWLSYMPKDNHSPVPIITPTDPIDREIEFLPSRAPYDPRWMLAGRPHPTLKGTWQSGFFDHGSFKEIMAPWAQTVVTGRARLGGIPVGVIAVETRTVEVAVPADPANLDSEAKIIQQAGQVWFPDSAYKTAQAVKDFNREKLPLMIFANWRGFSGGMKDMYDQVLKFGAYIVDGLRQYKQPILIYIPPYAELRGGSWVVIDATINPLCIEMYADKESRGGVLEPEGTVEIKFRKKDLIKSMRRIDPAYKKLMEQLGEPDLSDKDRKDLEGRLKAREDLLLPIYHQVAVQFADFHDTPGRMLEKGVISDILEWKTARTFLYWRLRRLLLEDQVKQEILQASGELSHVHIQSMLRRWFVETEGAVKAYLWDNNQVVVQWLEQHWQAGDGPRSTIRENITYLKHDSVLKTIRGLVEENPEVAVDCVIYLSQHISPAERAQVVHLLSTMDSPAST

SEQ ID NO: 98 - protein, 2458 aa, Homo sapiens; identical to SEQ ID NO: 97

SEQ ID NO: 99 - protein, 859 aa, Homo sapiens
  SITE 1: note = misc_feature - Xaa can be any naturally occurring amino acid
XMTVPISITNPDLLRHSTELFMDSGFSPLCQRMGAMVAFRRFEDFTRNFDEVISCFANVPKDTPLFSEARTSLYSEDDCKSLREEPIHILNVSIQCADHLEDEALVPILRTFVQSKKNILVDYGLRRITFLIAQEKEFPKFFTFRARDEFAEDRIYRHLEPALAFQLELNRMRNFDLTAVPCANHKMHLYLGAAKVKEGVEVTDHRFFIRAIIRHSDLITKEASFEYLQNEGERLLLEAMDELEVAFNNTSVRTDCNHIFLNFVPTVIMDPFKIEESVRYMVMRYGSRLWKLRVLQAEVKINIRQTTTGSAVPIRLFITNESGYYLDISLYKEVTDSRSGNIMFHSFGNKQGPQHGMLINTPYVTKDLLQAKRFQAQTLGTTYIYDFPEMFRQALFKLWGSPDKYPKDILTYTELVLDSQGQLVEMNRLPGGNEVGMVAFKMRFKTQEYPEGRDVIVIGNDITFRIGSFGPGEDLLYLRASEMARAEGIPKIYVAANSGARIGMAEEIKHMFHVAWVDPEDPHKGFKYLYLTPQDYTRISSLNSVHCKHIEEGGESRYMITDIIGKDDGLGVENLRGSGMIAGESSLAYEEIVTISLVTCRAIGIGAYLVRLGQRVIQVENSHIILTGASALNKVLGREVYTSNNQLGGVQIMHYNGVSHITVPDDFEGVYTILEWLSYMPKDNHSPVPIITPTDPIDREIEFLPSRAPYDPRWMLAGRPHPTLKGTWQSGFFDHGSFKEIMAPWAQTVVTGRARLGGIPVGVIAVETRTVEVAVPADPANLDSEAKIIQQAGQVWFPDSAYKTAQAVKDFNREKLPLMIFANWRGFSGGMKGCLGTWRDVSWWKIRAMLPMHIGEGSV

SEQ ID NO: 100 - protein, 112 aa, Homo sapiens
  SITE 1: note = misc_feature - Xaa can be any naturally occurring amino acid
XVEMNRLPGGNEVGMVAFKMRFKTQEYPEGRDVIVIGNDITFRIGSFGPGEDLLYLRASEMARAEGIPKIYVAANSGARIGMAEEIKHMFHVAWVDPEDPHKIHDHGYHREG

SEQ ID NO: 101 - protein, 2431 aa, Homo sapiens
MTTLLWVFVTLRVITAAVTVETSDHDNSLSVSIPQPSPLRVLLGTSLTIPCYFIDPMHPVTTAPSTAPLAPRIKWSRVSKEKEVVLLVATEGRVRVNSAYQDKVSLPNYPAIPSDATLEVQSLRSNDSGVYRCEVMHGIEDSEATLEVVVKGIVFHYRAISTRYTLDFDRAQRACLQNSAIIATPEQLQAAYEDGFHQCDAGWLADQTVRYPIHTPREGCYGDKDEFPGVRTYGIRDTNETYDVYCFAEEMEGEVFYATSPEKFTFQEAANECRRLGARLATTGQLYLAWQAGMDMCSAGWLADRSVRYPISKARPNCGGNLLGVRTVYVHANQTGYPDPSSRYDAICYTGEDFVDIPENFFGVGGEEDITVQTVTWPDMELPLPRNITEGEARGSVILTVKPIFEVSPSPLEPEEPFTFAPEIGATAFAEVENETGEATRPWGFPTPGLGPATAFTSEDLVVQVTAVPGQPHLPGGVVFHYRPGPTRYSLTFEEAQQACLRTGAVIASPEQLQAAYEAGYEQCDAGWLRDQTVRYPIVSPRTPCVGDKDSSPGVRTYGVRPSTETYDVYCFVDRLEGEVFFATRLEQFTFQEALEFCESHNATLATTGQLYAAWSRGLDKCYAGWLADGSLRYPIVTPRPACGGDKPGVRTVYLYPNQTGLPDPLSRHHAFCFRGISAVPSPGEEEGGTPTSPSGVEEWIVTQVVPGVAAVPVEEETTAVPSGETTAILEFTTEPENQTEWEPAYTPVGTSPLPGILPTWPPTGAATEESTEGPSATEVPSASEEPSPSEVPFPSEEPSPSEEPFPSVRPFPSVELFPSEEPFPSKEPSPSEEPSASEEPYTPSPPVPSWTELPSSGEESGAPDVSGDFTGSGDVSGHLDFSGQLSGDRASGLPSGDLDSSGLTSTVGSGLPVESGLPSGDEERIEWPSTPTVGELPSGAEILEGSASGVGDLSGLPSGEVLETSASGVGDLSGLPSGEVLETTAPGVEDISGLPSGEVLETTAPGVEDISGLPSGEVLETTAPGVEDISGLPSGEVLETTAPGVEDISGLPSGEVLETTAPGVEDISGLPSGEVLETTAPGVEDISGLPSGEVLETAAPGVEDISGLPSGEVLETAAPGVEDISGLPSGEVLETAAPGVEDISGLPSGEVLETAAPGVEDISGLPSGEVLETAAPGVEDISGLPSGEVLETAAPGVEDISGLPSGEVLETAAPGVEDISGLPSGEVLETAAPGVEDISGLPSGEVLETAAPGVEDISGLPSGEVLETAAPGVEDISGLPSGEVLETAAPGVEDISGLPSGEVLETAAPGVEDISGLPSGEVLETAAPGVEDISGLPSGEVLETAAPGVEDISGLPSGEVLETAAPGVEDISGLPSGEVLETAAPGVEDISGLPSGEVLETTAPGVEEISGLPSGEVLETTAPGVDEISGLPSGEVLETTAPGVEEISGLPSGEVLETSTSAVGDLSGLPSGGEVLEISVSGVEDISGLPSGEVVETSASGIEDVSELPSGEGLETSASGVEDLSRLPSGEEVLEISASGFGDLSGLPSGGEGLETSASEVGTDLSGLPSGREGLETSASGAEDLSGLPSGKEDLVGSASGDLDLGKLPSGTLGSGQAPETSGLPSGFSGEYSGVDLGSGPPSGLPDFSGLPSGFPTVSLVDSTLVEVVTASTASELEGRGTIGISGAGEISGLPSSELDISGRASGLPSGTELSGQASGSPDVSGEIPGLFGVSGQPSGFPDTSGETSGVTELSGLSSGQPGISGEASGVLYGTSQPFGITDLSGETSGVPDLSGQPSGLPGFSGATSGVPDLVSGTTSGSGESSGITFVDTSLVEVAPTTFKEEEGLGSVELSGLPSGEADLSGKSGMVDVSGQFSGTVDSSGFTSQTPEFSGLPSGIAEVSGESSRAEIGSSLPSGAYYGSGTPSSFPTVSLVDRTLVESVTQAPTAQEAGEGPSGILELSGAHSGAPDMSGEHSGFLDLSGLQSGLIEPSGEPPGTPYFSGDFASTTNVSGESSVAMGTSGEASGLPEVTLITSEFVEGVTEPTISQELGQRPPVTHTPQLFESSGKVSTAGDISGATPVLPGSGVEVSSVPESSSETSAYPEAGFGASAAPEASREDSGSPDLSETTSAFHEANLERSSGLGVSGSTLTFQEGEASAAPEVSGESTTTSDVGTEAPGLPSATPTASGDRTEISGDLSGHTSQLGVVISTSIPESEWTQQTQRPAETHLEIESSSLLYSGEETHTVETATSPTDASIPASPEWKRESESTAADQEVCEEGWNKYQGHCYRHFPDRETWVDAERRCREQQSHLSSIVTPEEQEFVNNNAQDYQWIGLNDRTIEGDFRWSDGHPMQFENWRPNQPDNFFAAGEDCVVMIWHEKGEWNDVPCNYHLPFTCKKGTATTYKRRLQKRSSRHPRRSRPSTAH

SEQ ID NO: 102 - protein, 2530 aa, Homo sapiens
MTTLLWVFVTLRVITAAVTVETSDHDNSLSVSIPQPSPLRVLLGTSLTIPCYFIDPMHPVTTAPSTAPLAPRIKWSRVSKEKEVVLLVATEGRVRVNSAYQDKVSLPNYPAIPSDATLEVQSLRSNDSGVYRCEVMHGIEDSEATLEVVVKGIVFHYRAISTRYTLDFDRAQRACLQNSAIIATPEQLQAAYEDGFHQCDAGWLADQTVRYPIHTPREGCYGDKDEFPGVRTYGIRDTNETYDVYCFAEEMEGEVFYATSPEKFTFQEAANECRRLGARLATTGQLYLAWQAGMDMCSAGWLADRSVRYPISKARPNCGGNLLGVRTVYVHANQTGYPDPSSRYDAICYTGEDFVDIPENFFGVGGEEDITVQTVTWPDMELPLPRNITEGEARGSVILTVKPIFEVSPSPLEPEEPFTFAPEIGATAFAEVENETGEATRPWGFPTPGLGPATAFTSEDLVVQVTAVPGQPHLPGGVVFHYRPGPTRYSLTFEEAQQACLRTGAVIASPEQLQAAYEAGYEQCDAGWLRDQTVRYPIVSPRTPCVGDKDSSPGVRTYGVRPSTETYDVYCFVDRLEGEVFFATRLEQFTFQEALEFCESHNATLATTGQLYAAWSRGLDKCYAGWLADGSLRYPIVTPRPACGGDKPGVRTVYLYPNQTGLPDPLSRHHAFCFRGISAVPSPGEEEGGTPTSPSGVEEWIVTQVVPGVAAVPVEEETTAVPSGETTAILEFTTEPENQTEWEPAYTPVGTSPLPGILPTWPPTGAATEESTEGPSATEVPSASEEPSPSEVPFPSEEPSPSEEPFPSVRPFPSVELFPSEEPFPSKEPSPSEEPSASEEPYTPSPPVPSWTELPSSGEESGAPDVSGDFTGSGDVSGHLDFSGQLSGDRASGLPSGDLDSSGLTSTVGSGLPVESGLPSGDEERIEWPSTPTVGELPSGAEILEGSASGVGDLSGLPSGEVLETSASGVGDLSGLPSGEVLETTAPGVEDISGLPSGEVLETTAPGVEDISGLPSGEVLETTAPGVEDISGLPSGEVLETTAPGVEDISGLPSGEVLETTAPGVEDISGLPSGEVLETTAPGVEDISGLPSGEVLETAAPGVEDISGLPSGEVLETAAPGVEDISGLPSGEVLETAAPGVEDISGLPSGEVLETAAPGVEDISGLPSGEVLETAAPGVEDISGLPSGEVLETAAPGVEDISGLPSGEVLETAAPGVEDISGLPSGEVLETAAPGVEDISGLPSGEVLETAAPGVEDISGLPSGEVLETAAPGVEDISGLPSGEVLETAAPGVEDISGLPSGEVLETAAPGVEDISGLPSGEVLETAAPGVEDISGLPSGEVLETAAPGVEDISGLPSGEVLETAAPGVEDISGLPSGEVLETAAPGVEDISGLPSGEVLETTAPGVEEISGLPSGEVLETTAPGVDEISGLPSGEVLETTAPGVEEISGLPSGEVLETSTSAVGDLSGLPSGGEVLEISVSGVEDISGLPSGEVVETSASGIEDVSELPSGEGLETSASGVEDLSRLPSGEEVLEISASGFGDLSGLPSGGEGLETSASEVGTDLSGLPSGREGLETSASGAEDLSGLPSGKEDLVGSASGDLDLGKLPSGTLGSGQAPETSGLPSGFSGEYSGVDLGSGPPSGLPDFSGLPSGFPTVSLVDSTLVEVVTASTASELEGRGTIGISGAGEISGLPSSELDISGRASGLPSGTELSGQASGSPDVSGEIPGLFGVSGQPSGFPDTSGETSGVTELSGLSSGQPGISGEASGVLYGTSQPFGITDLSGETSGVPDLSGQPSGLPGFSGATSGVPDLVSGTTSGSGESSGITFVDTSLVEVAPTTFKEEEGLGSVELSGLPSGEADLSGKSGMVDVSGQFSGTVDSSGFTSQTPEFSGLPSGIAEVSGESSRAEIGSSLPSGAYYGSGTPSSFPTVSLVDRTLVESVTQAPTAQEAGEGPSGILELSGAHSGAPDMSGEHSGFLDLSGLQSGLIEPSGEPPGTPYFSGDFASTTNVSGESSVAMGTSGEASGLPEVTLITSEFVEGVTEPTISQELGQRPPVTHTPQLFESSGKVSTAGDISGATPVLPGSGVEVSSVPESSSETSAYPEAGFGASAAPEASREDSGSPDLSETTSAFHEANLERSSGLGVSGSTLTFQEGEASAAPEVSGESTTTSDVGTEAPGLPSATPTASGDRTEISGDLSGHTSQLGVVISTSIPESEWTQQTQRPAETHLEIESSSLLYSGEETHTVETATSPTDASIPASPEWKRESESTAAAPARSCAEEPCGAGTCKETEGHVICLCPPGYTGEHCNIDQEVCEEGWNKYQGHCYRHFPDRETWVDAERRCREQQSHLSSIVTPEEQEFVNNNAQDYQWIGLNDRTIEGDFRWSDGHPMQFENWRPNQPDNFFAAGEDCVVMIWHEKGEWNDVPCNYHLPFTCKKGTVACGEPPVVEHARTFGQKKDRYEINSLVRYQCTEGFVQRHMPTIRCQPSGHWEEPQITCTDPTTYKRRLQKRSSRHPRRSRPSTAH

SEQ ID NO: 103 - protein, 2492 aa, Homo sapiens
MTTLLWVFVTLRVITAAVTVETSDHDNSLSVSIPQPSPLRVLLGTSLTIPCYFIDPMHPVTTAPSTAPLAPRIKWSRVSKEKEVVLLVATEGRVRVNSAYQDKVSLPNYPAIPSDATLEVQSLRSNDSGVYRCEVMHGIEDSEATLEVVVKGIVFHYRAISTRYTLDFDRAQRACLQNSAIIATPEQLQAAYEDGFHQCDAGWLADQTVRYPIHTPREGCYGDKDEFPGVRTYGIRDTNETYDVYCFAEEMEGEVFYATSPEKFTFQEAANECRRLGARLATTGQLYLAWQAGMDMCSAGWLADRSVRYPISKARPNCGGNLLGVRTVYVHANQTGYPDPSSRYDAICYTGEDFVDIPENFFGVGGEEDITVQTVTWPDMELPLPRNITEGEARGSVILTVKPIFEVSPSPLEPEEPFTFAPEIGATAFAEVENETGEATRPWGFPTPGLGPATAFTSEDLVVQVTAVPGQPHLPGGVVFHYRPGPTRYSLTFEEAQQACLRTGAVIASPEQLQAAYEAGYEQCDAGWLRDQTVRYPIVSPRTPCVGDKDSSPGVRTYGVRPSTETYDVYCFVDRLEGEVFFATRLEQFTFQEALEFCESHNATLATTGQLYAAWSRGLDKCYAGWLADGSLRYPIVTPRPACGGDKPGVRTVYLYPNQTGLPDPLSRHHAFCFRGISAVPSPGEEEGGTPTSPSGVEEWIVTQVVPGVAAVPVEEETTAVPSGETTAILEFTTEPENQTEWEPAYTPVGTSPLPGILPTWPPTGAATEESTEGPSATEVPSASEEPSPSEVPFPSEEPSPSEEPFPSVRPFPSVELFPSEEPFPSKEPSPSEEPSASEEPYTPSPPVPSWTELPSSGEESGAPDVSGDFTGSGDVSGHLDFSGQLSGDRASGLPSGDLDSSGLTSTVGSGLPVESGLPSGDEERIEWPSTPTVGELPSGAEILEGSASGVGDLSGLPSGEVLETSASGVGDLSGLPSGEVLETTAPGVEDISGLPSGEVLETTAPGVEDISGLPSGEVLETTAPGVEDISGLPSGEVLETTAPGVEDISGLPSGEVLETTAPGVEDISGLPSGEVLETTAPGVEDISGLPSGEVLETAAPGVEDISGLPSGEVLETAAPGVEDISGLPSGEVLETAAPGVEDISGLPSGEVLETAAPGVEDISGLPSGEVLETAAPGVEDISGLPSGEVLETAAPGVEDISGLPSGEVLETAAPGVEDISGLPSGEVLETAAPGVEDISGLPSGEVLETAAPGVEDISGLPSGEVLETAAPGVEDISGLPSGEVLETAAPGVEDISGLPSGEVLETAAPGVEDISGLPSGEVLETAAPGVEDISGLPSGEVLETAAPGVEDISGLPSGEVLETAAPGVEDISGLPSGEVLETAAPGVEDISGLPSGEVLETTAPGVEEISGLPSGEVLETTAPGVDEISGLPSGEVLETTAPGVEEISGLPSGEVLETSTSAVGDLSGLPSGGEVLEISVSGVEDISGLPSGEVVETSASGIEDVSELPSGEGLETSASGVEDLSRLPSGEEVLEISASGFGDLSGLPSGGEGLETSASEVGTDLSGLPSGREGLETSASGAEDLSGLPSGKEDLVGSASGDLDLGKLPSGTLGSGQAPETSGLPSGFSGEYSGVDLGSGPPSGLPDFSGLPSGFPTVSLVDSTLVEVVTASTASELEGRGTIGISGAGEISGLPSSELDISGRASGLPSGTELSGQASGSPDVSGEIPGLFGVSGQPSGFPDTSGETSGVTELSGLSSGQPGISGEASGVLYGTSQPFGITDLSGETSGVPDLSGQPSGLPGFSGATSGVPDLVSGTTSGSGESSGITFVDTSLVEVAPTTFKEEEGLGSVELSGLPSGEADLSGKSGMVDVSGQFSGTVDSSGFTSQTPEFSGLPSGIAEVSGESSRAEIGSSLPSGAYYGSGTPSSFPTVSLVDRTLVESVTQAPTAQEAGEGPSGILELSGAHSGAPDMSGEHSGFLDLSGLQSGLIEPSGEPPGTPYFSGDFASTTNVSGESSVAMGTSGEASGLPEVTLITSEFVEGVTEPTISQELGQRPPVTHTPQLFESSGKVSTAGDISGATPVLPGSGVEVSSVPESSSETSAYPEAGFGASAAPEASREDSGSPDLSETTSAFHEANLERSSGLGVSGSTLTFQEGEASAAPEVSGESTTTSDVGTEAPGLPSATPTASGDRTEISGDLSGHTSQLGVVISTSIPESEWTQQTQRPAETHLEIESSSLLYSGEETHTVETATSPTDASIPASPEWKRESESTAADQEVCEEGWNKYQGHCYRHFPDRETWVDAERRCREQQSHLSSIVTPEEQEFVNNNAQDYQWIGLNDRTIEGDFRWSDGHPMQFENWRPNQPDNFFAAGEDCVVMIWHEKGEWNDVPCNYHLPFTCKKGTVACGEPPVVEHARTFGQKKDRYEINSLVRYQCTEGFVQRHMPTIRCQPSGHWEEPQITCTDPTTYKRRLQKRSSRHPRRSRPSTAH

SEQ ID NO: 104 - protein, 721 aa, Homo sapiens
MTTLLWVFVTLRVITAAVTVETSDHDNSLSVSIPQPSPLRVLLGTSLTIPCYFIDPMHPVTTAPSTAPLAPRIKWSRVSKEKEVVLLVATEGRVRVNSAYQDKVSLPNYPAIPSDATLEVQSLRSNDSGVYRCEVMHGIEDSEATLEVVVKGIVFHYRAISTRYTLDFDRAQRACLQNSAIIATPEQLQAAYEDGFHQCDAGWLADQTVRYPIHTPREGCYGDKDEFPGVRTYGIRDTNETYDVYCFAEEMEGEVFYATSPEKFTFQEAANECRRLGARLATTGQLYLAWQAGMDMCSAGWLADRSVRYPISKARPNCGGNLLGVRTVYVHANQTGYPDPSSRYDAICYTGEDFVDIPENFFGVGGEEDITVQTVTWPDMELPLPRNITEGEARGSVILTVKPIFEVSPSPLEPEEPFTFAPEIGATAFAEVENETGEATRPWGFPTPGLGPATAFTSEDLVVQVTAVPGQPHLPGGVVFHYRPGPTRYSLTFEEAQQACLRTGAVIASPEQLQAAYEAGYEQCDAGWLRDQTVRYPIVSPRTPCVGDKDSSPGVRTYGVRPSTETYDVYCFVDRLEGEVFFATRLEQFTFQEALEFCESHNATLATTGQLYAAWSRGLDKCYAGWLADGSLRYPIVTPRPACGGDKPGVRTVYLYPNQTGLPDPLSRHHAFCFRGMQPHFGSNSPFCLERTPLGSPDPATTQYPIHQSKKMSVPLGQSQL

SEQ ID NO: 105 - protein, 2530 aa, Homo sapiens; identical to SEQ ID NO: 102

SEQ ID NO: 106 - protein, 2568 aa, Homo sapiens
MTTLLWVFVTLRVITAAVTVETSDHDNSLSVSIPQPSPLRVLLGTSLTIPCYFIDPMHPVTTAPSTAPLAPRIKWSRVSKEKEVVLLVATEGRVRVNSAYQDKVSLPNYPAIPSDATLEVQSLRSNDSGVYRCEVMHGIEDSEATLEVVVKGIVFHYRAISTRYTLDFDRAQRACLQNSAIIATPEQLQAAYEDGFHQCDAGWLADQTVRYPIHTPREGCYGDKDEFPGVRTYGIRDTNETYDVYCFAEEMEGEVFYATSPEKFTFQEAANECRRLGARLATTGQLYLAWQAGMDMCSAGWLADRSVRYPISKARPNCGGNLLGVRTVYVHANQTGYPDPSSRYDAICYTGEDFVDIPENFFGVGGEEDITVQTVTWPDMELPLPRNITEGEARGSVILTVKPIFEVSPSPLEPEEPFTFAPEIGATAFAEVENETGEATRPWGFPTPGLGPATAFTSEDLVVQVTAVPGQPHLPGGVVFHYRPGPTRYSLTFEEAQQACLRTGAVIASPEQLQAAYEAGYEQCDAGWLRDQTVRYPIVSPRTPCVGDKDSSPGVRTYGVRPSTETYDVYCFVDRLEGEVFFATRLEQFTFQEALEFCESHNATLATTGQLYAAWSRGLDKCYAGWLADGSLRYPIVTPRPACGGDKPGVRTVYLYPNQTGLPDPLSRHHAFCFRGISAVPSPGEEEGGTPTSPSGVEEWIVTQVVPGVAAVPVEEETTAVPSGETTAILEFTTEPENQTEWEPAYTPVGTSPLPGILPTWPPTGAATEESTEGPSATEVPSASEEPSPSEVPFPSEEPSPSEEPFPSVRPFPSVELFPSEEPFPSKEPSPSEEPSASEEPYTPSPPVPSWTELPSSGEESGAPDVSGDFTGSGDVSGHLDFSGQLSGDRASGLPSGDLDSSGLTSTVGSGLPVESGLPSGDEERIEWPSTPTVGELPSGAEILEGSASGVGDLSGLPSGEVLETSASGVGDLSGLPSGEVLETTAPGVEDISGLPSGEVLETTAPGVEDISGLPSGEVLETTAPGVEDISGLPSGEVLETTAPGVEDISGLPSGEVLETTAPGVEDISGLPSGEVLETTAPGVEDISGLPSGEVLETAAPGVEDISGLPSGEVLETAAPGVEDISGLPSGEVLETAAPGVEDISGLPSGEVLETAAPGVEDISGLPSGEVLETAAPGVEDISGLPSGEVLETAAPGVEDISGLPSGEVLETAAPGVEDISGLPSGEVLETAAPGVEDISGLPSGEVLETAAPGVEDISGLPSGEVLETAAPGVEDISGLPSGEVLETAAPGVEDISGLPSGEVLETAAPGVEDISGLPSGEVLETAAPGVEDISGLPSGEVLETAAPGVEDISGLPSGEVLETAAPGVEDISGLPSGEVLETAAPGVEDISGLPSGEVLETTAPGVEEISGLPSGEVLETTAPGVDEISGLPSGEVLETTAPGVEEISGLPSGEVLETSTSAVGDLSGLPSGGEVLEISVSGVEDISGLPSGEVVETSASGIEDVSELPSGEGLETSASGVEDLSRLPSGEEVLEISASGFGDLSGLPSGGEGLETSASEVGTDLSGLPSGREGLETSASGAEDLSGLPSGKEDLVGSASGDLDLGKLPSGTLGSGQAPETSGLPSGFSGEYSGVDLGSGPPSGLPDFSGLPSGFPTVSLVDSTLVEVVTASTASELEGRGTIGISGAGEISGLPSSELDISGRASGLPSGTELSGQASGSPDVSGEIPGLFGVSGQPSGFPDTSGETSGVTELSGLSSGQPGISGEASGVLYGTSQPFGITDLSGETSGVPDLSGQPSGLPGFSGATSGVPDLVSGTTSGSGESSGITFVDTSLVEVAPTTFKEEEGLGSVELSGLPSGEADLSGKSGMVDVSGQFSGTVDSSGFTSQTPEFSGLPSGIAEVSGESSRAEIGSSLPSGAYYGSGTPSSFPTVSLVDRTLVESVTQAPTAQEAGEGPSGILELSGAHSGAPDMSGEHSGFLDLSGLQSGLIEPSGEPPGTPYFSGDFASTTNVSGESSVAMGTSGEASGLPEVTLITSEFVEGVTEPTISQELGQRPPVTHTPQLFESSGKVSTAGDISGATPVLPGSGVEVSSVPESSSETSAYPEAGFGASAAPEASREDSGSPDLSETTSAFHEANLERSSGLGVSGSTLTFQEGEASAAPEVSGESTTTSDVGTEAPGLPSATPTASGDRTEISGDLSGHTSQLGVVISTSIPESEWTQQTQRPAETHLEIESSSLLYSGEETHTVETATSPTDASIPASPEWKRESESTAAAPARSCAEEPCGAGTCKETEGHVICLCPPGYTGEHCNIDIDECLSSPCLNGATCVDAIDSFTCLCLPSYEGDLCEIDQEVCEEGWNKYQGHCYRHFPDRETWVDAERRCREQQSHLSSIVTPEEQEFVNNNAQDYQWIGLNDRTIEGDFRWSDGHPMQFENWRPNQPDNFFAAGEDCVVMIWHEKGEWNDVPCNYHLPFTCKKGTVACGEPPVVEHARTFGQKKDRYEINSLVRYQCTEGFVQRHMPTIRCQPSGHWEEPQITCTDPTTYKRRLQKRSSRHPRRSRPSTAH

SEQ ID NO: 107 - protein, 2473 aa, Homo sapiens
MTTLLWVFVTLRVITAAVTVETSDHDNSLSVSIPQPSPLRVLLGTSLTIPCYFIDPMHPVTTAPSTAPLAPRIKWSRVSKEKEVVLLVATEGRVRVNSAYQDKVSLPNYPAIPSDATLEVQSLRSNDSGVYRCEVMHGIEDSEATLEVVVKGIVFHYRAISTRYTLDFDRAQRACLQNSAIIATPEQLQAAYEDGFHQCDAGWLADQTVRYPIHTPREGCYGDKDEFPGVRTYGIRDTNETYDVYCFAEEMEGEVFYATSPEKFTFQEAANECRRLGARLATTGQLYLAWQAGMDMCSAGWLADRSVRYPISKARPNCGGNLLGVRTVYVHANQTGYPDPSSRYDAICYTGEDFVDIPENFFGVGGEEDITVQTVTWPDMELPLPRNITEGEARGSVILTVKPIFEVSPSPLEPEEPFTFAPEIGATAFAEVENETGEATRPWGFPTPGLGPATAFTSEDLVVQVTAVPGQPHLPGGVVFHYRPGPTRYSLTFEEAQQACLRTGAVIASPEQLQAAYEAGYEQCDAGWLRDQTVRYPIVSPRTPCVGDKDSSPGVRTYGVRPSTETYDVYCFVDRLEGEVFFATRLEQFTFQEALEFCESHNATLATTGQLYAAWSRGLDKCYAGWLADGSLRYPIVTPRPACGGDKPGVRTVYLYPNQTGLPDPLSRHHAFCFRGISAVPSPGEEEGGTPTSPSGVEEWIVTQVVPGVAAVPVEEETTAVPSGETTAILEFTTEPENQTEWEPAYTPVGTSPLPGILPTWPPTGAATEESTEGPSATEVPSASEEPSPSEVPFPSEEPSPSEEPFPSVRPFPSVELFPSEEPFPSKEPSPSEEPSASEEPYTPSPPVPSWTELPSSGEESGAPDVSGDFTGSGDVSGHLDFSGQLSGDRASGLPSGDLDSSGLTSTVGSGLPVESGLPSGDEERIEWPSTPTVGELPSGAEILEGSASGVGDLSGLPSGEVLETSASGVGDLSGLPSGEVLETTAPGVEDISGLPSGEVLETTAPGVEDISGLPSGEVLETTAPGVEDISGLPSGEVLETTAPGVEDISGLPSGEVLETTAPGVEDISGLPSGEVLETAAPGVEDISGLPSGEVLETAAPGVEDISGLPSGEVLETAAPGVEDISGLPSGEVLETAAPGVEDISGLPSGEVLETAAPGVEDISGLPSGEVLETAAPGVEDISGLPSGEVLETAAPGVEDISGLPSGEVLETAAPGVEDISGLPSGEVLETAAPGVEDISGLPSGEVLETAAPGVEDISGLPSGEVLETAAPGVEDISGLPSGEVLETAAPGVEDISGLPSGEVLETAAPGVEDISGLPSGEVLETAAPGVEDISGLPSGEVLETAAPGVEDISGLPSGEVLETAAPGVEDISGLPSGEVLETTAPGVEEISGLPSGEVLETTAPGVDEISGLPSGEVLETTAPGVEEISGLPSGEVLETSTSAVGDLSGLPSGGEVLEISVSGVEDISGLPSGEVVETSASGIEDVSELPSGEGLETSASGVEDLSRLPSGEEVLEISASGFGDLSGLPSGGEGLETSASEVGTDLSGLPSGREGLETSASGAEDLSGLPSGKEDLVGSASGDLDLGKLPSGTLGSGQAPETSGLPSGFSGEYSGVDLGSGPPSGLPDFSGLPSGFPTVSLVDSTLVEVVTASTASELEGRGTIGISGAGEISGLPSSELDISGRASGLPSGTELSGQASGSPDVSGEIPGLFGVSGQPSGFPDTSGETSGVTELSGLSSGQPGISGEASGVLYGTSQPFGITDLSGETSGVPDLSGQPSGLPGFSGATSGVPDLVSGTTSGSGESSGITFVDTSLVEVAPTTFKEEEGLGSVELSGLPSGEADLSGKSGMVDVSGQFSGTVDSSGFTSQTPEFSGLPSGIAEVSGESSRAEIGSSLPSGAYYGSGTPSSFPTVSLVDRTLVESVTQAPTAQEAGEGPSGILELSGAHSGAPDMSGEHSGFLDLSGLQSGLIEPSGEPPGTPYFSGDFASTTNVSGESSVAMGTSGEASGLPEVTLITSEFVEGVTEPTISQELGQRPPVTHTPQLFESSGKVSTAGDISGATPVLPGSGVEVSSVPESSSETSAYPEAGFGASAAPEASREDSGSPDLSETTSAFHEANLERSSGLGVSGSTLTFQEGEASAAPEVSGESTTTSDVGTEAPGLPSATPTASGDRTEISGDLSGHTSQLGVVISTSIPESEWTQQTQRPAETHLEIESSSLLYSGEETHTVETATSPTDASIPASPEWKRESESTAADQEVCEEGWNKYQGHCYRHFPDRETWVDAERRCREQQSHLSSIVTPEEQEFVNNNAQDYQWIGLNDRTIEGDFRWSDGHPMQFENWRPNQPDNFFAAGEDCVVMIWHEKGEWNDVPCNYHLPFTCKKGTVACGEPPVVEHARTFGQKKDRYEINSLVRYQCTEGFVQRHMPTIRCQPSGHWEEPQITCTDPTTYKRRLQKRSSRHPRRSRPSTAH

SEQ ID NO: 108 - protein, 156 aa, Homo sapiens
  SITE 1: note = misc_feature - Xaa can be any naturally occurring amino acid
XWNDVPCNYHLPFTCKKGTVACGEPPVVEHARTFGQKKDRYEINSLVRYQCTEGFVQRHMPTIRCQPSGHWEEPQITCTDREHHPGHLAEHRPPPTNADYRSGAHGTLGGAAPAQPTEKSFQDAPRTLSPGACQADVHPTQTVSSSCRFLSYKESH

SEQ ID NO: 109 - protein, 282 aa, Homo sapiens
LDMETTYSVATVCHPNGSCLQLEPDLTNVMATSRKYEDLLWAWEGWRDKAGRAILQFYPKYVELINQAARLNGYVDAGDSWRSMYETPSLEQDLERLFQELQPLYLNLHAYVRRALHRHYGAQHINLEGPIPAHLLGNMWAQTWSNIYDLVVPFPSAPSMDTTEAMLKQGWTPRRMFKEADDFFTSLGLLPVPPEFWNKSMLEKPTDGREVVCHASAWDFYNEHDINFLMKMALDKIAFIPFSYLVDQWRWRVFDGSITKENYNQEWWSLRLKYQGLCPPVP

SEQ ID NO: 110 - protein, 314 aa, Homo sapiens
MDEGGCSQAAPAFAEGAGLGSGAPALSGSCLLTSGRCRCHRHRTALSIHPPLARPLFWSQFLLHHSHEADSLQKEEARLPQTKEEAALLSQEFAEAWGQKAKELYEPIWQNFTDPQLRRIIGAVRTLGSANLPLAKRQQYNALLSNMSRIYSTAKVCLPNKTATCWSLDPDLTNILASSRSYAMLLFAWEGWHNAAGIPLKPLYEDFTALSNEAYKQDGFTDTGAYWRSWYNSPTFEDDLEHLYQQLEPLYLNLHAFVRRALHRRYGDRYINLRGPIPAHLLGDMWAQSWENIYDMVVPFPDKPNLDVTSTMLQ

SEQ ID NO: 111 - protein, 168 aa, Homo sapiens
MGAASGRRGPGLLLPLPLLLLLPPQPALALDPGLQPGNFSADEAGAQLFAQSYNSSAEQVLFQSVAASWAHDTNITAENARRQEEAALLSQEFAEAWGQKAKELYEPIWQNFTDPQLRRIIGAVRTLGSANLPLAKRQQISPTSWLPREATPCSCLPGRAGTTLRASR

SEQ ID NO: 112 - protein, 1306 aa, Homo sapiens
MGAASGRRGPGLLLPLPLLLLLPPQPALALDPGLQPGNFSADEAGAQLFAQSYNSSAEQVLFQSVAASWAHDTNITAENARRQEEAALLSQEFAEAWGQKAKELYEPIWQNFTDPQLRRIIGAVRTLGSANLPLAKRQQYNALLSNMSRIYSTAKVCLPNKTATCWSLDPDLTNILASSRSYAMLLFAWEGWHNAAGIPLKPLYEDFTALSNEAYKQDGFTDTGAYWRSWYNSPTFEDDLEHLYQQLEPLYLNLHAFVRRALHRRYGDRYINLRGPIPAHLLGDMWAQSWENIYDMVVPFPDKPNLDVTSTMLQQGWNATHMFRVAEEFFTSLELSPMPPEFWEGSMLEKPADGREVVCHASAWDFYNRKDFRIKQCTRVTMDQLSTVHHEMGHIQYYLQYKDLPVSLRRGANPGFHEAIGDVLALSVSTPEHLHKIGLLDRVTNDTESDINYLLKMALEKIAFLPFGYLVDQWRWGVFSGRTPPSRYNFDWWYLRTKYQGICPPVTRNETHFDAGAKFHVPNVTPYIRYFVSFVLQFQFHEALCKEAGYEGPLHQCDIYRSTKAGAKLRKVLQAGSSRPWQEVLKDMVGLDALDAQPLLKYFQPVTQWLQEQNQQNGEVLGWPEYQWHPPLPDNYPEGIDLVTDEAEASKFVEEYDRTSQVVWNEYAEANWNYNTNITTETSKILLQKNMQIANHTLKYGTQARKFDVNQLQNTTIKRIIKKVQDLERAALPAQELEEYNKILLDMETTYSVATVCHPNGSCLQLEPDLTNVMATSRKYEDLLWAWEGWRDKAGRAILQFYPKYVELINQAARLNGYVDAGDSWRSMYETPSLEQDLERLFQELQPLYLNLHAYVRRALHRHYGAQHINLEGPIPAHLLGNMWAQTWSNIYDLVVPFPSAPSMDTTEAMLKQGWTPRRMFKEADDFFTSLGLLPVPPEFWNKSMLEKPTDGREVVCHASAWDFYNGKDFRIKQCTTVNLEDLVVAHHEMGHIQYFMQYKDLPVALREGANPGFHEAIGDVLALSVSTPKHLHSLNLLSSEGGSDEHDINFLMKMALDKIAFIPFSYLVDQWRWRVFDGSITKENYNQEWWSLRLKYQGLCPPVPRTQGDFDPGAKFHIPSSVPYIRYFVSFIIQFQFHEALCQAAGHTGPLHKCDIYQSKEAGQRLATAMKLGFSRPWPEAMQLITGQPNMSASAMLSYFKPLLDWLRTENELHGEKLGWPQYNWTPNSARSEGPLPDSGRVSFLGLDLDAQQARVGQWLLLFLGIALLVATLGLSQRLFSIRHRSLHRHSHGPQFGSEVELRHS

SEQ ID NO: 113 - protein, 1242 aa, Homo sapiens
MGAASGRRGPGLLLPLPLLLLLPPQPALALDPGLQPGNFSADEAGAQLFAQSYNSSAEQVLFQSVAASWAHDTNITAENARRQEEAALLSQEFAEAWGQKAKELYEPIWQNFTDPQLRRIIGAVRTLGSANLPLAKRQQYNALLSNMSRIYSTAKVCLPNKTATCWSLDPDLTNILASSRSYAMLLFAWEGWHNAAGIPLKPLYEDFTALSNEAYKQDGFTDTGAYWRSWYNSPTFEDDLEHLYQQLEPLYLNLHAFVRRALHRRYGDRYINLRGPIPAHLLGDMWAQSWENIYDMVVPFPDKPNLDVTSTMLQQGWNATHMFRVAEEFFTSLELSPMPPEFWEGSMLEKPADGREVVCHASAWDFYNRKDFRIKQCTRVTMDQLSTVHHEMGHIQYYLQYKDLPVSLRRGANPGFHEAIGDVLALSVSTPEHLHKIGLLDRVTNDTESDINYLLKMALEKIAFLPFGYLVDQWRWGVFSGRTPPSRYNFDWWYLRTKYQGICPPVTRNETHFDAGAKFHVPNVTPYIRYFVSFVLQFQFHEALCKEAGYEGPLHQCDIYRSTKAGAKLRKVLQAGSSRPWQEVLKDMVGLDALDAQPLLKYFQPVTQWLQEQNQQNGEVLGWPEYQWHPPLPDNYPEGIDLVTDEAEASKFVEEYDRTSQVVWNEYAEANWNYNTNITTETSKILLQKNMQIANHTLKYGTQARKFDVNQLQNTTIKRIIKKVQDLERAALPAQELEEYNKILLDMETTYSVATVCHPNGSCLQLEPDLTNVMATSRKYEDLLWAWEGWRDKAGRAILQFYPKYVELINQAARLNGYVDAGDSWRSMYETPSLEQDLERLFQELQPLYLNLHAYVRRALHRHYGAQHINLEGPIPAHLLGNMWAQTWSNIYDLVVPFPSAPSMDTTEAMLKQGWTPRRMFKEADDFFTSLGLLPVPPEFWNKSMLEKPTDGREVVCHASAWDFYNGKDFRIKQCTTVNLEDLVVAHHEMGHIQYFMQYKDLPVALREGANPGFHEAIGDVLALSVSTPKHLHSLNLLSSEGGSDEHDINFLMKMALDKIAFIPFSYLVDQWRWRVFDGSITKENYNQEWWSLRLKYQGLCPPVPRTQGDFDPGAKFHIPSSVPYIRYFVSFIIQFQFHEALCQAAGHTGPLHKCDIYQSKEAGQRLATAMKLGFSRPWPEAMQLITGQPNMSASAMLSYFKPLLDWLRTENELHGEKLGWPQYNWTPNSGTATHPTSSLGS

SEQ ID NO: 114 - protein, 36 aa, Homo sapiens
MGQGWATAGLPSLLFLLLCYGHPLLVPSQEASQQTW

SEQ ID NO: 115 - protein, 36 aa, Homo sapiens; identical to SEQ ID NO: 114

SEQ ID NO: 116 - protein, 145 aa, Homo sapiens
MGQGWATAGLPSLLFLLLCYGHPLLVPSQEASQQVTVTHGTSSQATTSSQTTTHQATAHQTSAQSPNLVTDEAEASKFVEEYDRTSQVVWNEYAEANWNYNTNITTETSKILGLYDTWGSSLLCPCLDMCCLTAGIQGGCRRTCK

SEQ ID NO: 117 - protein, 208 aa, Homo sapiens
MGQGWATAGLPSLLFLLLCYGHPLLVPSQEASQQVTVTHGTSSQATTSSQTTTHQATAHQTSAQSPNLVTDEAEASKFVEEYDRTSQVVWNEYAEANWNYNTNITTETSKILLQKNMQIANHTLKYGTQARKFDVNQLQNTTIKRIIKKVQDLERAALPAQELEEYNKILLDMETTYSVATVCHPNGSCLQLEPALKFSELPLQAEVS

SEQ ID NO: 118 - protein, 732 aa, Homo sapiens
MGQGWATAGLPSLLFLLLCYGHPLLVPSQEASQQVTVTHGTSSQATTSSQTTTHQATAHQTSAQSPNLVTDEAEASKFVEEYDRTSQVVWNEYAEANWNYNTNITTETSKILLQKNMQIANHTLKYGTQARKFDVNQLQNTTIKRIIKKVQDLERAALPAQELEEYNKILLDMETTYSVATVCHPNGSCLQLEPDLTNVMATSRKYEDLLWAWEGWRDKAGRAILQFYPKYVELINQAARLNGYVDAGDSWRSMYETPSLEQDLERLFQELQPLYLNLHAYVRRALHRHYGAQHINLEGPIPAHLLGNMWAQTWSNIYDLVVPFPSAPSMDTTEAMLKQGWTPRRMFKEADDFFTSLGLLPVPPEFWNKSMLEKPTDGREVVCHASAWDFYNGKDFRIKQCTTVNLEDLVVAHHEMGHIQYFMQYKDLPVALREGANPGFHEAIGDVLALSVSTPKHLHSLNLLSSEGGSDEHDINFLMKMALDKIAFIPFSYLVDQWRWRVFDGSITKENYNQEWWSLRLKYQGLCPPVPRTQGDFDPGAKFHIPSSVPYIRYFVSFIIQFQFHEALCQAAGHTGPLHKCDIYQSKEAGQRLATAMKLGFSRPWPEAMQLITGQPNMSASAMLSYFKPLLDWLRTENELHGEKLGWPQYNWTPNSARSEGPLPDSGRVSFLGLDLDAQQARVGQWLLLFLGIALLVATLGLSQRLFSIRHRSLHRHSHGPQFGSEVELRHS

SEQ ID NO: 119 - protein, 691 aa, Homo sapiens
MGQGWATAGLPSLLFLLLCYGHPLLVPSQEASQQVTVTHGTSSQATTSSQTTTHQATAHQTSAQSPNLVTDEAEASKFVEEYDRTSQVVWNEYAEANWNYNTNITTETSKILLQKNMQIANHTLKYGTQARKFDVNQLQNTTIKRIIKKVQDLERAALPAQELEEYNKILLDMETTYSVATVCHPNGSCLQLEPDLTNVMATSRKYEDLLWAWEGWRDKAGRAILQFYPKYVELINQAARLNGYVDAGDSWRSMYETPSLEQDLERLFQELQPLYLNLHAYVRRALHRHYGAQHINLEGPIPAHLLGNMWAQTWSNIYDLVVPFPSAPSMDTTEAMLKQGWTPRRMFKEADDFFTSLGLLPVPPEFWNKSMLEKPTDGREVVCHASAWDFYNGKDFRIKQCTTVNLEDLVVAHHEMGHIQYFMQYKDLPVALREGANPGFHEAIGDVLALSVSTPKHLHSLNLLSSEGGSDEHDINFLMKMALDKIAFIPFSYLVDQWRWRVFDGSITKENYNQEWWSLRLKYQGLCPPVPRTQGDFDPGAKFHIPSSVPYIRTAMKLGFSRPWPEAMQLITGQPNMSASAMLSYFKPLLDWLRTENELHGEKLGWPQYNWTPNSARSEGPLPDSGRVSFLGLDLDAQQARVGQWLLLFLGIALLVATLGLSQRLFSIRHRSLHRHSHGPQFGSEVELRHS

SEQ ID NO: 120 - protein, 119 aa, Homo sapiens
  SITE 1: note = misc_feature - Xaa can be any naturally occurring amino acid
XQAGSSRPWQEVLKDMVGLDALDAQPLLKYFQPVTQWLQEQNQQNGEVLGWPEYQWHPPLPDNYPEGIGDSHPWDKQPGNNQQPDNHPPGDGPPDISPEPKWDHAGEGQGARGGRGGAG

SEQ ID NO: 121 - protein, 138 aa, Homo sapiens
  SITE 1: note = misc_feature - Xaa can be any naturally occurring amino acid
XRTQGDFDPGAKFHIPSSVPYIRYFVSFIIQFQFHEALCQAAGHTGPLHKCDIYQSKEAGQRLATAMKLGFSRPWPEAMQLITGQPNMSASAMLSYFKPLLDWLRTENELHGEKLGWPQYNWTPNSGTATHPTSSLGS

SEQ ID NO: 122 - protein, 94 aa, Homo sapiens
MLGLVMSCPDRTLVTKVRSHPSGNQHRPTRGGSRSFHCRRGVRPRPAALRVLPRCPAFSDAACPAAMRPPQCLLHTPSLASPLLLLLLWLLGGG

SEQ ID NO: 123 - protein, 55 aa, Homo sapiens
MRPPQCLLHTPSLASPLLLLLLWLLGGGVGAEGREDAELLVTVLRAPRCGTPTVS

SEQ ID NO: 124 - protein, 159 aa, Homo sapiens
MRPPQCLLHTPSLASPLLLLLLWLLGGGVGAEGREDAELLVTVRGGRLRGIRLKTPGGPVSAFLGIPFAEPPMGPRRFLPPEPKQPWSGVVDATTFQSVCYQYVDTLYPGFEGTEMWNPNRELSEDCLYLNVWTPYPRPTSPTPVLVWIYGGGFYSGAS

SEQ ID NO: 125 - protein, 614 aa, Homo sapiens
MRPPQCLLHTPSLASPLLLLLLWLLGGGVGAEGREDAELLVTVRGGRLRGIRLKTPGGPVSAFLGIPFAEPPMGPRRFLPPEPKQPWSGVVDATTFQSVCYQYVDTLYPGFEGTEMWNPNRELSEDCLYLNVWTPYPRPTSPTPVLVWIYGGGFYSGASSLDVYDGRFLVQAERTVLVSMNYRVGAFGFLALPGSREAPGNVGLLDQRLALQWVQENVAAFGGDPTSVTLFGESAGAASVGMHLLSPPSRGLFHRAVLQSGAPNGPWATVGMGEARRRATQLAHLVGCPPGGTGGNDTELVACLRTRPAQVLVNHEWHVLPQESVFRFSFVPVVDGDFLSDTPEALINAGDFHGLQVLVGVVKDEGSYFLVYGAPGFSKDNESLISRAEFLAGVRVGVPQVSDLAAEAVVLHYTDWLHPEDPARLREALSDVVGDHNVVCPVAQLAGRLAAQGARVYAYVFEHRASTLSWPLWMGVPHGYEIEFIFGIPLDPSRNYTAEEKIFAQRLMRYWANFARTGDPNEPRDPKAPQWPPYTAGAQQYVSLDLRPLEVRRGLRAQACAFWNRFLPKLLSATDTLDEAERQWKAEFHRWSSYMVHWKNQFDHYSKQDRCSDL

SEQ ID NO: 126 - protein, 617 aa, Homo sapiens
MRPPQCLLHTPSLASPLLLLLLWLLGGGVGAEGREDAELLVTVRGGRLRGIRLKTPGGPVSAFLGIPFAEPPMGPRRFLPPEPKQPWSGVVDATTFQSVCYQYVDTLYPGFEGTEMWNPNRELSEDCLYLNVWTPYPRPTSPTPVLVWIYGGGFYSGASSLDVYDGRFLVQAERTVLVSMNYRVGAFGFLALPGSREAPGNVGLLDQRLALQWVQENVAAFGGDPTSVTLFGESAGAASVGMHLLSPPSRGLFHRAVLQSGAPNGPWATVGMGEARRRATQLAHLVGCPPGGTGGNDTELVACLRTRPAQVLVNHEWHVLPQESVFRFSFVPVVDGDFLSDTPEALINAGDFHGLQVLVGVVKDEGSYFLVYGAPGFSKDNESLISRAEFLAGVRVGVPQVSDLAAEAVVLHYTDWLHPEDPARLREALSDVVGDHNVVCPVAQLAGRLAAQGARVYAYVFEHRASTLSWPLWMGVPHGYEIEFIFGIPLDPSRNYTAEEKIFAQRLMRYWANFARTGDPNEPRDPKAPQWPPYTAGAQQYVSLDLRPLEVRRGLRAQACAFWNRFLPKLLSATASEAPSTCPGFTHGEAAPRPGLPLPLLLLHQLLLLFLSHLRRL

SEQ ID NO: 127 - protein, 614 aa, Homo sapiens; identical to SEQ ID NO: 125

SEQ ID NO: 128 - protein, 614 aa, Homo sapiens; identical to SEQ ID NO: 125

SEQ ID NO: 129 - protein, 617 aa, Homo sapiens; identical to SEQ ID NO: 126

SEQ ID NO: 130 - protein, 435 aa, Homo sapiens [sequence omitted]

SEQ ID NO: 131 - protein, 398 aa, Homo sapiens [sequence omitted]

SEQ ID NO: 132 - protein, 526 aa, Homo sapiens
MRPPQCLLHTPSLASPLLLLLLWLLGGGVGAEGREDAELLVTVRGGRLRGIRLKTPGGPVSAFLGIPFAEPPMGPRRFLPPEPKQPWSGVVDATTFQSVCYQYVDTLYPGFEGTEMWNPNRELSEDCLYLNVWTPYPRPTSPTPVLVWIYGGGFYSGASSLDVYDGRFLVQAERTVLVSMNYRVGAFGFLALPGSREAPGNVGLLDQRLALQWVQENVAAFGGDPTSVTLFGESAGAASVGMHLLSPPSRGLFHRAVLQSGAPNGPWATVGMGEARRRATQLAHLVGCPPGGTGGNDTELVACLRTRPAQVLVNHEWHVLPQESVFRFSFVPVVDGDFLSDTPEALINAGDFHGLQLAGRLAAQGARVYAYVFEHRASTLSWPLWMGVPHGYEIEFIFGIPLDPSRNYTAEEKIFAQRLMRYWANFARTGDPNEPRDPKAPQWPPYTAGAQQYVSLDLRPLEVRRGLRAQACAFWNRFLPKLLSATDTLDEAERQWKAEFHRWSSYMVHWKNQFDHYSKQDRCSDL

SEQ ID NO: 133 - protein, 359 aa, Homo sapiens
MRPPQCLLHTPSLASPLLLLLLWLLGGGVGAEGREDAELLVTVRGGRLRGIRLKTPGGPVSAFLGIPFAEPPMGPRRFLPPEPKQPWSGVVDATTFQSVCYQYVDTLYPGFEGTEMWNPNRELSEDCLYLNVWTPYPRPTSPTPVLVWIYGGGFYSGASSLDVYDGRFLVQAERTVLVSMNYRVGAFGFLALPGSREAPGNVGLLDQRLALQWVQENVAAFGGDPTSVTLFGESAGAASVGMHLLSPPSRGLFHRAVLQSGAPNGPWATVGMGEARRRATQLAHLVGCPPGGTGGNDTELVACLRTRPAQVLVNHEWHVLPQESVFRFSFVPVVDGDFLSDTPEALINAGDFHGLQGSQ

SEQ ID NO: 134 - protein, 403 aa, Homo sapiens
MRPPQCLLHTPSLASPLLLLLLWLLGGGVGAEGREDAELLVTVRGGRLRGIRLKTPGGPVSAFLGIPFAEPPMGPRRFLPPEPKQPWSGVVDATTFQSVCYQYVDTLYPGFEGTEMWNPNRELSEDCLYLNVWTPYPRPTSPTPVLVWIYGGGFYSGASSLDVYDGRFLVQAERTVLVSMNYRVGAFGFLALPGSREAPGNVGLLDQRLALQWVQENVAAFGGDPTSVTLFGESAGAASVGMHLLSPPSRGLFHRAVLQSGAPNGPWATVGMGEARRRATQLAHLVGCPPGGTGGNDTELVACLRTRPAQVLVNHEWHVLPQESVFRFSFVPVVDGDFLSDTPEALINAGDFHGLQVLVGVVKDEGSYFLVYGAPGFSKDNESLISRAEFLAGVRVGVPQGSQ

SEQ ID NO: 135 - protein, 391 aa, Homo sapiens
MAGKRSGWSRAALLQLLLGVNLVVMPPTRARSLRFVTLEGMLQHWELGQALRQRYHGFLNTSYHRQEVYVRSTDFDRTLMSAEANLAGLFPPNGMQRFNPNISWQPIPVHTVPITEDRLLKFPLGPCPRYEQLQNETRQTPEYQNESSRNAQFLDMVANETGLTDLTLETVWNVYDTLFCEQTHGLRLPPWASPQTMQRLSRLKDFSFRFLFGIYQQAEKARLQGGVLLAQIRKNLTLMATTSQLPKLLVYSAHDTTLVALQMALDVYNGEQAPYASCHIFELYQEDSGNFSVEMYFRNESDKAPWPLSLPGCPHRCPLQDFLRLTEPVVPKDWQQECQLASGPADTEVIVALAVCGSILFLLIVLLLTVLFRMQAQPPGYRHVADGEDHA

SEQ ID NO: 136 - protein, 151 aa, Homo sapiens
MAGKRSGWSRAALLQLLLGVNLVVMPPTRARSLRFVTLLYRHGDRSPVKTYPKDPYQEEEWPQGFGQLTKEGMLQHWELGQALRQRYHGFLNTSYHRQEVYVRSTDFDRTLMSAEANLAGLFPPNGMQRFNPNISWQPIPVHTVPITEDRD

SEQ ID NO: 137 - protein, 423 aa, Homo sapiens
MAGKRSGWSRAALLQLLLGVNLVVMPPTRARSLRFVTLLYRHGDRSPVKTYPKDPYQEEEWPQGFGQLTKEGMLQHWELGQALRQRYHGFLNTSYHRQEVYVRSTDFDRTLMSAEANLAGLFPPNGMQRFNPNISWQPIPVHTVPITEDRLLKFPLGPCPRYEQLQNETRQTPEYQNESSRNAQFLDMVANETGLTDLTLETVWNVYDTLFCEQTHGLRLPPWASPQTMQRLSRLKDFSFRFLFGIYQQAEKARLQGGVLLAQIRKNLTLMATTSQLPKLLVYSAHDTTLVALQMALDVYNGEQAPYASCHIFELYQEDSGNFSVEMYFRNESDKAPWPLSLPGCPHRCPLQDFLRLTEPVVPKDWQQECQLASGPADTEVIVALAVCGSILFLLIVLLLTVLFRMQAQPPGYRHVADGEDHA

SEQ ID NO: 138 - protein, 162 aa, Homo sapiens
MAGKRSGWSRAALLQLLLGVNLVVMPPTRARSLRFVTLLYRHGDRSPVKTYPKDPYQEEEWPQGFGQLTKEGMLQHWELGQALRQRYHGFLNTSYHRQEVYVRSTDFDRTLMSAEANLAGLFPPNGMQRFNPNISWQPIPVHTVPITEDRQAQVTRTVEHSA

SEQ ID NO: 139 - protein, 305 aa, Homo sapiens
MAGKRSGWSRAALLQLLLGVNLVVMPPTRARSLRFVTLLYRHGDRSPVKTYPKDPYQEEEWPQGFGQLTKEGMLQHWELGQALRQRYHGFLNTSYHRQEVYVRSTDFDRTLMSAEANLAGLFPPNGMQRFNPNISWQPIPVHTVPITEDRQFLDMVANETGLTDLTLETVWNVYDTLFCEQTHGLRLPPWASPQTMQRLSRLKDFSFRFLFGIYQQAEKARLQGGVLLAQIRKNLTLMATTSQLPKLLVYSAHDTTLVALQMALDVYNGEQAPYASCHIFELYQEDSGNFSVEMYFRNESDKAPW

SEQ ID NO: 140 - protein, 360 aa, Homo sapiens
MAGKRSGWSRAALLQLLLGVNLVVMPPTRARSLRFVTLLYRHGDRSPVKTYPKDPYQEEEWPQGFGQLTKEGMLQHWELGQALRQRYHGFLNTSYHRQEVYVRSTDFDRTLMSAEANLAGLFPPNGMQRFNPNISWQPIPVHTVPITEDRQTHGLRLPPWASPQTMQRLSRLKDFSFRFLFGIYQQAEKARLQGGVLLAQIRKNLTLMATTSQLPKLLVYSAHDTTLVALQMALDVYNGEQAPYASCHIFELYQEDSGNFSVEMYFRNESDKAPWPLSLPGCPHRCPLQDFLRLTEPVVPKDWQQECQLASGPADTEVIVALAVCGSILFLLIVLLLTVLFRMQAQPPGYRHVADGEDHA

SEQ ID NO: 141 - protein, 160 aa, Homo sapiens
MAGKRSGWSRAALLQLLLGVNLVVMPPTRARSLRFVTLLYRHGDRSPVKTYPKDPYQEEEWPQGFGQLTKEGMLQHWELGQALRQRYHGFLNTSYHRQEVYVRSTDFDRTLMSAEANLAGLFPPNGMQRFNPNISWQPIPVHTVPITEDRSRTETLIHFS

SEQ ID NO: 142 - protein, 395 aa, Homo sapiens
MGVRMTEYVGLYRHGDRSPVKTYPKDPYQEEEWPQGFGQLTKEGMLQHWELGQALRQRYHGFLNTSYHRQEVYVRSTDFDRTLMSAEANLAGLFPPNGMQRFNPNISWQPIPVHTVPITEDRLLKFPLGPCPRYEQLQNETRQTPEYQNESSRNAQFLDMVANETGLTDLTLETVWNVYDTLFCEQTHGLRLPPWASPQTMQRLSRLKDFSFRFLFGIYQQAEKARLQGGVLLAQIRKNLTLMATTSQLPKLLVYSAHDTTLVALQMALDVYNGEQAPYASCHIFELYQEDSGNFSVEMYFRNESDKAPWPLSLPGCPHRCPLQDFLRLTEPVVPKDWQQECQLASGPADTEVIVALAVCGSILFLLIVLLLTVLFRMQAQPPGYRHVADGEDHA

SEQ ID NO: 143 - protein, 6 aa, Homo sapiens
MDMWTA

SEQ ID NO: 144 - protein, 52 aa, Homo sapiens
MDMWTALLILQALLLPSLADGATPALRFVAVGDWGGVPNAPFHTAREMANAK

SEQ ID NO: 145 - protein, 74 aa, Homo sapiens
MDMWTALLILQALLLPSLADGATPALRFVAVGDWGGVPNAPFHTAREMANAKEIARTVQILGADFILSLGDNFY

SEQ ID NO: 146 - protein, 124 aa, Homo sapiens
MDMWTALLILQALLLPSLADGATPALRFVAVGDWGGVPNAPFHTAREMANAKEIARTVQILGADFILSLGDNFYFTGVQDINDKRFQETFEDVFSDRSLRKVPWYVLAGNHDHLGNVSAQIAYS

SEQ ID NO: 147 - protein, 325 aa, Homo sapiens
MDMWTALLILQALLLPSLADGATPALRFVAVGDWGGVPNAPFHTAREMANAKEIARTVQILGADFILSLGDNFYFTGVQDINDKRFQETFEDVFSDRSLRKVPWYVLAGNHDHLGNVSAQIAYSKISKRWNFPSPFYRLHFKIPQTNVSVAIFMLDTVTLCGNSDDFLSQQPERPRDVKLARTQLSWLKKQLAAAREDYVLVAGHYPVWSIAEHGPTHCLVKQLRPLLATYGVTAYLCGHDHNLQYLQDENGVGYVLSGAGNFMDPSKRHQRKVPNGYLRFHYGTEDSLGGFAYVEISSKEMTVTYIEASGKSLFKTRLPRRARP

SEQ ID NO: 148 - protein, 325 aa, Homo sapiens; identical to SEQ ID NO: 147

SEQ ID NO: 149 - protein, 325 aa, Homo sapiens; identical to SEQ ID NO: 147

SEQ ID NO: 150 - protein, 325 aa, Homo sapiens; identical to SEQ ID NO: 147

SEQ ID NO: 151 - protein, 59 aa, Homo sapiens
MDMWTALLILQALLLPSLGISWTPQSGTSARSPTAICASTMGLKTHWVALPMWRSAPKR

SEQ ID NO: 152 - protein, 228 aa, Homo sapiens
MITGVFSMRLWTPVGVLTSLAYCLHQRRVALAELQEADGQCPVDRSLLKLKMVQVVFRHGARSPLKPLPLEEQGGMFAGQLTKVGMQQMFALGERLRKNYVEDIPFLSPTFNPQEVFIRSTNIFRNLESTRCLLAGLFQCQKEGPIIIHTDEADSEVLYPNYQSCWSLRQRTRGRRQTASLQPGISEDLKKVKDRMGIDSSDKVDFFILLDNVAAEQEKMGSCRFHGS

SEQ ID NO: 153 - protein, 428 aa, Homo sapiens
MITGVFSMRLWTPVGVLTSLAYCLHQRRVALAELQEADGQCPVDRSLLKLKMVQVVFRHGARSPLKPLPLEEQVEWNPQLLEVPPQTQFDYTVTNLAGGPKPYSPYDSQYHETTLKGGMFAGQLTKVGMQQMFALGERLRKNYVEDIPFLSPTFNPQEVFIRSTNIFRNLESTRCLLAGLFQCQKEGPIIIHTDEADSEVLYPNYQSCWSLRQRTRGRRQTASLQPGISEDLKKVKDRMGIDSSDKVDFFILLDNVAAEQAHNLPSCPMLKRFARMIEQRAVDTSLYILPKEDRESLQMAVGPFLHILESNLLKAMDSATAPDKIRKLYLYAAHDVTFIPLLMTLGIFDHKWPPFAVDLTMELYQHLESKEWFVQLYYHGKEQVPRGCPDGLCPLDMFLNAMSVYTLSPEKYHALCSQTQVMEVGNEE

SEQ ID NO: 154 - protein, 271 aa, Homo sapiens
MITGVFSMRLWTPVGVLTSLAYCLHQRRVALAELQEADGQCPVDRSLLKLKMVQVVFRHGARSPLKPLPLEEQVEWNPQLLEVPPQTQFDYTVTNLAGGPKPYSPYDSQYHETTLKGGMFAGQLTKVGMQQMFALGERLRKNYVEDIPFLSPTFNPQEVFIRSTNIFRNLESTRCLLAGLFQCQKEGPIIIHTDEADSEVLYPNYQSCWSLRQRTRGRRQTASLQPGISEDLKKVKDRMGIDSSDKVDFFILLDNVAAEQEKMGSCRFHGS

SEQ ID NO: 155 - protein, 77 aa, Homo sapiens
MITGVFSMRLWTPVGVLTSLAYCLHQRRVALAELQEADGQCPVDRSLLKLKMVQVVFRHGARSPLKPLPLEEQYSFH

SEQ ID NO: 156 - protein, 143 aa, Homo sapiens
MVQVVFRHGARSPLKPLPLEEQVEWNPQLLEVPPQTQFDYTVTNLAGGPKPYSPYDSQYHETTLKGGMFAGQLTKVGMQQMFALGERLRKNYVEDIPFLSPTFNPQEVFIRSTNIFRNLESTRCLLAGLFQCQKEGPIIIHTD

SEQ ID NO: 157 - protein, 166 aa, Homo sapiens
  SITE 1: note = misc_feature - Xaa can be any naturally occurring amino acid
XDSQYHETTLKGGMFAGQLTKVGMQQMFALGERLRKNYVEDIPFLSPTFNPQEVFIRSTNIFRNLESTRCLLAGLFQCQKEGPIIIHTDEADSEVLYPNYQSCWSLRQRTRGRRQTASLQPGISEDLKKVKDRMGIDSSDKVDFFILLDNVAAEQEKMGSCRFHGS

SEQ ID NO: 158 - protein, 157 aa, Homo sapiens
  SITE 1: note = misc_feature - Xaa can be any naturally occurring amino acid
XRCLLAGLFQCQKEGPIIIHTDEADSEVLYPNYQSCWSLRQRTRGRRQTASLQPGISEDLKKVKDRMGIDSSDKVDFFILLDNVAAEQAHNLPSCPMLKRFARMIEQRAVDTSLYILPKEDRESLQMAVGPFLHILESNLLKAMDSATAPDKIRTCR

SEQ ID NO: 159 - protein, 334 aa, Homo sapiens
MHPLPGYWSCYCLLLLFSLGVQGSLGAPSAAPEQVHLSYPGEPGSMTVTWTTWVPTRSEVQFGLQPSGPLPLRAQGTFVPFVDGGILRRKLYIHRVTLRKLLPGVQYVYRCGSAQGWSRRFRFRALKNGAHWSPRLAVFGDLGADNPKAVPRLRRDTQQGMYDAVLHVATSLTTRLASACRGIMRACGTAGIWVPPTSSPSPPRSISFSIMAATWYRGSFAGWRATSRKPIRTGQPGRGSSLWGTGPCTAPTQIWTTAHDMKARSAKASKASCTGWRIFSTNMEWICSCGLMSTRMNDCGQFTTTRYLTAAERCPTPTREGLSTSSQDLLMGRS

SEQ ID NO: 160 - protein, 367 aa, Homo sapiens
MHPLPGYWSCYCLLLLFSLGVQGSLGAPSAAPEQVHLSYPGEPGSMTVTWTTWVPTRSEVQFGLQPSGPLPLRAQGTFVPFVDGGILRRKLYIHRVTLRKLLPGVQYVYRCGSAQGWSRRFRFRALKNGAHWSPRLAVFGDLGADNPKAVPRLRRDTQQGMYDAVLHVATSLTTRLASACRGIMRACGTGNVGVLGDWPSPLKDGRCRGALVPDPCPLTPPAGIWVPPTSSPSPPRSISFSIMAATWYRGSFAGWRATSRKPIRTGQPGRGSSLWGTGPCTAPTQIWTTAHDMKARSAKASKASCTGWRIFSTNMEWICSCGLMSTRMNDCGQFTTTRYLTAAERCPTPTREGLSTSSQDLLAVRSG

SEQ ID NO: 161 - protein, 438 aa, Homo sapiens
MHPLPGYWSCYCLLLLFSLGVQGSLGAPSAAPEQVHLSYPGEPGSMTVTWTTWVPTRSEVQFGLQPSGPLPLRAQGTFVPFVDGGILRRKLYIHRVTLRKLLPGVQYVYRCGSAQGWSRRFRFRALKNGAHWSPRLAVFGDLGADNPKAVPRLRRDTQQGMYDAVLHVGDFAYNLDQDNARVGDRFMRLIEPVAASLPYMTCPGNHEERYNFSNYKARFSMPGDNEGLWYSWDLGPAHIISFSTEVYFFLHYGRHLVQRQFRWLESDLQKANKNRAARPWIITMGHRPMYCSNADLDDCTRHESKVRKGLQGKLYGLEDLFYKYGVDLQLWAHEHSYERLWPIYNYQVFNGSREMPYTNPRGPVHIITGSAGCEERLTPFAVFPRPWSAVRVKEYGYTRLHILNGTHIHIQQVSDDQDGKIVDDVWVVRPLFGRRMYL

SEQ ID NO: 162 - protein, 227 aa, Homo sapiens
  SITE 1: note = misc_feature - Xaa can be any naturally occurring amino acid
XGADNPKAVPRLRRDTQQGMYDAVLHVGDFAYNLDQDNARVGDRFMRLIEPVAASLPYMTCPGNHEERYNFSNYKARFSMPGDNEGLWYSWDLGPAHIISFSTEVYFFLHYGRHLVQRQFRWLESDLQKANKNRAARPWIITMGHRPMYCSNADLDDCTRHESKVRKGLQGKLYGLEDLFYKYGVDLQLWAHEHSYERLWPIYNYQDGKIVDDVWVVRPLFGRRMYL

SEQ ID NO: 163 - protein, 353 aa, Homo sapiens
MRAAPLLLARAASLSLGFLFLLFFWLDRSVLAKELKFVTLVFRHGDRSPIDTFPTDPIKESSWPQGFGQLTQLGMEQHYELGEYIRKRYRKFLNESYKHEQVYIRSTDVDRTLMSAMTNLAALFPPEGVSIWNPILLWQPIPVHTVPLSEDQDFIATLGKLSGLHGQDLFGIWSKVYDPLYCESVHNFTLPSWATEDTMTKLRELSELSLLSLYGIHKQKEKSRLQGGVLVNEILNHMKRATQIPSYKKLIMYSAHDTTVSGLQMALDVYNGLLPPYASCHLTELYFEKGEYFVEMYYRNETQHEPYPLMLPGCSPSCPLERFAELVGPVIPQDWSTECMTTNSHQGTEDSTD

SEQ ID NO: 164 - protein, 418 aa, Homo sapiens
MRAAPLLLARAASLSLGFLFLLFFWLDRSVLAKELKFVTLVFRHGDRSPIDTFPTDPIKESSWPQGFGQLTQLGMEQHYELGEYIRKRYRKFLNESYKHEQVYIRSTDVDRTLMSAMTNLAALFPPEGVSIWNPILLWQPIPVHTVPLSEDQLLYLPFRNCPRFQELESETLKSEEFQKRLHPYKDFIATLGKLSGLHGQDLFGIWSKVYDPLYCESVHNFTLPSWATEDTMTKLRELSELSLLSLYGIHKQKEKSRLQGGVLVNEILNHMKRATQIPSYKKLIMYSAHDTTVSGLQMALDVYNGLLPPYASCHLTELYFEKGEYFVEMYYRNETQHEPYPLMLPGCSPSCPLERFAELVGPVIPQDWSTECMTTNSHQVLKVIFAVAFCLISAVLMVLLFIHIRRGLCWQRESYGNI

SEQ ID NO: 165 - protein, 386 aa, Homo sapiens
MRAAPLLLARAASLSLGFLFLLFFWLDRSVLAKELKFVTLVFRHGDRSPIDTFPTDPIKESSWPQGFGQLTQLGMEQHYELGEYIRKRYRKFLNESYKHEQVYIRSTDVDRTLMSAMTNLAALFPPEGVSIWNPILLWQPIPVHTVPLSEDQLLYLPFRNCPRFQELESETLKSEEFQKRLHPYKDFIATLGKLSGLHGQDLFGIWSKVYDPLYCESVHNFTLPSWATEDTMTKLRELSELSLLSLYGIHKQKEKSRLQGGVLVNEILNHMKRATQIPSYKKLIMYSAHDTTVSGLQMALDVYNGLLPPYASCHLTELYFEKGEYFVEMYYRNETQHEPYPLMLPGCSPSCPLERFAELVGPVIPQDWSTECMTTNSHQGTEDSTD

SEQ ID NO: 166 - protein, 165 aa, Homo sapiens
MRAAPLLLARAASLSLGFLFLLFFWLDRSVLAKELKFVTLVFRHGDRSPIDTFPTDPIKESSWPQGFGQLTQVYIRSTDVDRTLMSAMTNLAALFPPEGVSIWNPILLWQPIPVHTVPLSEDQLLYLPFRNCPRFQELESETLKSEEFQKRLHPYKDFIATLGKL

SEQ ID NO: 167 - protein, 99 aa, Homo sapiens
  SITE 1: note = misc_feature - Xaa can be any naturally occurring amino acid
XELYFEKGEYFVEMYYRNETQHEPYPLMLPGCSPSCPLERFAELVGPVIPQDWSTECMTTNSHQGPAETAHSARRNHDIALPCGRSTCLENTVLYYHYG

SEQ ID NO: 168 - protein, 421 aa, Homo sapiens
MVEMLPTAILLVLAVSVVAKDNATCDGPCGLRFRQNPQGGVRIVGGKAAQHGAWPWMVSLQIFTYNSHRYHTCGGSLLNSRWVLTAAHCFVGKNNVHDWRLVFGAKEITYGNNKPVKAPLQERYVEKIIIHEKYNSATEGNDIALVEITPPISCGRFIGPGCLPHFKAGLPRGSQSCWVAGWGYIEEKAPRPSSILMEARVDLIDLDLCNSTQWYNGRVQPTNVCAGYPVGKIDTCQGDSGGPLMCKDSKESAYVVVGITSWGVGCARAKRPGIYTATWPYLNWIASKIGSNALRMIQSATPPPPTTRPPPIRPPFSHPISAHLPWYFQPPPRPLPPRPPAAQPRPPPSPPPPPPPPASPLPPPPPPPPPTPSSTTKLPQGLSFAKRLQQLIEVLKGKTYSDGKNHYDMETTELPELTSTS

SEQ ID NO: 169 - protein, 212 aa, Homo sapiens
MVEMLPTAILLVLAVSVVAKDNATCDGPCGLRFRQNPQGGVRIVGGKAAQHGAWPWMVSLQIFTYNSHRYHTCGGSLLNSRWVLTAAHCFVGKNNVHDWRLVFGAKEITYGNNKPVKAPLQERYVEKIIIHEKYNSATEGNDIALVEITPPISCGRFIGPGCLPHFKAGLPRGSQSCWVAGWGYIEEKGFLECPAGTSPFKTGVAVALELCP

SEQ ID NO: 170 - protein, 100 aa, Homo sapiens
MRKPAAGFLPSLLKVLLLPLAPAAAQDSTQASTPGSPLSPTEYERFFALLTPTWKAETTCRLRATHGCRNPTLVQLDQYENHGLVPDESPVFPASLYSLT

SEQ ID NO: 171 - protein, 510 aa, Homo sapiens
MRKPAAGFLPSLLKVLLLPLAPAAAQDSTQASTPGSPLSPTEYERFFALLTPTWKAETTCRLRATHGCRNPTLVQLDQYENHGLVPDGAVCSNLPYASWFESFCQFTHYRCSNHVYYAKRVLCSQPVSILSPNTLKEIEASAEVSPTTMTSPISPHFTAPEHKQEQGVEHRQEPTQEHKQEEGQKQEEQEEEQEEEGKQEEGQGTKEGREAVSQLQTDSEPKFHSESLSSNPSSFAPRVREVESTPMIMENIQELIRSAQEIDEMNEIYDENSYWRNQNPGSLLQLPHTEALLVLCYSIVENTCIITPTAKAWKYMEEEILGFGKSVCDSLGRRHMSTCALCDFCSLKLEQCHSEASLQRQQCDTSHKTPFVSPLLASQSLSIGNQVGSPESGRFYGLDLYGGLHMDFWCARLATKGCEDVRVSGWLQTEFLSFQDGDFPTKICDTDYIQYPNYCSFKSQQCLMRNRNRKVSRMRCLQNETYSALSPGKSEDVVLRWSQEFSTLTLGQFG

SEQ ID NO: 172 - protein, 174 aa, Homo sapiens [sequence omitted]

SEQ ID NO: 173 - protein, 543 aa, Homo sapiens
MRKPAAGFLPSLLKVLLLPLAPAAAQDSTQASTPGSPLSPTEYERFFALLTPTWKAETTCRLRATHGCRNPTLVQLDQYENHGLVPDGAVCSNLPYASWFESFCQFTHYRCSNHVYYAKRVLCSQPVSILSPNTLKEIEASAEVSPTTMTSPISPHFTVTERQTFQPWPERLSNNVEELLQSSLSLGGQEQAPEHKQEQGVEHRQEPTQEHKQEEGQKQEEQEEEQEEEGKQEEGQGTKEGREAVSQLQTDSEPKFHSESLSSNPSSFAPRVREVESTPMIMENIQELIRSAQEIDEMNEIYDENSYWRNQNPGSLLQLPHTEALLVLCYSIVENTCIITPTAKAWKYMEEEILGFGKSVCDSLGRRHMSTCALCDFCSLKLEQCHSEASLQRQQCDTSHKTPFVSPLLASQSLSIGNQVGSPESGRFYGLDLYGGLHMDFWCARLATKGCEDVRVSGWLQTEFLSFQDGDFPTKICDTDYIQYPNYCSFKSQQCLMRNRNRKVSRMRCLQNETYSALSPGKSEDVVLRWSQEFSTLTLGQFG

SEQ ID NO: 174 - protein, 319 aa, Homo sapiens
MRKPAAGFLPSLLKVLLLPLAPAAAQDSTQASTPGSPLSPTEYERFFALLTPTWKAETTCRLRATHGCRNPTLVQLDQYENHGLVPDGAVCSNLPYASWFESFCQFTHYRCSNHVYYAKRVLCSQPVSILSPNTLKEIEASAEVSPTTMTSPISPHFTVTERQTFQPWPERLSNNVEELLQSSLSLGGQEQAPEHKQEQGVEHRQEPTQEHKQEEGQKQEEQEEEQEEEGKQEEGQGTKEGREAVSQLQTDSEPKFHSESLSSNPSSFAPRVREVESTPMIMENIQELIRSAQEIDEMNEIYDENSYWRNQNPGRYRKF

SEQ ID NO: 175 - protein, 265 aa, Homo sapiens
MNRFLLLMSLYLLGSARGTSSQPNELSGSIDHQTSVQQLPGEFFSLENPSDAEALYETSSGLNTLSEHGSSEHGSSKHTVAEHTSGEHAESEHASGEPAATEHAEGEHTVGEQPSGEQPSGEHLSGEQPLSELESGEQPSDEQPSGEHGSGEQPSGEQASGEQPSGEHASGEQASGAPISSTSTGTILNCYTCAYMNDQGKCLRGEGTCITQNSQQCMLKKIFEGGKLQFMVQGCENMCPSMNLFSHGTRMQIICCRNQSFCNKI

SEQ ID NO: 176 - protein, 246 aa, Homo sapiens
MNRFLLLMSLYLLGSARGTSSQPNELSGSIDHQTSVQQLPGEFFSLENPSDAEALYETSSGLNTLSEHGSSEHGSSKHTVAEHTSGEHAESEHASGEPAATEHAEGEHTVGEQPSGEQPSGEHLSGEQPLSELESGEQPSDEQPSGEHGSGEQPSGEQASGEQPSGTILNCYTCAYMNDQGKCLRGEGTCITQNSQQCMLKKIFEGGKLQFMVQGCENMCPSMNLFSHGTRMQIICCRNQSFCNKI

SEQ ID NO: 177 - protein, 210 aa, Homo sapiens
MNRFLLLMSLYLLGSARGTSSQPNELSGSIDHQTSVQQLPGEPAATEHAEGEHTVGEQPSGEQPSGEHLSGEQPLSELESGEQPSDEQPSGEHGSGEQPSGEQASGEQPSGEHASGEQASGAPISSTSTGTILNCYTCAYMNDQGKCLRGEGTCITQNSQQCMLKKIFEGGKLQFMVQGCENMCPSMNLFSHGTRMQIICCRNQSFCNKI

SEQ ID NO: 178 - protein, 195 aa, Homo sapiens
MNRFLLLMSLYLLGSARGTSSQPNELSGSIDHQTSVQQLPGEQPSGEQPSGEHLSGEQPLSELESGEQPSDEQPSGEHGSGEQPSGEQASGEQPSGEHASGEQASGAPISSTSTGTILNCYTCAYMNDQGKCLRGEGTCITQNSQQCMLKKIFEGGKLQFMVQGCENMCPSMNLFSHGTRMQIICCRNQSFCNKI

SEQ ID NO: 179 - protein, 45 aa, Homo sapiens
MAVYVGMLRLGRLCAGSSGVLGARAALSRSWQEARLQGVRFLRCL

SEQ ID NO: 180 - protein, 54 aa, Homo sapiens
MAVYVGMLRLGRLCAGSSGVLGARAALSRSWQEARLQGVRFLRPSGEKLAHQGV

SEQ ID NO: 181 - protein, 640 aa, Homo sapiens
MAVYVGMLRLGRLCAGSSGVLGARAALSRSWQEARLQGVRFLSARGGMEAGRQRISVPSSFTASAAAHSREVDRMVSTPIGGLSYVQGCTKKHLNSKTVGQCLETTAQRVPEREALVVLHEDVRLTFAQLKEEVDKAASGLLSIGLCKGDRLGMWGPNSYAWVLMQLATAQAGIILVSVNPAYQAMELEYVLKKVGCKALVFPKQFKTQQYYNVLKQICPEVENAQPGALKSQRLPDLTTVISVDAPLPGTLLLDEVVAAGSTRQHLDQLQYNQQFLSCHDPINIQFTSGTTGSPKGATLSHYNIVNNSNILGERLKLHEKTPEQLRMILPNPLYHCLGSVAGTMMCLMYGATLILASPIFNGKKALEAISRERGTFLYGTPTMFVDILNQPDFSSYDISTMCGGVIAGSPAPPELIRAIINKINMKDLVVAYGTTENSPVTFAHFPEDTVEQKAESVGRIMPHTEARIMNMEAGTLAKLNTPGELCIRGYCVMLGYWGEPQKTEEAVDQDKWYWTGDVATMNEQGFCKIVGRSKDMIIRGGENIYPAELEDFFHTHPKVQEVQVVGVKDDRMGEEICACIRLKDGEETTVEEIKAFCKGKISHFKIPKYIVFVTNYPLTISGKIQKFKLREQMERHLNL

SEQ ID NO: 182 - protein, 615 aa, Homo sapiens
MAVYVGMLRLGRLCAGSSGVLGARAALSRSWQEARLQGVRFLSSREVDRMVSTPIGGLSYVQGCTKKHLNSKTVGQCLETTAQRVPEREALVVLHEDVRLTFAQLKEEVDKAASGLLSIGLCKGDRLGMWGPNSYAWVLMQLATAQAGIILVSVNPAYQAMELEYVLKKVGCKALVFPKQFKTQQYYNVLKQICPEVENAQPGALKSQRLPDLTTVISVDAPLPGTLLLDEVVAAGSTRQHLDQLQYNQQFLSCHDPINIQFTSGTTGSPKGATLSHYNIVNNSNILGERLKLHEKTPEQLRMILPNPLYHCLGSVAGTMMCLMYGATLILASPIFNGKKALEAISRERGTFLYGTPTMFVDILNQPDFSSYDISTMCGGVIAGSPAPPELIRAIINKINMKDLVVAYGTTENSPVTFAHFPEDTVEQKAESVGRIMPHTEARIMNMEAGTLAKLNTPGELCIRGYCVMLGYWGEPQKTEEAVDQDKWYWTGDVATMNEQGFCKIVGRSKDMIIRGGENIYPAELEDFFHTHPKVQEVQVVGVKDDRMGEEICACIRLKDGEETTVEEIKAFCKGKISHFKIPKYIVFVTNYPLTISGKIQKFKLREQMERHLNL

SEQ ID NO: 183 - protein, 602 aa, Homo sapiens
MAVYVGMLRLGRLCAGSSGVLGARAALSRSWQEARLQGVRFLSSREVDRMVSTPIGGLSYVQGCTKKHLNSKTVGQCLETTAQRVPEREALVVLHEDVRLTFAQLKEEVDKAASGLLSIGLCKGDRLGMWGPNSYAWVLMQLATAQAMELEYVLKKVGCKALVFPKQFKTQQYYNVLKQICPEVENAQPGALKSQRLPDLTTVISVDAPLPGTLLLDEVVAAGSTRQHLDQLQYNQQFLSCHDPINIQFTSGTTGSPKGATLSHYNIVNNSNILGERLKLHEKTPEQLRMILPNPLYHCLGSVAGTMMCLMYGATLILASPIFNGKKALEAISRERGTFLYGTPTMFVDILNQPDFSSYDISTMCGGVIAGSPAPPELIRAIINKINMKDLVVAYGTTENSPVTFAHFPEDTVEQKAESVGRIMPHTEARIMNMEAGTLAKLNTPGELCIRGYCVMLGYWGEPQKTEEAVDQDKWYWTGDVATMNEQGFCKIVGRSKDMIIRGGENIYPAELEDFFHTHPKVQEVQVVGVKDDRMGEEICACIRLKDGEETTVEEIKAFCKGKISHFKIPKYIVFVTNYPLTISGKIQKFKLREQMERHLNL

SEQ ID NO: 184 - protein, 183 aa, Homo sapiens
MAVYVGMLRLGRLCAGSSGVLGARAALSRSWQEARLQGVRFLSSREVDRMVSTPIGGLSYVQGCTKKHLNSKTVGQCLETTAQRVPEREALVVLHEDVRLTFAQLKEEVDKAASGLLSIGLCKGVCEPSLPGYGTGVCPQEGGLQGPCVPQAIQDPAILQRPEADLSRSGECPARGLEESEAP

SEQ ID NO: 185 - protein, 572 aa, Homo sapiens
MAVYVGMLRLGRLCAGSSGVLGARAALSRSWQEARLQGVRFLSSREVDRMVSTPIGGLSYVQGCTKKHLNSKTVGQCLETTAQRVPEREALVVLHEDVRLTFAQLKEEVSVNPAYQAMELEYVLKKVGCKALVFPKQFKTQQYYNVLKQICPEVENAQPGALKSQRLPDLTTVISVDAPLPGTLLLDEVVAAGSTRQHLDQLQYNQQFLSCHDPINIQFTSGTTGSPKGATLSHYNIVNNSNILGERLKLHEKTPEQLRMILPNPLYHCLGSVAGTMMCLMYGATLILASPIFNGKKALEAISRERGTFLYGTPTMFVDILNQPDFSSYDISTMCGGVIAGSPAPPELIRAIINKINMKDLVVAYGTTENSPVTFAHFPEDTVEQKAESVGRIMPHTEARIMNMEAGTLAKLNTPGELCIRGYCVMLGYWGEPQKTEEAVDQDKWYWTGDVATMNEQGFCKIVGRSKDMIIRGGENIYPAELEDFFHTHPKVQEVQVVGVKDDRMGEEICACIRLKDGEETTVEEIKAFCKGKISHFKIPKYIVFVTNYPLTISGKIQKFKLREQMERHLNL

SEQ ID NO: 186 - protein, 85 aa, Homo sapiens
TVPPSSWPLPSSMARRHWRPSAERGVIAGSPAPPELIRAIINKINMKDLVKSQEEIAAWEDGQQSTDVLLERPGRLLMEPQRTVP

SEQ ID NO: 187 - protein, 104 aa, Homo sapiens
  SITE 1: note = misc_feature - Xaa can be any naturally occurring amino acid
XGKKALEAISRERGTFLYGTPTMFVDILNQPDFSSYDISTMCGGVIAGSPAPPELIRAIINKINMKDLVKSQEEIAAWEDGQQSTDVLLERPGRLLMEPQRTVP

SEQ ID NO: 188 - protein, 245 aa, Homo sapiens
MASTALLALCSTGAFSGLAVEAGAGVCHATPIYAGHSWHQATFRLNVAGSTLSRYLRDLLVAANPDLLQQALPRKAITHLKKRSCYVSLDFEGDLRDPARHHPASFSVGNGCCVCLSSERFRCPEPIFQPGLLGQAEQGLPALAFRALQKMPKTLRTRLADTVVLAGGSTLFPGFAERLDKELEAQCRRHGYAALRPHLVAKHGRGMAVWTGGSMVASLHSFQRRWITRAMYQECGSRLLYDVFN

SEQ ID NO: 189 - protein, 21 aa, Homo sapiens
MVDGVMILPVLIMIALPSPSM

SEQ ID NO: 190 - protein, 71 aa, Homo sapiens
MVDGVMILPVLIMIALPSPSMEDEKPKVNPKLYMCVCEGLSCGNEDHCEGQQCFSSLSINDGFHVYQKGCF

SEQ ID NO: 191 - protein, 73 aa, Homo sapiens
MVDGVMILPVLIMIALPSPSMEDEKPKVNPKLYMCVCEGLSCGNEDHCEGQQCFSSLSINDGFHVYQKGCFQV

SEQ ID NO: 192 - protein, 87 aa, Homo sapiens
MVDGVMILPVLIMIALPSPSMEDEKPKVNPKLYMCVCEGLSCGNEDHCEGQQCFSSLSINDGFHVYQKGCFQVYEQGKMTCKTPPSP

SEQ ID NO: 193 - protein, 87 aa, Homo sapiens; identical to SEQ ID NO: 192

SEQ ID NO: 194 - protein, 509 aa, Homo sapiens
MVDGVMILPVLIMIALPSPSMEDEKPKVNPKLYMCVCEGLSCGNEDHCEGQQCFSSLSINDGFHVYQKGCFQVYEQGKMTCKTPPSPGQAVECCQGDWCNRNITAQLPTKGKSFPGTQNFHLEVGLIILSVVFAVCLLACLLGVALRKFKRRNQERLNPRDVEYGTIEGLITTNVGDSTLADLLDHSCTSGSGSGLPFLVQRTVARQITLLECVGKGRYGEVWRGSWQGENVAVKIFSSRDEKSWFRETELYNTVMLRHENILGFIASDMTSRHSSTQLWLITHYHEMGSLYDYLQLTTLDTVSCLRIVLSIASGLAHLHIEIFGTQGKPAIAHRDLKSKNILVKKNGQCCIADLGLAVMHSQSTNQLDVGNNPRVGTKRYMAPEVLDETIQVDCFDSYKRVDIWAFGLVLWEVARRMVSNGIVEDYKPPFYDVVPNDPSFEDMRKVVCVDQQRPNIPNRWFSDPTLTSLAKLMKECWYQNPSARLTALRIKKTLTKIDNSLDKLKTDC

SEQ ID NO: 195 - protein, 509 aa, Homo sapiens; identical to SEQ ID NO: 194

SEQ ID NO: 196 - protein, 509 aa, Homo sapiens; identical to SEQ ID NO: 194

SEQ ID NO: 197 - protein, 509 aa, Homo sapiens; identical to SEQ ID NO: 194

SEQ ID NO: 198 - protein, 443 aa, Homo sapiens
MLTNGKEQVIKSCVSLPELNAQVFCHSSNNVTKTECCFTDFCNNITLHLPTASPNAPKLGPMELAIIITVPVCLLSIAAMLTVWACQGRQCSYRKKKRPNVEEPLSECNLVNAGKTLKDLIYDVTASGSGSGLPLLVQRTIARTIVLQEIVGKGRFGEVWHGRWCGEDVAVKIFSSRDERSWFREAEIYQTVMLRHENILGFIAADNKDNGTWTQLWLVSEYHEQGSLYDYLNRNIVTVAGMIKLALSIASGLAHLHMEIVGTQGKPAIAHRDIKSKNILVKKCETCAIADLGLAVKHDSILNTIDIPQNPKVGTKRYMAPEMLDDTMNVNIFESFKRADIYSVGLVYWEIARRCSVGGIVEEYQLPYYDMVPSDPSIEEMRKVVCDQKFRPSIPNQWQSCEALRVMGRIMRECWYANGAARLTALRIKKTISQLCVKEDCKA

SEQ ID NO: 199 - protein, 493 aa, Homo sapiens
MTRALCSALRQALLLLAAAAELSPGLKCVCLLCDSSNFTCQTEGACWASVMLTNGKEQVIKSCVSLPELNAQVFCHSSNNVTKTECCFTDFCNNITLHLPTASPNAPKLGPMELAIIITVPVCLLSIAAMLTVWACQGRQCSYRKKKRPNVEEPLSECNLVNAGKTLKDLIYDVTASGSGSGLPLLVQRTIARTIVLQEIVGKGRFGEVWHGRWCGEDVAVKIFSSRDERSWFREAEIYQTVMLRHENILGFIAADNKDNGTWTQLWLVSEYHEQGSLYDYLNRNIVTVAGMIKLALSIASGLAHLHMEIVGTQGKPAIAHRDIKSKNILVKKCETCAIADLGLAVKHDSILNTIDIPQNPKVGTKRYMAPEMLDDTMNVNIFESFKRADIYSVGLVYWEIARRCSVGGIVEEYQLPYYDMVPSDPSIEEMRKVVCDQKFRPSIPNQWQSCEALRVMGRIMRECWYANGAARLTALRIKKTISQLCVKEDCKA

SEQ ID NO: 200 - protein, 336 aa, Homo sapiens
MTRALCSALRQALLLLAAAAELSPGLKCVCLLCDSSNFTCQTEGACWASVMLTNGKEQVIKSCVSLPELNAQVFCHSSNNVTKTECCFTDFCNNITLHLPTDNGTWTQLWLVSEYHEQGSLYDYLNRNIVTVAGMIKLALSIASGLAHLHMEIVGTQGKPAIAHRDIKSKNILVKKCETCAIADLGLAVKHDSILNTIDIPQNPKVGTKRYMAPEMLDDTMNVNIFESFKRADIYSVGLVYWEIARRCSVGGIVEEYQLPYYDMVPSDPSIEEMRKVVCDQKFRPSIPNQWQSCEALRVMGRIMRECWYANGAARLTALRIKKTISQLCVKEDCKA

SEQ ID NO: 201 - protein, 413 aa, Homo sapiens
MTRALCSALRQALLLLAAAAELSPGLKCVCLLCDSSNFTCQTEGACWASVMLTNGKEQVIKSCVSLPELNAQVFCHSSNNVTKTECCFTDFCNNITLHLPTGLPLLVQRTIARTIVLQEIVGKGRFGEVWHGRWCGEDVAVKIFSSRDERSWFREAEIYQTVMLRHENILGFIAADNKDNGTWTQLWLVSEYHEQGSLYDYLNRNIVTVAGMIKLALSIASGLAHLHMEIVGTQGKPAIAHRDIKSKNILVKKCETCAIADLGLAVKHDSILNTIDIPQNPKVGTKRYMAPEMLDDTMNVNIFESFKRADIYSVGLVYWEIARRCSVGGIVEEYQLPYYDMVPSDPSIEEMRKVVCDQKFRPSIPNQWQSCEALRVMGRIMRECWYANGAARLTALRIKKTISQLCVKEDCKA

SEQ ID NO: 202 - protein, 517 aa, Homo sapiens
MALTPPLLLLSAGTMTLGSPRKGLLMLLMALVTQGDPVKPSRGPLVTCTCESPHCKGPTCRGAWCTVVLVREEGRHPQEHRGCGNLHRELCRGRPTEFVNHYCCDSHLCNHNVSLVLEATQPPSEQPGTDGQLALILGPVLALLALVALGVLGLWHVRRRQEKQRGLHSELGESSLILKASEQGDSMLGDLLDSDCTTGSGSGLPFLVQRTVARQVALVECVGKGRYGEVWRGLWHGESVAVKIFSSRDEQSWFRETEIYNTVLLRHDNILGFIASDMTSRNSSTQLWLITHYHEHGSLYDFLQRQTLEPHLALRLAVSAACGLAHLHVEIFGTQGKPAIAHRDFKSRNVLVKSNLQCCIADLGLAVMHSQGSDYLDIGNNPRVGTKRYMAPEVLDEQIRTDCFESYKWTDIWAFGLVLWEIARRTIVNGIVEDYRPPFYDVVPNDPSFEDMKKVVCVDQQTPTIPNRLAADPVLSGLAQMMRECWYPNPSARLTALRIKKTLQKISNSPEKPKVIQ

SEQ ID NO: 203 - protein, 159 aa, Homo sapiens
MALTPPLLLLSAGTMTLGSPRKGLLMLLMALVTQGDPVKPSRGPLVTCTCESPHCKGPTCRGAWCTVVLVREEGRHPQEHRGCGNLHRELCRGRPTEFVNHYCCDSHLCNHNVSLVLEGKGRYGEVWRGLWHGESVAVKIFSSRDEQSWFRETEIYNTV

SEQ ID NO: 204 - protein, 329 aa, Homo sapiens
MALTPPLLLLSAGTMTLGSPRKGLLMLLMALVTQGKGRYGEVWRGLWHGESVAVKIFSSRDEQSWFRETEIYNTVLLRHDNILGFIASDMTSRNSSTQLWLITHYHEHGSLYDFLQRQTLEPHLALRLAVSAACGLAHLHVEIFGTQGKPAIAHRDFKSRNVLVKSNLQCCIADLGLAVMHSQGSDYLDIGNNPRVGTKRYMAPEVLDEQIRTDCFESYKWTDIWAFGLVLWEIARRTIVNGIVEDYRPPFYDVVPNDPSFEDMKKVVCVDQQTPTIPNRLAADPVLSGLAQMMRECWYPNPSARLTALRIKKTLQKISNSPEKPKVIQ

SEQ ID NO: 205 - protein, 89 aa, Homo sapiens
MTLGSPRKGLLMLLMALVTQGDPVKPSRGPLVTCTCESPHCKGPTCRGAWCTVVLVREEGRHPQEHRGCGNLHRELCRGRPTEFVNHYC

SEQ ID NO: 206 - protein, 503 aa, Homo sapiens
MTLGSPRKGLLMLLMALVTQGDPVKPSRGPLVTCTCESPHCKGPTCRGAWCTVVLVREEGRHPQEHRGCGNLHRELCRGRPTEFVNHYCCDSHLCNHNVSLVLEATQPPSEQPGTDGQLALILGPVLALLALVALGVLGLWHVRRRQEKQRGLHSELGESSLILKASEQGDSMLGDLLDSDCTTGSGSGLPFLVQRTVARQVALVECVGKGRYGEVWRGLWHGESVAVKIFSSRDEQSWFRETEIYNTVLLRHDNILGFIASDMTSRNSSTQLWLITHYHEHGSLYDFLQRQTLEPHLALRLAVSAACGLAHLHVEIFGTQGKPAIAHRDFKSRNVLVKSNLQCCIADLGLAVMHSQGSDYLDIGNNPRVGTKRYMAPEVLDEQIRTDCFESYKWTDIWAFGLVLWEIARRTIVNGIVEDYRPPFYDVVPNDPSFEDMKKVVCVDQQTPTIPNRLAADPVLSGLAQMMRECWYPNPSARLTALRIKKTLQKISNSPEKPKVIQ

SEQ ID NO: 207 - protein, 163 aa, Homo sapiens
  SITE 1: note = misc_feature - Xaa can be any naturally occurring amino acid
XSRNVLVKSNLQCCIADLGLAVMHSQGSDYLDIGNNPRVGTKRYMAPEVLDEQIRTDCFESYKWTDIWAFGLVLWEIARRTIVNGIVEDYRPPFYDVVPNDPSFEDMKKVVCVDQQTPTIPNRLAADPVRPLLGLGWRGVVAHGWDFWAQELVSEASASSHRY

SEQ ID NO: 208 - protein, 99 aa, Homo sapiens
MAEGNTLISVDYEIFGKVQGVFFRKHTQAEGKKLGLVGWVQNTDRGTVQGQLQGPISKVRHMQEWLETRGSPKSHIDKANFNNEKVILKLDYSDFQIVK

SEQ ID NO: 209 - protein, 99 aa, Homo sapiens; identical to SEQ ID NO: 208

SEQ ID NO: 210 - protein, 55 aa, Homo sapiens
MAEGNTLISVDYEIFGKVQGVFFRKHTQEMTVENRIAETHSKSCVPVSFATSYAG

SEQ ID NO: 211 - protein, 62 aa, Homo sapiens
MAEGNTLISVDYEIFGKVQGVFFRKHTQEMTVENRIAETHSKSCVPVSFATSYAGINEFKRI

SEQ ID NO: 212 - protein, 37 aa, Homo sapiens
MAEGNTLISVDYEIFGKVQGVFFRKHTQVCGLQALGW

SEQ ID NO: 213 - protein, 129 aa, Homo sapiens
MPASARLAGAGLLLAFLRALGCAGRAPGLSMAEGNTLISVDYEIFGKVQGVFFRKHTQAEGKKLGLVGWVQNTDRGTVQGQLQGPISKVRHMQEWLETRGSPKSHIDKANFNNEKVILKLDYSDFQIVK

SEQ ID NO: 214 - protein, 97 aa, Homo sapiens
MCPLPLAAAAVAAPRAPLRLLNRGLAAAMSTAQSLKSVDYEVFGRVQGVCFRMYTEDEARKIGVVGWVKNTSKGTVTGQVQGPEDKVNSMLECSGLI

SEQ ID NO: 215 - protein, 98 aa, Homo sapiens
MCPLPLAAAAVAAPRAPLRLLNRGLAAAMSTAQSLKSVDYEVFGRVQGVCFRMYTEDEARKIGVVGWVKNTSKGTVTGQVQGPEDKVNSMNSSAPEAG

SEQ ID NO: 216 - protein, 40 aa, Homo sapiens
MLLTQSLFGGLFPRTRETMRREAVPDDNELPRNKHLNWKS

SEQ ID NO: 217 - protein, 116 aa, Homo sapiens
MLLTQSLFGGLFPRTRETMRRYKVSLFYLGCSRTPNVKLSSCLGLPCCWDYSYKFIQLSEFGFGQVIIVSEEPWKENISCSSTTFIKSTICLNPDSEFRPCFNAWLSLIRENAVGL

SEQ ID NO: 218 - protein, 172 aa, Homo sapiens
MLLTQSLFGGLFPRTRETMRRYKVSLFYLGCSRTPNVKLSSCLGLPCCWDYSYKFIQLSEFGFGQVIIVSEEPWKENISCSSTTFIKSTICLSVCFRMYTEDEARKIGVVGWVKNTSKGTVTGQVQGPEDKVNSMKSWLSKVGSPSSRIDRTNFSNEKTISKLEYSNFSIRY

SEQ ID NO: 219 - protein, 99 aa, Homo sapiens
MSTAQSLKSVDYEVFGRVQGVCFRMYTEDEARKIGVVGWVKNTSKGTVTGQVQGPEDKVNSMKSWLSKVGSPSSRIDRTNFSNEKTISKLEYSNFSIRY

SEQ ID NO: 220 - protein, 83 aa, Homo sapiens
MTALVLQIEYTEDEARKIGVVGWVKNTSKGTVTGQVQGPEDKVNSMKSWLSKVGSPSSRIDRTNFSNEKTISKLEYSNFSIRY

SEQ ID NO: 221 - protein, 66 aa, Homo sapiens
  SITE 1: note = misc_feature - Xaa can be any naturally occurring amino acid
XAQSLKSVDYEVFGRVQGVCFRMYTEDEARKIGVVGWVKNTSKGTVTGQVQGPEDKVNSILAFPFY

SEQ ID NO: 222 - protein, 270 aa, Homo sapiens
MDSLEWNWALVYELSGEHHDEEWSVKTYQEVAQKFVETHPEFIGIKIIYSDHRSKDVAVIAESIRMAMGLRIKFPTVVAGFDLVGHEDTGHSLHDYKEALMIPAKDGVKLPYFFHAGETDWQGTSIDRNILDALMLNTTRIGHGFALSKHPAVRTYSWKKDIPIEVCPISNQVLKLVSDLRNHPVATLMATGHPMVISSDDPAMFGAKGLSYDFYEVFMGIGGMKADLRTLKQLAMNSIKYSTLLESEKNTFMEIWKKRWDKFIADVATK

SEQ ID NO: 223 - protein, 391 aa, Homo sapiens
MDWLVRNVTYRPHCHICFTPRGIMQFRFAHPTPRPSEKCSKWILLEDYRKRVQNVTEFDDSLLRNFTLVTQHPEVIYTNQNVVWSKFETIFFTISGLIHYAPVFRDYVFRSMQEFYEDNVLYMEIRARLLPVYELSGEHHDEEWSVKTYQEVAQKFVETHPEFIGIKIIYSDHRSKDVAVIAESIRMAMGLRIKFPTVVAGFDLVGHEDTGHSLHDYKEALMIPAKDGVKLPYFFHAGETDWQGTSIDRNILDALMLNTTRIGHGFALSKHPAVRTYSWKKDIPIEVCPISNQVLKLVSDLRNHPVATLMATGHPMVISSDDPAMFGAKGLSYDFYEVFMGIGGMKADLRTLKQLAMNSIKYSTLLESEKNTFMEIWKKRWDKFIADVATK

SEQ ID NO: 224 - protein, 135 aa, Homo sapiens
MLVDGPSERPALCFLLLAVAMSFFGSALSIDETRAHLLLKEKMMRLGGRLVLNTKEELANERLMTLKIAEMKEAMRTLIFPPSMHFFQAKHLIERSQVFNILRMMPKGAALHLHDIGIVTMDWLVRNVTYRPHCH

SEQ ID NO: 225 - protein, 152 aa, Homo sapiens
MLVDGPSERPALCFLLLAVAMSFFGSALSIDETRAHLLLKEKMMRLGGRLVLNTKEELANERLMTLKIAEMKEAMRTLIFPPSMHFFQAKHLIERSQVFNILRMMPKGAALHLHDIGIVTMDWLVRNVTYRPHCHICFTPRGIMQFRFAHPT

SEQ ID NO: 226 - protein, 511 aa, Homo sapiens
MLVDGPSERPALCFLLLAVAMSFFGSALSIDETRAHLLLKEKMMRLGGRLVLNTKEELANERLMTLKIAEMKEAMRTLIFPPSMHFFQAKHLIERSQVFNILRMMPKGAALHLHDIGIVTMDWLVRNVTYRPHCHICFTPRGIMQFRFAHPTPRPSEKCSKWILLEDYRKRVQNVTEFDDSLLRNFTLVTQHPEVIYTNQNVVWSKFETIFFTISGLIHYAPVFRDYVFRSMQEFYEDNVLYMEIRARLLPVYELSGEHHDEEWSVKTYQEVAQKFVETHPEFIGIKIIYSDHRSKDVAVIAESIRMAMGLRIKFPTVVAGFDLVGHEDTGHSLHDYKEALMIPAKDGVKLPYFFHAGETDWQGTSIDRNILDALMLNTTRIGHGFALSKHPAVRTYSWKKDIPIEVCPISNQVLKLVSDLRNHPVATLMATGHPMVISSDDPAMFGAKGLSYDFYEVFMGIGGMKADLRTLKQLAMNSIKYSTLLESEKNTFMEIWKKRWDKFIADVATK

SEQ ID NO: 227 - protein, 511 aa, Homo sapiens; identical to SEQ ID NO: 226

SEQ ID NO: 228 - protein, 511 aa, Homo sapiens; identical to SEQ ID NO: 226

SEQ ID NO: 229 - protein, 469 aa, Homo sapiens
MMRLGGRLVLNTKEELANERLMTLKIAEMKEAMRTLIFPPSMHFFQAKHLIERSQVFNILRMMPKGAALHLHDIGIVTMDWLVRNVTYRPHCHICFTPRGIMQFRFAHPTPRPSEKCSKWILLEDYRKRVQNVTEFDDSLLRNFTLVTQHPEVIYTNQNVVWSKFETIFFTISGLIHYAPVFRDYVFRSMQEFYEDNVLYMEIRARLLPVYELSGEHHDEEWSVKTYQEVAQKFVETHPEFIGIKIIYSDHRSKDVAVIAESIRMAMGLRIKFPTVVAGFDLVGHEDTGHSLHDYKEALMIPAKDGVKLPYFFHAGETDWQGTSIDRNILDALMLNTTRIGHGFALSKHPAVRTYSWKKDIPIEVCPISNQVLKLVSDLRNHPVATLMATGHPMVISSDDPAMFGAKGLSYDFYEVFMGIGGMKADLRTLKQLAMNSIKYSTLLESEKNTFMEIWKKRWDKFIADVATK

SEQ ID NO: 230 - protein, 59 aa, Homo sapiens
MVLLRVLILLLSWAAGMGAPARWRIPKSSPPPRPAAQTRGKLCCLQLGSCIVLYPARRS

SEQ ID NO: 231 - protein, 148 aa, Homo sapiens
MVLLRVLILLLSWAAGMGDRDFDDGVLGLAWVGAPSGSSGGICEKSKLYSDGKKKSLNTGIITVQNYGSHVPPKVSHITFAHEVGHNFGSPHDSGTECTPGESKNLGQKENGNYIMYARATSGDKLNNNKFSLCSIRNISQVLEKKRN

SEQ ID NO: 232 - protein, 71 aa, Homo sapiens
MVLLRVLILLLSWAAGMGDRDFDDGVLGLAWVGAPSGSSGGICEKSKLYSDVPTMGKLHSKEKPIKSSSPN

SEQ ID NO: 233 - protein, 115 aa, Homo sapiens
MVLLRVLILLLSWAAGMGGQYGNPLNKYIRHYEGLSYNVDSLHQKHQRAKRAVSHEDQFLRLDFHAHGRDGVLPCCPGWSQTPGLKRSTCLSLPQCWDYRCEPSPMISVFDYPHK

SEQ ID NO: 234 - protein, 125 aa, Homo sapiens
MVLLRVLILLLSWAAGMGGQYGNPLNKYIRHYEGLSYNVDSLHQKHQRAKRAVSHEDQFLRLDFHAHGRHFNLRMKRDTSLFSDEFKVETSNKVLDYDTSHIYTGHIYDYPHKYGPQGGCADHSV

SEQ ID NO: 235 - protein, 748 aa, Homo sapiens
MVLLRVLILLLSWAAGMGGQYGNPLNKYIRHYEGLSYNVDSLHQKHQRAKRAVSHEDQFLRLDFHAHGRHFNLRMKRDTSLFSDEFKVETSNKVLDYDTSHIYTGHIYGEEGSFSHGSVIDGRFEGFIQTRGGTFYVEPAERYIKDRTLPFHSVIYHEDDINYPHKYGPQGGCADHSVFERMRKYQMTGVEEVTQIPQEEHAANGPELLRKKRTTSAEKNTCQLYIQTDHLFFKYYGTREAVIAQISSHVKAIDTIYQTTDFSGIRNISFMVKRIRINTTADEKDPTNPFRFPNIGVEKFLELNSEQNHDDYCLAYVFTDRDFDDGVLGLAWVGAPSGSSGGICEKSKLYSDGKKKSLNTGIITVQNYGSHVPPKVSHITFAHEVGHNFGSPHDSGTECTPGESKNLGQKENGNYIMYARATSGDKLNNNKFSLCSIRNISQVLEKKRNNCFVESGQPICGNGMVEQGEECDCGYSDQCKDECCFDANQPEGRKCKLKPGKQCSPSQGPCCTAQCAFKSKSEKCRDDSDCAREGICNGFTALCPASDPKPNFTDCNRHTQVCINGQCAGSICEKYGLEECTCASSDGKDDKELCHVCCMKKMDPSTCASTGSVQWSRHFSGRTITLQPGSPCNDFRGYCDVFMRCRLVDADGPLARLKKAIFSPELYENIAEWIVAHWWAVLLMGIALIMLMAGFIKICSVHTPSSNPKLPPPKPLPGTLKRRRPPQPIQQPQRQRPRESYQMGHMRR

SEQ ID NO: 236 - protein, 38 aa, Homo sapiens
MVLLRVLILLLSWAAGMGVPTMGKLHSKEKPIKSSSPN

SEQ ID NO: 237 - protein, 58 aa, Homo sapiens
  SITE 1: note = misc_feature - Xaa can be any naturally occurring amino acid
XEEGSFSHGSVIDGRFEGFIQTRGGTFYVEPAERYIKDRTLPFHSVIYHEDDISEGLN

SEQ ID NO: 238 - protein, 278 aa, Homo sapiens
MAARPLPVSPARALLLALAGALLAPCEARGVSLWNQGRADEVVSASVGSGDLWIPVKSFDSKNHPEVLNIRLQRESKELIINLERNEGLIASSFTETHYLQDGTDVSLARNYTGHCYYHGHVRGYSDSAVSLSTCSGLRGLIVFENESYVLEPMKSATNRYKLFPAKKLKSVRGSCGSHHNTPNLAAKNVFPPPSQTWARRHKRETLKATKYVELVIVADNREFQRQGKDLEKVKQRLIEIANHVDKFYRPLNIRIVLVGVEVWNDMDKCSVSQDPFT

SEQ ID NO: 239 - protein, 909 aa, Homo sapiens
MAARPLPVSPARALLLALAGALLAPCEARGVSLWNQGRADEVVSASVGSGDLWIPVKSFDSKNHPEVLNIRLQRESKELIINLERNEGLIASSFTETHYLQDGTDVSLARNYTVILGHCYYHGHVRGYSDSAVSLSTCSGLRGLIVFENESYVLEPMKSATNRYKLFPAKKLKSVRGSCGSHHNTPNLAAKNVFPPPSQTWARRHKRETLKATKYVELVIVADNREFQRQGKDLEKVKQRLIEIANHVDKFYRPLNIRIVLVGVEVWNDMDKCSVSQDPFTSLHEFLDWRKMKLLPRKSHDNAQLVSGVYFQGTTIGMAPIMSMCTADQSGGIVMDHSDNPLGAAVTLAHELGHNFGMNHDTLDRGCSCQMAVEKGGCIMNASTGYPFPMVFSSCSRKDLETSLEKGMGVCLFNLPEVRESFGGQKCGNRFVEEGEECDCGEPEECMNRCCNATTCTLKPDAVCAHGLCCEDCQLKPAGTACRDSSNSCDLPEFCTGASPHCPANVYLHDGHSCQDVDGYCYNGICQTHEQQCVTLWGPGAKPAPGICFERVNSAGDPYGNCGKVSKSSFAKCEMRDAKCGKIQCQGGASRPVIGTNAVSIETNIPLQQGGRILCRGTHVYLGDDMPDPGLVLAGTKCADGKICLNRQCQNISVFGVHECAMQCHGRGVCNNRKNCHCEAHWAPPFCDKFGFGGSTDSGPIRQADNQGLTIGILVTILCLLAAGFVVYLKRKTLIRLLFTNKKTTIEKLRCVRPSRPPRGFQPCQAHLGHLGKGLMRKPPDSYPPKDNPRRLLQCQNVDISRPLNGLNVPQPQSTQRVLPPLHRAPRAPSVPARPLPAKPALRQAQGTCKPNPPQKPLPADPLARTTRLTHALARTPGQWETGLRLAPLRPAPQYPHQVPRSTHTAYIK

SEQ ID NO: 240 - protein, 738 aa, Homo sapiens
MAARPLPVSPARALLLALAGALLAPCEARGVSLWNQGRADEVVSASVGSGDLWIPVKSFDSKNHPEVLNIRLQRESKELIINLERNEGLIASSFTETHYLQDGTDVSLARNYTVILGHCYYHGHVRGYSDSAVSLSTCSGLRGLIVFENESYVLEPMKSATNRYKLFPAKKLKSVRGSCGSHHNTPNLAAKNVFPPPSQTWARRHKRETLKATKYVELVIVADNREFQRQGKDLEKVKQRLIEIANHVDKFYRPLNIRIVLVGVEVWNDMDKCSVSQDPFTSLHEFLDWRKMKLLPRKSHDNAQLVSGVYFQGTTIGMAPIMSMCTADQSGGIVMDHSDNPLGAAVTLAHELGHNFGMNHDTLDRGCSCQMAVEKGGCIMNASTGYPFPMVFSSCSRKDLETSLEKGMGVCLFNLPEVRESFGGQKCGNRFVEEGEECDCGEPEECMNRCCNATTCTLKPDAVCAHGLCCEDCQLKPAGTACRDSSNSCDLPEFCTGASPHCPANVYLHDGHSCQDVDGYCYNGICQTHEQQCVTLWGPGAKPAPGICFERVNSAGDPYGNCGKVSKSSFAKCEMRDAKCGKIQCQGGASRPVIGTNAVSIETNIPLQQGGRILCRGTHVYLGDDMPDPGLVLAGTKCADGKICLNRQCQNISVFGVHECAMQCHGRGVCNNRKNCHCEAHWAPPFCDKFGFGGSTDSGPIRQAEARQEAAESNRERGQGQEPVGSQEHASTASLTLI

SEQ ID NO: 241 - protein, 520 aa, Homo sapiens
MRLALLWALGLLGAGSPLPSWPLPNIGGTEEQQAESEKAPREPLEPQVLQDDLPISLKKVLQTSLPEPLRIKLELDGDSHILELLQNRELVPGLNFSNCSRRALEKALLDGMGSCLFERLPSLPPMAAFCGNMFVEPGEQCDCGFLDDCVDPCCDSLTCQLRPGAQCASDGPCCQNCQLRPSGWQCRPTRGDCDLPEFCPGDSSQCPPDVSLGDGEPCAGGQAVCMHGRCASYAQQCQSLWGPGAQPAAPLCLQTANTRGNAFGSCGRNPSGSYVSCTPRDAICGQLQCQTGRTQPLLGSIRDLLWETIDVNGTELNCSWVHLDLGSDVAQPLLTLPGTACGPGLVCIDHRCQRVDLLGAQECRSKCHGHGVCDSNRHCYCEEGWAPPDCTTQLKATSSLTTGLLLSLLVLLVLVMLGASYWYRARLHQRLCQLKGPTCQYRAAQSGPSERPGPPQRALLARGTKSQGPAKPPPPRKPLPADPQGRCPSGDLPGPGAGIPPLVVPSRPAPPPPTVSSLYL

SEQ ID NO: 242 - protein, 814 aa, Homo sapiens
MRLALLWALGLLGAGSPLPSWPLPNIGGTEEQQAESEKAPREPLEPQVLQDDLPISLKKVLQTSLPEPLRIKLELDGDSHILELLQNRELVPGRPTLVWYQPDGTRVVSEGHTLENCCYQGRVRGYAGSWVSICTCSGLRGLVVLTPERSYTLEQGPGDLQGPPIISRIQDLHLPGHTCALSWRESVHTQKPPEHPLGQRHIRRRRDVVTETKTVELVIVADHSEAQKYRDFQHLLNRTLEVALLLDTFFRPLNVRVALVGLEAWTQRDLVEISPNPAVTLENFLHWRRAHLLPRLPHDSAQLVTGTSFSGPTVGMAIQNSICSPDFSGGVNMDHSTSILGVASSIAHELGHSLGLDHDLPGNSCPCPGPAPAKTCIMEASTDFLPGLNFSNCSRRALEKALLDGMGSCLFERLPSLPPMAAFCGNMFVEPGEQCDCGFLDDCVDPCCDSLTCQLRPGAQCASDGPCCQNCQLRPSGWQCRPTRGDCDLPEFCPGDSSQCPPDVSLGDGEPCAGGQAVCMHGRCASYAQQCQSLWGPGAQPAAPLCLQTANTRGNAFGSCGRNPSGSYVSCTPRDAICGQLQCQTGRTQPLLGSIRDLLWETIDVNGTELNCSWVHLDLGSDVAQPLLTLPGTACGPGLVCIDHRCQRVDLLGAQECRSKCHGHGVCDSNRHCYCEEGWAPPDCTTQLKATSSLTTGLLLSLLVLLVLVMLGASYWYRARLHQRLCQLKGPTCQYRAAQSGPSERPGPPQRALLARGTKSQGPAKPPPPRKPLPADPQGRCPSGDLPGPGAGIPPLVVPSRPAPPPPTVSSLYL

SEQ ID NO: 243 - protein, 796 aa, Homo sapiens
MRLALLWALGLLGAGSPLPSWPLPNIGGTEEQQAESEKAPREPLEPQVLQDDLPISLKKVLQTSLPEPLRIKLELDGDSHILELLQNRELVPGRPTLVWYQPDGTRVVSEGHTLENCCYQGRVRGYAGSWVSICTCSGLRGLVVLTPERSYTLEQGPGDLQGPPIISRIQDLHLPGHTCALSWRESVHTQKPPEHPLGQRHIRRRRDVVTETKTVELVIVADHSEAQKYRDFQHLLNRTLEVALLLDTFFRPLNVRVALVGLEAWTQRDLVEISPNPAVTLENFLHWRRAHLLPRLPHDSAQLVTGTSFSGPTVGMAIQNSICSPDFSGGVNMDHSTSILGVASSIAHELGHSLGLDHDLPGNSCPCPGPAPAKTCIMEASTDFLPGLNFSNCSRRALEKALLDGMGSCLFERLPSLPPMAAFCGNMFVEPGEQCDCGFLDDCVDPCCDSLTCQLRPGAQCASDGPCCQNCQLRPSGWQCRPTRGDCDLPEFCPGDSSQCPPDVSLGDGEPCAGGQAVCMHGRCASYAQQCQSLWGPGAQPAAPLCLQTANTRGNAFGSCGRNPSGSYVSCTPRDAICGQLQCQTGRTQPLLGSIRDLLWETIDVNGTELNCSWVHLDLGSDVAQPLLTLPGTACGPGLVCIDHRCQRVDLLGAQECRSKCHGHGVCDSNRHCYCEEGWAPPDCTTQLKATSSLTTGLLLSLLVLLVLVMLGASYWYRARLHQRLCQLKGPTCQYRLVLSASRPPLPGRCRLTLCPRDSSLRGQPSPHPQGSHCLPTPRAGAHRVTCPAQGLESRP

SEQ ID NO: 244 - protein, 772 aa, Homo sapiens
MRLALLWALGLLGAGSPLPSWPLPNIGGTEEQQAESEKAPREPLEPQVLQDDLPISLKKVLQTSLPEPLRIKLELDGDSHILELLQNRELVPGRPTLVWYQPDGTRVVSEGHTLENCCYQGRVRGYAGSWVSICTCSGLRGLVVLTPERSYTLEQGPGDLQGPPIISRIQDLHLPGHTCALSWRESVHTQKPPEHPLGQRHIRRRRDVVTETKTVELVIVADHSEAQKYRDFQHLLNRTLEVALLLDTFFRPLNVRVALVGLEAWTQRDLVEISPNPAVTLENFLHWRRAHLLPRLPHDSAQLVTGTSFSGPTVGMAIQNSICSPDFSGGVNMDHSTSILGVASSIAHELGHSLGLDHDLPGNSCPCPGPAPAKTCIMEASTDFLPGLNFSNCSRRALEKALLDGMGSCLFERLPSLPPMAAFCGNMFVEPGEQCDCGFLDDCVDPCCDSLTCQLRPGAQCASDGPCCQNCQLRPSGWQCRPTRGDCDLPEFCPGDSSQCPPDVSLGDGEPCAGGQAVCMHGRCASYAQQCQSLWGPGAQPAAPLCLQTANTRGNAFGSCGRNPSGSYVSCTPRDAICGQLQCQTGRTQPLLGSIRDLLWETIDVNGTELNCSWVHLDLGSDVAQPLLTLPGTACGPGLVCIDHRCQRVDLLGAQECRSKCHGHGVCDSNRHCYCEEGWAPPDCTTQLKATSSLTTGLLLSLLVLLVLVMLGASYWYRARLHQRLCQLKGPTCQYSLRGQPSPHPQGSHCLPTPRAGAHRVTCPAQGLESRP

SEQ ID NO: 245 - protein, 839 aa, Homo sapiens
MRLALLWALGLLGAGSPLPSWPLPNIGGTEEQQAESEKAPREPLEPQVLQDDLPISLKKVLQTSLPEPLRIKLELDGDSHILELLQNRELVPGRPTLVWYQPDGTRVVSEGHTLENCCYQGRVRGYAGSWVSICTCSGLRGLVVLTPERSYTLEQGPGDLQGPPIISRIQDLHLPGHTCALSWRESVHTQKPPEHPLGQRHIRRRRDVVTETKTVELVIVADHSEAQKYRDFQHLLNRTLEVALLLDTFFRPLNVRVALVGLEAWTQRDLVEISPNPAVTLENFLHWRRAHLLPRLPHDSAQLVTGTSFSGPTVGMAIQNSICSPDFSGGVNMDHSTSILGVASSIAHELGHSLGLDHDLPGNSCPCPGPAPAKTCIMEASTDFLPGLNFSNCSRRALEKALLDGMGSCLFERLPSLPPMAAFCGNMFVEPGEQCDCGFLDDCVDPCCDSLTCQLRPGAQCASDGPCCQNCQLRPSGWQCRPTRGDCDLPEFCPGDSSQCPPDVSLGDGEPCAGGQAVCMHGRCASYAQQCQSLWGPGAQPAAPLCLQTANTRGNAFGSCGRNPSGSYVSCTPRDAICGQLQCQTGRTQPLLGSIRDLLWETIDVNGTELNCSWVHLDLGSDVAQPLLTLPGTACGPGLVCIDHRCQRVDLLGAQECRSKCHGHGVCDSNRHCYCEEGWAPPDCTTQLKATSSLTTGLLLSLLVLLVLVMLGASYWYRARLHQRLCQLKGPTCQYRAAQSGPSERPGPPQRALLARGTKQASALSFPAPPSRPLPPDPVSKRLQSQGPAKPPPPRKPLPADPQGRCPSGDLPGPGAGIPPLVVPSRPAPPPPTVSSLYL

SEQ ID NO: 246 - protein, 838 aa, Homo sapiens
MRLALLWALGLLGAGSPLPSWPLPNIGGTEEQQAESEKAPREPLEPQVLQDDLPISLKKVLQTSLPEPLRIKLELDGDSHILELLQNRELVPGRPTLVWYQPDGTRVVSEGHTLENCCYQGRVRGYAGSWVSICTCSGLRGLVVLTPERSYTLEQGPGDLQGPPIISRIQDLHLPGHTCALSWRESVHTQKPPEHPLGQRHIRRRRDVVTETKTVELVIVADHSEAQKYRDFQHLLNRTLEVALLLDTFFRPLNVRVALVGLEAWTQRDLVEISPNPAVTLENFLHWRRAHLLPRLPHDSAQLVTGTSFSGPTVGMAIQNSICSPDFSGGVNMDHSTSILGVASSIAHELGHSLGLDHDLPGNSCPCPGPAPAKTCIMEASTDFLPGLNFSNCSRRALEKALLDGMGSCLFERLPSLPPMAAFCGNMFVEPGEQCDCGFLDDCVDPCCDSLTCQLRPGAQCASDGPCCQNCQLRPSGWQCRPTRGDCDLPEFCPGDSSQCPPDVSLGDGEPCAGGQAVCMHGRCASYAQQCQSLWGPGAQPAAPLCLQTANTRGNAFGSCGRNPSGSYVSCTPRDAICGQLQCQTGRTQPLLGSIRDLLWETIDVNGTELNCSWVHLDLGSDVAQPLLTLPGTACGPGLVCIDHRCQRVDLLGAQECRSKCHGHGVCDSNRHCYCEEGWAPPDCTTQLKATSSLTTGLLLSLLVLLVLVMLGASYWYRARLHQRLCQLKGPTCQYRAAQSGPSERPGPPQRALLARGTKAELADRPNPPTRPLPADPVVRSPKSQGPAKPPPPRKPLPADPQGRCPSGDLPGPGAGIPPLVVPSRPAPPPPTVSSLYL

SEQ ID NO: 247 - protein, 863 aa, Homo sapiens
MRLALLWALGLLGAGSPLPSWPLPNIGGTEEQQAESEKAPREPLEPQVLQDDLPISLKKVLQTSLPEPLRIKLELDGDSHILELLQNRELVPGRPTLVWYQPDGTRVVSEGHTLENCCYQGRVRGYAGSWVSICTCSGLRGLVVLTPERSYTLEQGPGDLQGPPIISRIQDLHLPGHTCALSWRESVHTQKPPEHPLGQRHIRRRRDVVTETKTVELVIVADHSEAQKYRDFQHLLNRTLEVALLLDTFFRPLNVRVALVGLEAWTQRDLVEISPNPAVTLENFLHWRRAHLLPRLPHDSAQLVTGTSFSGPTVGMAIQNSICSPDFSGGVNMDHSTSILGVASSIAHELGHSLGLDHDLPGNSCPCPGPAPAKTCIMEASTDFLPGLNFSNCSRRALEKALLDGMGSCLFERLPSLPPMAAFCGNMFVEPGEQCDCGFLDDCVDPCCDSLTCQLRPGAQCASDGPCCQNCQLRPSGWQCRPTRGDCDLPEFCPGDSSQCPPDVSLGDGEPCAGGQAVCMHGRCASYAQQCQSLWGPGAQPAAPLCLQTANTRGNAFGSCGRNPSGSYVSCTPRDAICGQLQCQTGRTQPLLGSIRDLLWETIDVNGTELNCSWVHLDLGSDVAQPLLTLPGTACGPGLVCIDHRCQRVDLLGAQECRSKCHGHGVCDSNRHCYCEEGWAPPDCTTQLKATSSLTTGLLLSLLVLLVLVMLGASYWYRARLHQRLCQLKGPTCQYRAAQSGPSERPGPPQRALLARGTKQASALSFPAPPSRPLPPDPVSKRLQAELADRPNPPTRPLPADPVVRSPKSQGPAKPPPPRKPLPADPQGRCPSGDLPGPGAGIPPLVVPSRPAPPPPTVSSLYL

SEQ ID NO: 248 - protein, 862 aa, Homo sapiens
MRLALLWALGLLGAGSPLPSWPLPNIGGTEEQQAESEKAPREPLEPQVLQDDLPISLKKVLQTSLPEPLRIKLELDGDSHILELLQNRELVPGRPTLVWYQPDGTRVVSEGHTLENCCYQGRVRGYAGSWVSICTCSGLRGLVVLTPERSYTLEQGPGDLQGPPIISRIQDLHLPGHTCALSWRESVHTQKPPEHPLGQRHIRRRRDVVTETKTVELVIVADHSEAQKYRDFQHLLNRTLEVALLLDTFFRPLNVRVALVGLEAWTQRDLVEISPNPAVTLENFLHWRRAHLLPRLPHDSAQLVTGTSFSGPTVGMAIQNSICSPDFSGGVNMDHSTSILGVASSIAHELGHSLGLDHDLPGNSCPCPGPAPAKTCIMEASTDFLPGLNFSNCSRRALEKALLDGMGSCLFERLPSLPPMAAFCGNMFVEPGEQCDCGFLDDCVDPCCDSLTCQLRPGAQCASDGPCCQNCQLRPSGWQCRPTRGDCDLPEFCPGDSSQCPPDVSLGDGEPCAGGQAVCMHGRCASYAQQCQSLWGPGAQPAAPLCLQTANTRGNAFGSCGRNPSGSYVSCTPRDAICGQLQCQTGRTQPLLGSIRDLLWETIDVNGTELNCSWVHLDLGSDVAQPLLTLPGTACGPGLVCIDHRCQRVDLLGAQECRSKCHGHGVCDSNRHCYCEEGWAPPDCTTQLKATSSLTTGLLLSLLVLLVLVMLGASYWYRARLHQRLCQLKGPTCQYRAAQSGPSERPGPPQRALLARGTKASALSFPAPPSRPLPPDPVSKRLQAELADRPNPPTRPLPADPVVRSPKSQGPAKPPPPRKPLPADPQGRCPSGDLPGPGAGIPPLVVPSRPAPPPPTVSSLYL

SEQ ID NO: 249 - protein, 797 aa, Homo sapiens
MRLALLWALGLLGAGSPLPSWPLPNIGGTEEQQAESEKAPREPLEPQVLQDDLPISLKKVLQTSLPEPLRIKLELDGDSHILELLQNRELVPGRPTLVWYQPDGTRVVSEGHTLENCCYQGRVRGYAGSWVSICTCSGLRGLVVLTPERSYTLEQGPGDLQGPPIISRIQDLHLPGHTCALSWRESVHTQKPPEHPLGQRHIRRRRDVVTETKTVELVIVADHSEAQKYRDFQHLLNRTLEVALLLDTFFRPLNVRVALVGLEAWTQRDLVEISPNPAVTLENFLHWRRAHLLPRLPHDSAQLVTGTSFSGPTVGMAIQNSICSPDFSGGVNMDHSTSILGVASSIAHELGHSLGLDHDLPGNSCPCPGPAPAKTCIMEASTDFLPGLNFSNCSRRALEKALLDGMGSCLFERLPSLPPMAAFCGNMFVEPGEQCDCGFLDDCVDPCCDSLTCQLRPGAQCASDGPCCQNCQLRPSGWQCRPTRGDCDLPEFCPGDSSQCPPDVSLGDGEPCAGGQAVCMHGRCASYAQQCQSLWGPGAQPAAPLCLQTANTRGNAFGSCGRNPSGSYVSCTPRDAICGQLQCQTGRTQPLLGSIRDLLWETIDVNGTELNCSWVHLDLGSDVAQPLLTLPGTACGPGLVCIDHRCQRVDLLGAQECRSKCHGHGVCDSNRHCYCEEGWAPPDCTTQLKATSSLTTGLLLSLLVLLVLVMLGASYWYRARLHQRLCQLKGPTCQYRAAQSGPSERPGPPQRALLARGTKAELADRPNPPTRPLPADPVVRSPKVTVGGEKGTASPPT

SEQ ID NO: 250 - protein, 822 aa, Homo sapiens
MRLALLWALGLLGAGSPLPSWPLPNIGGTEEQQAESEKAPREPLEPQVLQDDLPISLKKVLQTSLPEPLRIKLELDGDSHILELLQNRELVPGRPTLVWYQPDGTRVVSEGHTLENCCYQGRVRGYAGSWVSICTCSGLRGLVVLTPERSYTLEQGPGDLQGPPIISRIQDLHLPGHTCALSWRESVHTQKPPEHPLGQRHIRRRRDVVTETKTVELVIVADHSEAQKYRDFQHLLNRTLEVALLLDTFFRPLNVRVALVGLEAWTQRDLVEISPNPAVTLENFLHWRRAHLLPRLPHDSAQLVTGTSFSGPTVGMAIQNSICSPDFSGGVNMDHSTSILGVASSIAHELGHSLGLDHDLPGNSCPCPGPAPAKTCIMEASTDFLPGLNFSNCSRRALEKALLDGMGSCLFERLPSLPPMAAFCGNMFVEPGEQCDCGFLDDCVDPCCDSLTCQLRPGAQCASDGPCCQNCQLRPSGWQCRPTRGDCDLPEFCPGDSSQCPPDVSLGDGEPCAGGQAVCMHGRCASYAQQCQSLWGPGAQPAAPLCLQTANTRGNAFGSCGRNPSGSYVSCTPRDAICGQLQCQTGRTQPLLGSIRDLLWETIDVNGTELNCSWVHLDLGSDVAQPLLTLPGTACGPGLVCIDHRCQRVDLLGAQECRSKCHGHGVCDSNRHCYCEEGWAPPDCTTQLKATSSLTTGLLLSLLVLLVLVMLGASYWYRARLHQRLCQLKGPTCQYRAAQSGPSERPGPPQRALLARGTKQASALSFPAPPSRPLPPDPVSKRLQAELADRPNPPTRPLPADPVVRSPKVTVGGEKGTASPPT

SEQ ID NO: 251 - protein, 824 aa, Homo sapiens
MRLALLWALGLLGAGSPLPSWPLPNIVLSWGVLGPAGGTEEQQAESEKAPREPLEPQVLQDDLPISLKKVLQTSLPEPLRIKLELDGDSHILELLQNRELVPGRPTLVWYQPDGTRVVSEGHTLENCCYQGRVRGYAGSWVSICTCSGLRGLVVLTPERSYTLEQGPGDLQGPPIISRIQDLHLPGHTCALSWRESVHTQKPPEHPLGQRHIRRRRDVVTETKTVELVIVADHSEAQKYRDFQHLLNRTLEVALLLDTFFRPLNVRVALVGLEAWTQRDLVEISPNPAVTLENFLHWRRAHLLPRLPHDSAQLVTGTSFSGPTVGMAIQNSICSPDFSGGVNMDHSTSILGVASSIAHELGHSLGLDHDLPGNSCPCPGPAPAKTCIMEASTDFLPGLNFSNCSRRALEKALLDGMGSCLFERLPSLPPMAAFCGNMFVEPGEQCDCGFLDDCVDPCCDSLTCQLRPGAQCASDGPCCQNCQLRPSGWQCRPTRGDCDLPEFCPGDSSQCPPDVSLGDGEPCAGGQAVCMHGRCASYAQQCQSLWGPGAQPAAPLCLQTANTRGNAFGSCGRNPSGSYVSCTPRDAICGQLQCQTGRTQPLLGSIRDLLWETIDVNGTELNCSWVHLDLGSDVAQPLLTLPGTACGPGLVCIDHRCQRVDLLGAQECRSKCHGHGVCDSNRHCYCEEGWAPPDCTTQLKATSSLTTGLLLSLLVLLVLVMLGASYWYRARLHQRLCQLKGPTCQYRAAQSGPSERPGPPQRALLARGTKSQGPAKPPPPRKPLPADPQGRCPSGDLPGPGAGIPPLVVPSRPAPPPPTVSSLYL

SEQ ID NO: 252 - protein, 633 aa, Homo sapiens
MRLALLWALGLLGAGSPLPSWPLPNIVSACNVEAPQVALRSSRQSQRRPRGSPWSPRSFRTISQLASKRCFRELVPGRPTLVWYQPDGTRVVSEGHTLENCCYQGRVRGYAGSWVSICTCSGLRGLVVLTPERSYTLEQGPGDLQGPPIISRIQDLHLPGHTCALSWRESVHTQKPPEHPLGQRHIRRRRDVVTETKTVELVIVADHSEAQKYRDFQHLLNRTLEVALLLDTFFRPLNVRVALVGLEAWTQRDLVEISPNPAVTLENFLHWRRAHLLPRLPHDSAQLVTGTSFSGPTVGMAIQNSICSPDFSGGVNMDHSTSILGVASSIAHELGHSLGLDHDLPGNSCPCPGPAPAKTCIMEASTDFLPGLNFSNCSRRALEKALLDGMGSCLFERLPSLPPMAAFCGNMFVEPGEQCDCGFLDDCVDPCCDSLTCQLRPGAQCASDGPCCQNCQLRPSGWQCRPTRGDCDLPEFCPGDSSQCPPDVSLGDGEPCAGGQAVCMHGRCASYAQQCQSLWGPGAQPAAPLCLQTANTRGNAFGSCGRNPSGSYVSCTPRDAICGQLQCQTGRTQPLLGSIRDLLWETIDVNGTELNCSWVHLDLGSDVAQPLLTLPGTACGPGLVSSLGGQDQV

SEQ ID NO: 253 - protein, 824 aa, Homo sapiens
MRQSLLFLTSVVPFVLAPRPPDDPGFGPHQRLEKLDSLLSDYDILSLSNIQQHSVRKRDLQTSTHVETLLTFSALKRHFKLYLTSSTERFSQNFKVVVVDGKNESEYTVKWQDFFTGHVVGEPDSRVLAHIRDDDVIIRINTDGAEYNIEPLWRFVNDTKDKRMLVYKSEDIKNVSRLQSPKVCGYLKVDNEELLPKGLVDREPPEELVHRVKRRADPDPMKNTCKLLVVADHRFYRYMGRGEESTTTNYLIELIDRVDDIYRNTSWDNAGFKGYGIQIEQIRILKSPQEVKPGEKHYNMAKSYPNEEKDAWDVKMLLEQFSFDIAEEASKVCLAHLFTYQDFDMGTLGLAYVGSPRANSHGGVCPKAYYSPVGKKNIYLNSGLTSTKNYGKTILTKEADLVTTHELGHNFGAEHDPDGLAECAPNEDQGGKYVMYPIAVSGDHENNKMFSNCSKQSIYKTIESKAQECFQERSNKVCGNSRVDEGEECDPGIMYLNNDTCCNSDCTLKEGVQCSDRNSPCCKNCQFETAQKKCQEAINATCKGVSYCTGNSSECPPPGNAEDDTVCLDLGKCKDGKCIPFCEREQQLESCACNETDNSCKVCCRDLSGRCVPYVDAEQKNLFLRKGKPCTVGFCDMNGKCEKRVQDVIERFWDFIDQLSINTFGKFLADNIVGSVLVFSLIFWIPFSILVHCVDKKLDKQYESLSLFHPSNVEMLSSMDSASVRIIKPFPAPQTPGRLQPAPVIPSAPAAPKLDHQRMDTIQEDPSTDSHMDEDGFEKDPFPNSSTAAKSFEDLTDHPVTRSEKAASFKLQRQNRVDSKETEC

SEQ ID NO: 254 - protein, 285 aa, Homo sapiens
MRQSLLFLTSVVPFVLAPRPPDDPGFGPHQRLEKLDSLLSDYDILSLSNIQQHSVRKRDLQTSTHVETLLTFSALKRHFKLYLTSSTERFSQNFKVVVVDGKNESEYTVKWQDFFTGHVVGEPDSRVLAHIRDDDVIIRINTDGAEYNIEPLWRFVNDTKDKRMLVYKSEDIKNVSRLQSPKVCGYLKVDNEELLPKGLVDREPPEELVHRVKRRADPDPMKNTCKLLVVADHRFYRYMGRGEESTTTNYLIELIDRVDDIYRNTSWDNAGFKGYGIQIEQLLFE

SEQ ID NO: 255 - protein, 258 aa, Homo sapiens
MRQSLLFLTSVVPFVLAPRPPDDPGFGPHQRLEKLDSLLSDYDILSLSNIQQHSVRKRDLQTSTHVETLLTFSALKRHFKLYLTSSTERFSQNFKVVVVDGKNESEYTVKWQDFFTGHVVGEPDSRVLAHIRDDDVIIRINTDGAEYNIEPLWRFVNDTKDKRMLVYKSEDIKNVSRLQSPKVCGYLKVDNEELLPKGLVDREPPEELVHRVKRRADPDPMKNTCKLLVVADHRFYRYMGRGEESTTTNYLIHTDRAN

SEQ ID NO: 256 - protein, 115 aa, Homo sapiens
MFLLLALLTELGRLQAHEGSEGIFLHVTVPRKIKSNDSEVSERKMIYIITIDGQPYTLHLGKQSFLPQNFLVYTYNETGSLHSVSPYFMMHCHYQGYAAEFPNSFVTLSICSGLR

SEQ ID NO: 257 - protein, 715 aa, Homo sapiens
MFLLLALLTELGRLQAHEGSEGIFLHVTVPRKIKSNDSEVSERKMIYIITIDGQPYTLHLGKQSFLPQNFLVYTYNETGSLHSVSPYFMMHCHYQGYAAEFPNSFVTLSICSGLRGFLQFENISYGIEPVESSARFEHIIYQMKNNDPNVSILAVNYSHIWQKDQPYKVPLNSQIKNLSKLLPQYLEIYIIVEKALMFTQFKLTVILSSLELWSNENQISTSGDADDILQRFLAWKRDYLILRPHDIAYLLVYRKHPKYVGATFPGTVCNKSYDAGIAMYPDAIGLEGFSVIIAQLLGLNVGLTYDDITQCFCLRATCIMNHEAVSASGRKIFSNCSMHDYRYFVSKFETKCLQKLSNLQPLHQNQPVCGNGILESNEECDCGNKNECQFKKCCDYNTCKLKGSVKCGSGPCCTSKCELSIAGTPCRKSIDPECDFTEYCNGTSSNCVPDTYALNGRLCKLGTAYCYNGQCQTTDNQCAKIFGKGAQGAPFACFKEVNSLHERSENCGFKNSQPLPCERKDVLCGKLACVQPHKNANKSDAQSTVYSYIQDHVCVSIATGSSMRSDGTDNAYVADGTMCGPEMYCVNKTCRKVHLMGYNCNATTKCKGKGICNNFGNCQCFPGHRPPDCKFQFGSPGGSIDDGNFQKSGDFYTEKGYNTHWNNWFILSFCIFLPFFIVFTTVIFKRNEISKSCNRENAEYNRNSSVVSESDDVGH

SEQ ID NO: 258 - protein, 739 aa, Homo sapiens
MFLLLALLTELGRLQAHEGSEGIFLHVTVPRKIKSNDSEVSERKMIYIITIDGQPYTLHLGKQSFLPQNFLVYTYNETGSLHSVSPYFMMHCHYQGYAAEFPNSFVTLSICSGLRGFLQFENISYGIEPVESSARFEHIIYQMKNNDPNVSILAVNYSHIWQKDQPYKVPLNSQIKNLSKLLPQYLEIYIIVEKALYDYMGSEMMAVTQKIVQVIGLVNTMFTQFKLTVILSSLELWSNENQISTSGDADDILQRFLAWKRDYLILRPHDIAYLLVYRKHPKYVGATFPGTVCNKSYDAGIAMYPDAIGLEGFSVIIAQLLGLNVGLTYDDITQCFCLRATCIMNHEAVSASGRKIFSNCSMHDYRYFVSKFETKCLQKLSNLQPLHQNQPVCGNGILESNEECDCGNKNECQFKKCCDYNTCKLKGSVKCGSGPCCTSKCELSIAGTPCRKSIDPECDFTEYCNGTSSNCVPDTYALNGRLCKLGTAYCYNGQCQTTDNQCAKIFGKGAQGAPFACFKEVNSLHERSENCGFKNSQPLPCERKDVLCGKLACVQPHKNANKSDAQSTVYSYIQDHVCVSIATGSSMRSDGTDNAYVADGTMCGPEMYCVNKTCRKVHLMGYNCNATTKCKGKGICNNFGNCQCFPGHRPPDCKFQFGSPGGSIDDGNFQKSGDFYTEKGYNTHWNNWFILSFCIFLPFFIVFTTVIFKRNEISKSCNRENAEYNRNSSVVSESDDVGH

SEQ ID NO: 259 - protein, 182 aa, Homo sapiens
MFLLLALLTELGRLQAHEGSEGIFLHVTVPRKIKSNDSEVSERKMIYIITIDGQPYTLHLGKQSFLPQNFLVYTYNETGSLHSVSPYFMMHCHYQGYAAEFPNSFVTLSICSGLRGFLQFENISYGIEPVESSARFEHIIYQMKNNDPNVSILAVNYSHIWQKDQPYKVPLNSQVTVIILML

SEQ ID NO: 260 - protein, 62 aa, Homo sapiens
MFLLLALLTELGRLQAHEGSEGIFLHVTVPRKIKSNDSEVSERKVFGEQVVFGYMNDLHHYN

SEQ ID NO: 261 - protein, 330 aa, Homo sapiens
EEDVDLGYVEDGTPCGPQMMCLEHRCLPVASFNFSTCLSSKEGTICSGNGVCSNELKCVCNRHWIGSDCNTYFPHNDDAKTGITLSGNGVAGTNIIIGIIAGTILVLALILGITAWGYKNYREQRQLPQGDYVKKPGDGDSFYSDIPPGVSTNSASSSKKRSNGLSHSWSERIPDTKHISDICENGRPRSNSWQGNLGGNKKKIRGKRFRPRSNSTEREPQAPEPGHSLAQTVPSQGISPGGSDSPQTGSLDHRYLNPWFKRDYNVAKWVEDVNKNTEGPYFRTLSPAKSPSSSTGSIASSRKYPYPMPPLPDEDKKVNRQSARLWETSI

SEQ ID NO: 262 - protein, 804 aa, Homo sapiens
MELEKRKENRFVERQSIVPLRLIYRSGGEDESRHDALDTRVRGDLGGPQLTHVDQASFQVDAFGTSFILDVVLNHDLLSSEYIERHIEHGGKTVEVKGGEHCYYQGHIRGNPDSFVALSTCHGLHGMFYDGNHTYLIEPEENDTTQEDFHFHSVYKSRLFEFSLDDLPSEFQQVNITPSKFILKPRPKRSKRQLRRYPRNVEEETKYIELMIVNDHLMFKKHRLSVVHTNTYAKSVVNMADLIYKDQLKTRIVLVAMETWATDNKFAISENPLITLREFMKYRRDFIKEKSDAVHLFSGSQFESSRSGAAYIGGICSLLKGGGVNEFGKTDLMAVTLAQSLAHNIGIISDKRKLASGECKCEDTWSGCIMGDTGYYLPKKFTQCNIEEYHDFLNSGGGACLFNKPSKLLDPPECGNGFIETGEECDCGTPAECVLEGAECCKKCTLTQDSQCSDGLCCKKCKFQPMGTVCREAVNDCDIRETCSGNSSQCAPNIHKMDGYSCDGVQGICFGGRCKTRDRQCKYIWGQKVTASDKYCYEKLNIEGTEKGNCGKDKDTWIQCNKRDVLCGYLLCTNIGNIPRLGELDGEITSTLVVQQGRTLNCSGGHVKLEEDVDLGYVEDGTPCGPQMMCLEHRCLPVASFNFSTCLSSKEGTICSGNGVCSNELKCVCNRHWIGSDCNTYFPHNDDAKTGITLSGNGVAGTNIIIGIIAGTILVLALILGITAWGYKNYREQRQLPQGDYVKKPGDGDSFYSDIPPGVSTNSASSSKKRSNGLSHSWSERIPDTKHISDICENGRPRSNSWQG

SEQ ID NO: 263 - protein, 196 aa, Homo sapiens
MQAAVAVSVPFLLLCVLGTCPPARCGQAGDASLMELEKRKENRFVERQSIVPLRLIYRSGGEDESRHDALDTRVRGDLGGPQIQMFLKSESQKTIYQIQLTHVDQASFQVDAFGTSFILDVVLNHDLLSSEYIERHIEHGGKTVEVKGGEHCYYQGHIRGNPDSFVALSTCHGLHGMFYDGNHTYLIEPEENDTTQ

SEQ ID NO: 264 - protein, 906 aa, Homo sapiens
MQAAVAVSVPFLLLCVLGTCPPARCGQAGDASLMELEKRKENRFVERQSIVPLRLIYRSGGEDESRHDALDTRVRGDLGGPQLTHVDQASFQVDAFGTSFILDVVLNHDLLSSEYIERHIEHGGKTVEVKGGEHCYYQGHIRGNPDSFVALSTCHGLHGMFYDGNHTYLIEPEENDTTQEDFHFHSVYKSRLFEFSLDDLPSEFQQVNITPSKFILKPRPKRSKRQLRRYPRNVEEETKYIELMIVNDHLMFKKHRLSVVHTNTYAKSVVNMADLIYKDQLKTRIVLVAMETWATDNKFAISENPLITLREFMKYRRDFIKEKSDAVHLFSGSQFESSRSGAAYIGGICSLLKGGGVNEFGKTDLMAVTLAQSLAHNIGIISDKRKLASGECKCEDTWSGCIMGDTGYYLPKKFTQCNIEEYHDFLNSGGGACLFNKPSKLLDPPECGNGFIETGEECDCGTPAECVLEGAECCKKCTLTQDSQCSDGLCCKKCKFQPMGTVCREAVNDCDIRETCSGNSSQCAPNIHKMDGYSCDGVQGICFGGRCKTRDRQCKYIWGQKVTASDKYCYEKLNIEGTEKGNCGKDKDTWIQCNKRDVLCGYLLCTNIGNIPRLGELDGEITSTLVVQQGRTLNCSGGHVKLEEDVDLGYVEDGTPCGPQMMCLEHRCLPVASFNFSTCLSSKEGTICSGNGVCSNELKCVCNRHWIGSDCNTYFPHNDDAKTGITLSGNGVAGTNIIIGIIAGTILVLALILGITAWGYKNYREQRQLPQGDYVKKPGDGDSFYSDIPPGVSTNSASSSKKRSNGLSHSWSERIPDTKHISDICENGRPRSNSWQGNLGGNKKKIRGKRFRPRSNSTETLSPAKSPSSSTGSIASSRKYPYPMPPLPDEDKKVNRQSARLWETSI

SEQ ID NO: 265 - protein, 859 aa, Homo sapiens
MQAAVAVSVPFLLLCVLGTCPPARCGQAGDASLMELEKRKENRFVERQSIVPLRLIYRSGGEDESRHDALDTRVRGDLGGPQLTHVDQASFQVDAFGTSFILDVVLNHDLLSSEYIERHIEHGGKTVEVKGGEHCYYQGHIRGNPDSFVALSTCHGLHGMFYDGNHTYLIEPEENDTTQEDFHFHSVYKSRLFEFSLDDLPSEFQQVNITPSKFILKPRPKRSKRQLRRYPRNVEEETKYIELMIVNDHLMFKKHRLSVVHTNTYAKSVVNMADLIYKDQLKTRIVLVAMETWATDNKFAISENPLITLREFMKYRRDFIKEKSDAVHLFSGSQFESSRSGAAYIGGICSLLKGGGVNEFGKTDLMAVTLAQSLAHNIGIISDKRKLASGECKCEDTWSGCIMGDTGYYLPKKFTQCNIEEYHDFLNSGGGACLFNKPSKLLDPPECGNGFIETGEECDCGTPAECVLEGAECCKKCTLTQDSQCSDGLCCKKCKFQPMGTVCREAVNDCDIRETCSGNSSQCAPNIHKMDGYSCDGVQGICFGGRCKTRDRQCKYIWGQKVTASDKYCYEKLNIEGTEKGNCGKDKDTWIQCNKRDVLCGYLLCTNIGNIPRLGELDGEITSTLVVQQGRTLNCSGGHVKLEEDVDLGYVEDGTPCGPQMMCLEHRCLPVASFNFSTCLSSKEGTICSGNGVCSNELKCVCNRHWIGSDCNTYFPHNDDAKTGITLSGNGVAGTNIIIGIIAGTILVLALILGITAWGYKNYREQRQLPQGDYVKKPGDGDSFYSDIPPGVSTNSASSSKKRSNGLSHSWSERIPDTKHISDICENGRPRSNSWQGNLGGNKKKIRGKRFRPRSNSTE

SEQ ID NO: 266 - protein, 899 aa, Homo sapiens
MQAAVAVSVPFLLLCVLGTCPPARCGQAGDASLMELEKRKENRFVERQSIVPLRLIYRSGGEDESRHDALDTRVRGDLGGPQLTHVDQASFQVDAFGTSFILDVVLNHDLLSSEYIERHIEHGGKTVEVKGGEHCYYQGHIRGNPDSFVALSTCHGLHGMFYDGNHTYLIEPEENDTTQEDFHFHSVYKSRLFEFSLDDLPSEFQQVNITPSKFILKPRPKRSKRQLRRYPRNVEEETKYIELMIVNDHLMFKKHRLSVVHTNTYAKSVVNMADLIYKDQLKTRIVLVAMETWATDNKFAISENPLITLREFMKYRRDFIKEKSDAVHLFSGSQFESSRSGAAYIGGICSLLKGGGVNEFGKTDLMAVTLAQSLAHNIGIISDKRKLASGECKCEDTWSGCIMGDTGYYLPKKFTQCNIEEYHDFLNSGGGACLFNKPSKLLDPPECGNGFIETGEECDCGTPAECVLEGAECCKKCTLTQDSQCSDGLCCKKCKFQPMGTVCREAVNDCDIRETCSGNSSQCAPNIHKMDGYSCDGVQGICFGGRCKTRDRQCKYIWGQKVTASDKYCYEKLNIEGTEKGNCGKDKDTWIQCNKRDVLCGYLLCTNIGNIPRLGELDGEITSTLVVQQGRTLNCSGGHVKLEEDVDLGYVEDGTPCGPQMMCLEHRCLPVASFNFSTCLSSKEGTICSGNGVCSNELKCVCNRHWIGSDCNTYFPHNDDAKTGITLSGNGVAGTNIIIGIIAGTILVLALILGITAWGYKNYREQRSNGLSHSWSERIPDTKHISDICENGRPRSNSWQGNLGGNKKKIRGKRFRPRSNSTEYLNPWFKRDYNVAKWVEDVNKNTEGPYFRTLSPAKSPSSSTGSIASSRKYPYPMPPLPDEDKKVNRQSARLWETSI

SEQ ID NO: 267 - protein, 870 aa, Homo sapiens
MQAAVAVSVPFLLLCVLGTCPPARCGQAGDASLMELEKRKENRFVERQSIVPLRLIYRSGGEDESRHDALDTRVRGDLGGPQLTHVDQASFQVDAFGTSFILDVVLNHDLLSSEYIERHIEHGGKTVEVKGGEHCYYQGHIRGNPDSFVALSTCHGLHGMFYDGNHTYLIEPEENDTTQEDFHFHSVYKSRLFEFSLDDLPSEFQQVNITPSKFILKPRPKRSKRQLRRYPRNVEEETKYIELMIVNDHLMFKKHRLSVVHTNTYAKSVVNMADLIYKDQLKTRIVLVAMETWATDNKFAISENPLITLREFMKYRRDFIKEKSDAVHLFSGSQFESSRSGAAYIGGICSLLKGGGVNEFGKTDLMAVTLAQSLAHNIGIISDKRKLASGECKCEDTWSGCIMGDTGYYLPKKFTQCNIEEYHDFLNSGGGACLFNKPSKLLDPPECGNGFIETGEECDCGTPAECVLEGAECCKKCTLTQDSQCSDGLCCKKCKFQPMGTVCREAVNDCDIRETCSGNSSQCAPNIHKMDGYSCDGVQGICFGGRCKTRDRQCKYIWGQKVTASDKYCYEKLNIEGTEKGNCGKDKDTWIQCNKRDVLCGYLLCTNIGNIPRLGELDGEITSTLVVQQGRTLNCSGGHVKLEEDVDLGYVEDGTPCGPQMMCLEHRCLPVASFNFSTCLSSKEGTICSGNGVCSNELKCVCNRHWIGSDCNTYFPHNDDAKTGITLSGNGVAGTNIIIGIIAGTILVLALILGITAWGYKNYREQRSNGLSHSWSERIPDTKHISDICENGRPRSNSWQGNLGGNKKKIRGKRFRPRSNSTETLSPAKSPSSSTGSIASSRKYPYPMPPLPDEDKKVNRQSARLWETSI

SEQ ID NO: 268 - protein, 342 aa, Homo sapiens
MQAAVAVSVPFLLLCVLGTCPPARCGQAGDASLMELEKRKENRFVERQSIVPLRLIYRSGGEDESRHDALDTRVRGDLGGPQLTHVDQASFQVDAFGTSFILDVVLNHDLLSSEYIERHIEHGGKTVEVKGGEHCYYQGHIRGNPDSFVALSTCHGLHGMFYDGNHTYLIEPEENDTTQEDFHFHSVYKSRLFEFSLDDLPSEFQQVNITPSKFILKPRPKRSKRQLRRYPRNVEEETKYIELMIVNDHLMFKKHRLSVVHTNTYAKSVVNMADLIYKDQLKTRIVLVAMETWATDNKFAISENPLITLREFMKYRRDFIKEKSDAVHLFSYVTSVMMYYFF

SEQ ID NO: 269 - protein, 264 aa, Homo sapiens
  SITE 1: note = misc_feature - Xaa can be any naturally occurring amino acid
XCNRHWIGSDCNTYFPHNDDAKTGITLSGNGVAGTNIIIGIIAGTILVLALILGITAWGYKNYREQRQLPQGDYVKKPGDGDSFYSDIPPGVSTNSASSSKKRSAFLSHFQISTCSITHYSISQNISLFCSRSNGLSHSWSERIPDTKHISDICENGRPRSNSWQGNLGGNKKKIRGKRFRPRSNSTEYLNPWFKRDYNVAKWVEDVNKNTEGPYFRTLSPAKSPSSSTGSIASSRKYPYPMPPLPDEDKKVNRQSARLWETSI

SEQ ID NO: 270 - protein, 217 aa, Homo sapiens
MLQGLLPVSLLLSVAVSAIKELPGVKKYEVVYPIRLHPLHKREAKEPEQQEQFETELKYKMTINGKIAVLYLKKNKNLLAPGYTETYYNSTGKEITTSPQIMDDCYYQGHILNEKVSDASISTCRGLRGYFSQGDQRYFIEPLSPIHRDGQEHALFKYNPDEKNYDSTCGMDGVLWAHDLQQNIALPATKLVKLKDRKVQEHEKYIEYYLVLDNGEF

SEQ ID NO: 271 - protein, 775 aa, Homo sapiens
MLQGLLPVSLLLSVAVSAIKELPGVKKYEVVYPIRLHPLHKREAKEPEQQEQFETELKYKMTINGKIAVLYLKKNKNLLAPGYTETYYNSTGKEITTSPQIMDDCYYQGHILNEKVSDASISTCRGLRGYFSQGDQRYFIEPLSPIHRDGQEHALFKYNPDEKNYDSTCGMDGVLWAHDLQQNIALPATKLVKLKDRKVQEHEKYIEYYLVLDNGEFKRYNENQDEIRKRVFEMANYVNMLYKKLNTHVALVGMEIWTDKDKIKITPNASFTLENFSKWRGSVLSRRKRHDIAQLITATELAGTTVGLAFMSTMCSPYSVGVVQDHSDNLLRVAGTMAHEMGHNFGMFHDDYSCKCPSTICVMDKALSFYIPTDFSSCSRLSYDKFFEDKLSNCLFNAPLPTDIISTPICGNQLVEMGEDCDCGTSEECTNICCDAKTCKIKATFQCALGECCEKCQFKKAGMVCRPAKDECDLPEMCNGKSGNCPDDRFQVNGFPCHHGKGHCLMGTCPTLQEQCTELWGPGTEVADKSCYNRNEGGSKYGYCRRVDDTLIPCKANDTMCGKLFCQGGSDNLPWKGRIVTFLTCKTFDPEDTSQEIGMVANGTKCGDNKVCINAECVDIEKAYKSTNCSSKCKGHAVCDHELQCQCEEGWIPPDCDDSSVVFHFSIVVGVLFPMAVIFVVVAMVIRHQSSREKQKKDQRPLSTTGTRPHKQKRKPQMVKAVQPQEMSQMKPHVYDLPVEGNEPPASFHKDTNALPPTVFKDNPVSTPKDSNPKA

SEQ ID NO: 272 - protein, 540 aa, Homo sapiens
MLQGLLPVSLLLSVAVSAIKELPGVKKYEVVYPIRLHPLHKREAKEPEQQEQFETELKYKMTINGKIAVLYLKKNKNLLAPGYTETYYNSTGKEITTSPQIMDDCYYQGHILNEKVSDASISTCRGLRGYFSQGDQRYFIEPLSPIHRDGQEHALFKYNPDEKNYDSTCGMDGVLWAHDLQQNIALPATKLVKLKDRKVQEHEKYIEYYLVLDNGEFKRYNENQDEIRKRVFEMANYVNMLYKKLNTHVALVGMEIWTDKDKIKITPNASFTLENFSKWRGSVLSRRKRHDIAQLITATELAGTTVGLAFMSTMCSPYSVGVVQDHSDNLLRVAGTMAHEMGHNFGMFHDDYSCKCPSTICVMDKALSFYIPTDFSSCSRLSYDKFFEDKLSNCLFNAPLPTDIISTPICGNQLVEMGEDCDCGTSEECTNICCDAKTCKIKATFQCALGECCEKCQFKKAGMVCRPAKDECDLPEMCNGKSGNCPDDRFQVNGFPCHHGKGHCLMGTCPTLQEQCTELWGPGRRTNPFPCACAKENHFR

SEQ ID NO: 273 - protein, 58 aa, Homo sapiens
MLQGLLPVSLLLSVAVSAIKELPGVKKYEVVYPIRLHPLHKREAKEPEQQFLSSMKIS

SEQ ID NO: 274 - protein, 387 aa, Homo sapiens
  SITE 1: note = misc_feature - Xaa can be any naturally occurring amino acid
XFYIPTDFSSCSRLSYDKFFEDKLSNCLFNAPLPTDIISTPICGNQLVEMGEDCDCGTSEECTNICCDAKTCKIKATFQCALGECCEKCQFKKAGMVCRPAKDECDLPEMCNGKSGNCPDDRFQVNGFPCHHGKGHCLMGTCPTLQEQCTELWGPGTEVADKSCYNRNEGGSKYGYCRRVDDTLIPCKANDTMCGKLFCQGGSDNLPWKGRIVTFLTCKTFDPEDTSQEIGMVANGTKCGDNKVCINAECVDIEKAYKSTNCSSKCKGHAVCDHELQCQCEEGWIPPDCDDSSVVFHFSIVVGVLFPMAVIFVVVAMVIRHQSSREKQKKDQRPLSTTGTRPHKQKRKPQMVKAVQPQEMSQMKPHVYDLPVEGNEPPASFDSNPKA

SEQ ID NO: 275 - protein, 174 aa, Homo sapiens
  SITE 1: note = misc_feature - Xaa can be any naturally occurring amino acid
XKGRIVTFLTCKTFDPEDTSQEIGMVANGTKCGDNKVCINAECVDIEKAYKSTNCSSKCKGHAVCDHELQCQCEEGWIPPDCDDSSVVFHFSIVVGVLFPMAVIFVVVAMVIRHQSSREKQKKDQRPLSTTGTRPHKQKRKPQMVKAVQPQEVNYIVWAVITMAPLCVSLTLLS

SEQ ID NO: 276 - protein, 14 aa, Homo sapiens
MKMLLLLHCLGVFL

SEQ ID NO: 277 - protein, 44 aa, Homo sapiens
MKMLLLLHCLGVFLSCSGHIQDEHPQYHSPPDVVIPVRITGTTR

SEQ ID NO: 278 - protein, 90 aa, Homo sapiens
MKMLLLLHCLGVFLSCSGHIQDEHPQYHSPPDVVIPVRITGTTRGMTPPGWLSYILPFGGQKHIIHIKVKKLLFSKHLPVFTYTDQGAIL

SEQ ID NO: 279 - protein, 820 aa, Homo sapiens
MKMLLLLHCLGVFLSCSGHIQDEHPQYHSPPDVVIPVRITGTTRGMTPPGWLSYILPFGGQKHIIHIKVKKLLFSKHLPVFTYTDQGAILEDQPFVQNNCYYHGYVEGDPESLVSLSTCFGGFQGILQINDFAYEIKPLAFSTTFEHLVYKMDSEEKQFSTMRSGFMQNEITCRMEFEEIDNSTQKQSSYVGWWIHFRIVEIVVVIDNYLYIRYERNDSKLLEDLYVIVNIVDSILDVIGVKVLLFGLEIWTNKNLIVVDDVRKSVHLYCKWKSENITPRMQHDTSHLFTTLGLRGLSGIGAFRGMCTPHRSCAIVTFMNKTLGTFSIAVAHHLGHNLGMNHDEDTCRCSQPRCIMHEGNPPITKFSNCSYGDFWEYTVERTKCLLETVHTKDIFNVKRCGNGVVEEGEECDCGPLKHCAKDPCCLSNCTLTDGSTCAFGLCCKDCKFLPSGKVCRKEVNECDLPEWCNGTSHKCPDDFYVEDGIPCKERGYCYEKSCHDRNEQCRRIFGAGANTASETCYKELNTLGDRVGHCGIKNATYIKCNISDVQCGRIQCENVTEIPNMSDHTTVHWARFNDIMCWSTDYHLGMKGPDIGEVKDGTECGIDHICIHRHCVHITILNSNCSPAFCNKRGICNNKHHCHCNYLWDPPNCLIKGYGGSVDSGPPPKRKKKKKFCYLCILLLIVLFILLCCLYRLCKKSKPIKKQQDVQTPSAKEEEKIQRRPHELPPQSQPWVMPSQSQPPVTPSQSHPQVMPSQSQPPVTPSQSQPRVMPSQSQPPVMPSQSHPQLTPSQSQPPVTPSQRQPQLMPSQSQPPVTPS

SEQ ID NO: 280 - protein, 820 aa, Homo sapiens; identical to SEQ ID NO: 279

SEQ ID NO: 281 - protein, 820 aa, Homo sapiens; identical to SEQ ID NO: 279

SEQ ID NO: 282 - protein, 820 aa, Homo sapiens; identical to SEQ ID NO: 279

SEQ ID NO: 283 - protein, 820 aa, Homo sapiens; identical to SEQ ID NO: 279

SEQ ID NO: 284 - protein, 820 aa, Homo sapiens; identical to SEQ ID NO: 279

SEQ ID NO: 285 - protein, 787 aa, Homo sapiens
MFRLWLLLAGLCGLLASRPGFQNSLLQIVIPEKIQTNTNDSSEIEYEQISYIIPIDEKLYTVHLKQRYFLADNFMIYLYNQGSMNTYSSDIQTQCYYQGNIEGYPDSMVTLSTCSGLRGILQFENVSYGIEPLESAVEFQHVLYKLKNEDNDIAIFIDRSLKEQPMDDNIFISEKSEPAVPDLFPLYLEMHIVVDKTLYDYWGSDSMIVTNKVIEIVGLANSMFTQFKVTIVLSSLELWSDENKISTVGEADELLQKFLEWKQSYLNLRPHDIAYLLIYMDYPRYLGAVFPGTMCITRYSAGVALYPKEITLEAFAVIVTQMLALSLGISYDDPKKCQCSESTCIMNPEVVQSNGVKTFSSCSLRSFQNFISNVGVKCLQNKPQMQKKSPKPVCGNGRLEGNEICDCGTEAQCGPASCCDFRTCVLKDGAKCYKGLCCKDCQILQSGVECRPKAHPECDIAENCNGTSPECGPDITLINGLSCKNNKFICYDGDCHDLDARCESVFGKGSRNAPFACYEEIQSQSDRFGNCGRDRNNKYVFCGWRNLICGRLVCTYPTRKPFHQENGDVIYAFVRDSVCITVDYKLPRTVPDPLAVKNGSQCDIGRVCVNRECVESRIIKASAHVCSQQCSGHGVCDSRNKCHCSPGYKPPNCQIRSKGFSIFPEEDMGSIMERASGKTENTWLLGFLIALPILIVTTAIVLARKQLKKWFAKEEEFPSSESKSEGSTQTYASQSSSEGSTQTYASQTRSESSSQADTSKSKSEDSAEAYTSRSKSQDSTQTQSSSN

SEQ ID NO: 286 - protein, 629 aa, Homo sapiens
MFRLWLLLAGLCGLLASRPGFQNSLLQIVIPEKIQTNTNDSSEIEYEQISYIIPIDEKLYTVHLKQRYFLADNFMIYLYNQGSMNTYSSDIQTQCYYQGNIEGYPDSMVTLSTCSGLRGILQFENVSYGIEPLESAVEFQHVLYKLKNEDNDIAIFIDRSLKEQPMDDNIFISEKSEPAVPDLFPLYLEMHIVVDKTLYDYWGSDSMIVTNKVIEIVGLANSMFTQFKVTIVLSSLELWSDENKISTVGEADELLQKFLEWKQSYLNLRPHDIAYLLIYMDYPRYLGAVFPGTMCITRYSAGVALQCGPASCCDFRTCVLKDGAKCYKGLCCKDCQILQSGVECRPKAHPECDIAENCNGTSPECGPDITLINGLSCKNNKFICYDGDCHDLDARCESVFGKGSRNAPFACYEEIQSQSDRFGNCGRDRNNKYVFCGWRNLICGRLVCTYPTRKPFHQENGDVIYAFVRDSVCITVDYKLPRTVPDPLAVKNGSQCDIGRVCVNRECVESRIIKASAHVCSQQCSGHGVCDSRNKCHCSPGYKPPNCQIRSKGFSIFPEEDMGSIMERASGKTENTWLLGFLIALPILIVTTAIVLARKQLKKWFAKEEEFPSSESKSQDSTQTQSSSN

SEQ ID NO: 287 - protein, 184 aa, Homo sapiens
MFRLWLLLAGLCGLLASRPGFQNSLLQIVIPEKIQTNTNDSSEIEYEQISYIIPIDEKLYTVHLKQRYFLADNFMIYLYNQGSMNTYSSDIQTQCYYQGNIEGYPDSMVTLSTCSGLRGILQFENVSYGIEPLESAVEFQHVLYKLKNEDNDIAIFIDRSLKEQPMDDNIFISEKYDYWGSDSM

SEQ ID NO: 288 - protein, 155 aa, Homo sapiens
MFRLWLLLAGLCGLLASRPGFQNSLLQIVIPEKIQTNTNDSSEIEYEQISYIIPIDEKLYTVHLKQRYFLADNFMIYLYNQGSMNTYSSDIQTQCYYQGNIEGYPDSMVTLSTCSGLRSLKEQPMDDNIFISEKSEPAVPDLFPLYLEMHIVVDK

SEQ ID NO: 289 - protein, 53 aa, Homo sapiens
MIYLYNQGSMNTYSSDIQTQCYYQGNIEGYPDSMVTLSTCSGLRGILQFENVS

SEQ ID NO: 290 - protein, 688 aa, Homo sapiens
MNVRGAAPGVRASPRPWQFPTSQRLPAGSPEAAPCSASGCCWPGSAASWRQDPEQISYIIPIDEKLYTVHLKQRYFLADNFMIYLYNQGSMNTYSSDIQTQCYYQGNIEGYPDSMVTLSTCSGLRGILQFENVSYGIEPLESAVEFQHVLYKLKNEDNDIAIFIDRSLKEQPMDDNIFISEKSEPAVPDLFPLYLEMHIVVDKTLYDYWGSDSMIVTNKVIEIVGLANSMFTQFKVTIVLSSLELWSDENKISTVGEADELLQKFLEWKQSYLNLRPHDIAYLLIYMDYPRYLGAVFPGTMCITRYSAGVALQCGPASCCDFRTCVLKDGAKCYKGLCCKDCQILQSGVECRPKAHPECDIAENCNGTSPECGPDITLINGLSCKNNKFICYDGDCHDLDARCESVFGKGSRNAPFACYEEIQSQSDRFGNCGRDRNNKYVFCGWRNLICGRLVCTYPTRKPFHQENGDVIYAFVRDSVCITVDYKLPRTVPDPLAVKNGSQCDIGRVCVNRECVESRIIKASAHVCSQQCSGHGVCDSRNKCHCSPGYKPPNCQIRSKGFSIFPEEDMGSIMERASGKTENTWLLGFLIALPILIVTTAIVLARKQLKKWFAKEEEFPSSESKSEGSTQTYASQSSSEGSTQTYASQTRSESSSQADTSKSKSEDSAEAYTSRSKSQDSTQTQSSSN

SEQ ID NO: 291 - protein, 173 aa, Homo sapiens [sequence omitted]

SEQ ID NO: 292 - protein, 787 aa, Homo sapiens
MGWRPRRARGTPLLLLLLLLLLWPVPGAGVLQGHIPGQPVTPHWVLDGQPWRTVSLEEPVSKPDMGLVALEAEGQELLLELEKNHRLLAPGYIETHYGPDGQPVVLAPNHTDHCHYQGRVRGFPDSWVVLCTCSGMSGLITLSRNASYYLRPWPPRGSKDFSTHEIFRMEQLLTWKGTCGHRDPGNKAGMTSLPGGPQSRGRREARRTRKYLELYIVADHTLFLTRHRNLNHTKQRLLEVANYVDQLLRTLDIQVALTGLEVWTERDRSRVTQDANATLWAFLQWRRGLWAQRPHDSAQLLTGRAFQGATVGLAPVEGMCRAESSGGVSTDHSELPIGAAATMAHEIGHSLGLSHDPDGCCVEAAAESGGCVMAAATGHPFPRVFSACSRRQLRAFFRKGGGACLSNAPDPGLPVPPALCGNGFVEAGEECDCGPGQECRDLCCFAHNCSLRPGAQCAHGDCCVRCLLKPAGALCRQAMGDCDLPEFCTGTSSHCPPDVYLLDGSPCARGSGYCWDGACPTLEQQCQQLWGPGSHPAPEACFQVVNSAGDAHGNCGQDSEGHFLPCAGRDALCGKLQCQGGKPSLLAPHMVPVDSTVHLDGQEVTCRGALALPSAQLDLLGLGLVEPGTQCGPRMVCNSNHNCHCAPGWAPPFCDKPGFGGSMDSGPVQAENHDTFLLAMLLSVLLPLLPGAGLAWCCYRLPGAHLQRCSWGCRRDPACSGPKDGPHRDHPLGGVHPMELGPTATGQPWPLDPENSHEPSSHPEKPLPAVSPDPQADQVQMPRSCLW

SEQ ID NO: 293 - protein, 813 aa, Homo sapiens
MGWRPRRARGTPLLLLLLLLLLWPVPGAGVLQGHIPGQPVTPHWVLDGQPWRTVSLEEPVSKPDMGLVALEAEGQELLLELEKNHRLLAPGYIETHYGPDGQPVVLAPNHTDHCHYQGRVRGFPDSWVVLCTCSGMSGLITLSRNASYYLRPWPPRGSKDFSTHEIFRMEQLLTWKGTCGHRDPGNKAGMTSLPGGPQSRGRREARRTRKYLELYIVADHTLFLTRHRNLNHTKQRLLEVANYVDQLLRTLDIQVALTGLEVWTERDRSRVTQDANATLWAFLQWRRGLWAQRPHDSAQLLTGRAFQGATVGLAPVEGMCRAESSGGVSTDHSELPIGAAATMAHEIGHSLGLSHDPDGCCVEAAAESGGCVMAAATGHPFPRVFSACSRRQLRAFFRKGGGACLSNAPDPGLPVPPALCGNGFVEAGEECDCGPGQECRDLCCFAHNCSLRPGAQCAHGDCCVRCLLKPAGALCRQAMGDCDLPEFCTGTSSHCPPDVYLLDGSPCARGSGYCWDGACPTLEQQCQQLWGPGSHPAPEACFQVVNSAGDAHGNCGQDSEGHFLPCAGRDALCGKLQCQGGKPSLLAPHMVPVDSTVHLDGQEVTCRGALALPSAQLDLLGLGLVEPGTQCGPRMVCQSRRCRKNAFQELQRCLTACHSHGVCNSNHNCHCAPGWAPPFCDKPGFGGSMDSGPVQAENHDTFLLAMLLSVLLPLLPGAGLAWCCYRLPGAHLQRCSWGCRRDPACSGPKDGPHRDHPLGGVHPMELGPTATGQPWPLDPENSHEPSSHPEKPLPAVSPDPQADQVQMPRSCLW

SEQ ID NO: 294 - protein, 812 aa, Homo sapiens
MGWRPRRARGTPLLLLLLLLLLWPVPGAGVLQGHIPGQPVTPHWVLDGQPWRTVSLEEPVSKPDMGLVALEAEGQELLLELEKNHRLLAPGYIETHYGPDGQPVVLAPNHTDHCHYQGRVRGFPDSWVVLCTCSGMSGLITLSRNASYYLRPWPPRGSKDFSTHEIFRMEQLLTWKGTCGHRDPGNKAGMTSLPGGPQSRGRREARRTRKYLELYIVADHTLFLTRHRNLNHTKQRLLEVANYVDQLLRTLDIQVALTGLEVWTERDRSRVTQDANATLWAFLQWRRGLWAQRPHDSAQLLTGRAFQGATVGLAPVEGMCRAESSGGVSTDHSELPIGAAATMAHEIGHSLGLSHDPDGCCVEAAAESGGCVMAAATGHPFPRVFSACSRRQLRAFFRKGGGACLSNAPDPGLPVPPALCGNGFVEAGEECDCGPGQECRDLCCFAHNCSLRPGAQCAHGDCCVRCLLKPAGALCRQAMGDCDLPEFCTGTSSHCPPDVYLLDGSPCARGSGYCWDGACPTLEQQCQQLWGPGSHPAPEACFQVVNSAGDAHGNCGQDSEGHFLPCAGRDALCGKLQCQGGKPSLLAPHMVPVDSTVHLDGQEVTCRGALALPSAQLDLLGLGLVEPGTQCGPRMVCQSRRCRKNAFQELQRCLTACHSHGVCNSNHNCHCAPGWAPPFCDKPGFGGSMDSGPVQAENHDTFLLAMLLSVLLPLLPGAGLAWCCYRLPGAHLQRCSWGCRRDPACSGPKDGPHRDHPLGGVHPMELGPTATGQPWPLDPENSHEPSSHPEKPLPAVSPDPQDQVQMPRSCLW

SEQ ID NO: 295 - protein, 692 aa, Homo sapiens
MGWRPRRARGTPLLLLLLLLLLWPVPGAGVLQGHIPGQPVTPHWVLDGQPWRTVSLEEPVSKPDMGLVALEAEGQELLLELEKNHRLLAPGYIETHYGPDGQPVVLAPNHTDHCHYQGRVRGFPDSWVVLCTCSGMSGLITLSRNASYYLRPWPPRGSKDFSTHEIFRMEQLLTWKGTCGHRDPGNKAGMTSLPGGPQSRGRREARRTRKYLELYIVADHTLFLTRHRNLNHTKQRLLEVANYVDQLLRTLDIQVALTGLEVWTERDRSRRQLRAFFRKGGGACLSNAPDPGLPVPPALCGNGFVEAGEECDCGPGQECRDLCCFAHNCSLRPGAQCAHGDCCVRCLLKPAGALCRQAMGDCDLPEFCTGTSSHCPPDVYLLDGSPCARGSGYCWDGACPTLEQQCQQLWGPGSHPAPEACFQVVNSAGDAHGNCGQDSEGHFLPCAGRDALCGKLQCQGGKPSLLAPHMVPVDSTVHLDGQEVTCRGALALPSAQLDLLGLGLVEPGTQCGPRMVCQSRRCRKNAFQELQRCLTACHSHGVCNSNHNCHCAPGWAPPFCDKPGFGGSMDSGPVQAENHDTFLLAMLLSVLLPLLPGAGLAWCCYRLPGAHLQRCSWGCRRDPACSGPKDGPHRDHPLGGVHPMELGPTATGQPWPLDPENSHEPSSHPEKPLPAVSPDPQDQVQMPRSCLW

SEQ ID NO: 296 - protein, 138 aa, Homo sapiens
MGWRPRRARGTPLLLLLLLLLLWPVPGAGVLQGHIPGQPVTPHWVLDGQPWRTVSLEEPVSKPDMGLVALEAEGQELLLELEKNHRLLAPGYIETHYGPDGQPVVLAPNHTVRCFHGLWDAPPEVPPHHSYPYSSLHS

SEQ ID NO: 297 - protein, 754 aa, Homo sapiens
MLPGCIFLMILLIPQVKEKFILGVEGQQLVRPKKLPLIQKRDTGHTHDDDILKTYEEELLYEIKLNRKTLVLHLLRSREFLGSNYSETFYSMKGEAFTRHPQIMDHCFYQGSIVHEYDSAASISTCNGLRGFFRINDQRYLIEPVKYSDEGEHLVFKYNLRVPYGANYSCTELNFTRKTVPGDNESEEDSKIKGIHDEKYVELFIVADDTVYRRNGHPHNKLRNRIWGMVNFVNMIYKTLNIHVTLVGIEIWTHEDKIELYSNIETTLLRFSFWQEKILKTRKDFDHVVLLSGKWLYSHVQGISYPGGMCLPYYSTSIIKDLLPDTNIIANRMAHQLGHNLGMQHDEFPCTCPSGKCVMDSDGSIPALKFSKCSQNQYHQYLKDYKPTCMLNIPFPYNFHDFQFCGNKKLDEGEECDCGPAQECTNPCCDAHTCVLKPGFTCAEGECCESCQIKKAGSICRPAKDECDFPEMCTGHSPACPKDQFRVNGFPCKNSEGYCFMGKCPTREDQCSELFDDEAIESHDICYKMNTKGNKFGYCKNKENRFLPCEEKDVRCGKIYCTGGELSSLLGEDKTYHLKDPQKNATVKCKTIFLYHDSTDIGLVASGTKCGEGMVCNNGECLNMEKVYISTNCPSQCNENPVDGHGLQCHCEEGQAPVACEETLHVTNITILVVVLVLVIVGIGVLILLVRYRKCIKLKQVQSPPTETLGVENKGYFGDEQQIRTEPILPEIHFLNKPASKDSRGIADPNQSAK

SEQ ID NO: 298 - protein, 776 aa, Homo sapiens
MLPGCIFLMILLIPQVKEKFILGVEGQQLVRPKKLPLIQKRDTGHTHDDDILKTYEEELLYEIKLNRKTLVLHLLRSREFLGSNYSETFYSMKGEAFTRHPQIMDHCFYQGSIVHEYDSAASISTCNGLRGFFRINDQRYLIEPVKYSDEGEHLVFKYNLRVPYGANYSCTELNFTRKTVPGDNESEEDSKIKGIHDEKYVELFIVADDTVYRRNGHPHNKLRNRIWGMVNFVNMIYKTLNIHVTLVGIEIWTHEDKIELYSNIETTLLRFSFWQEKILKTRKDFDHVVLLSGKWLYSHVQGISYPGGMCLPYYSTSIIKDLLPDTNIIANRMAHQLGHNLGMQHDEFPCTCPSGKCVMDSDGSIPALKFSKCSQNQYHQYLKDYKPTCMLNIPFPYNFHDFQFCGNKKLDEGEECDCGPAQECTNPCCDAHTCVLKPGFTCAEGECCESCQIKKAGSICRPAKDECDFPEMCTGHSPACPKDQFRVNGFPCKNSEGYCFMGKCPTREDQCSELFDDEAIESHDICYKMNTKGNKFGYCKNKENRFLPCEEKDVRCGKIYCTGGELSSLLGEDKTYHLKDPQKNATVKCKTIFLYHDSTDIGLVASGTKCGEGMVCNNGECLNMEKVYISTNCPSQCNENPVDGHGLQCHCEEGQAPVACEETLHVTNITILVVVLVLVIVGIGVLILLVRYRKCIKLKQVQSPPTETLGVENKGYFGDEQQIRTEPILPEIHFLNQRTPESLESLPTSFSSPHYITLKPASKDSRGIADPNQSAK

SEQ ID NO: 299 - protein, 210 aa, Homo sapiens
MLPGCIFLMILLIPQVKEKFILGVEGQQLVRPKKLPLIQKRDTGHTHDDDILKTYEEELLYEIKLNRKTLVLHLLRSREFLGSNYSETFYSMKGEAFTRHPQIMDHCFYQGSIVHEYDSAASISTCNGLRGFFRINDQRYLIEPVKYSDEGEHLVFKYNLRVPYGANYSCTELNFTRKTVPGDNESEEDSKIKVSTLLLSLPQMKHLLFS

SEQ ID NO: 300 - protein, 516 aa, Homo sapiens
MVNFVNMIYKTLNIHVTLVGIEIWTHEDKIELYSNIETTLLRFSFWQEKILKTRKDFDHVVLLSGKWLYSHVQGISYPGGMCLPYYSTSIIKDLLPDTNIIANRMAHQLGHNLGMQHDEFPCTCPSGKCVMDSDGSIPALKFSKCSQNQYHQYLKDYKPTCMLNIPFPYNFHDFQFCGNKKLDEGEECDCGPAQECTNPCCDAHTCVLKPGFTCAEGECCESCQIKKAGSICRPAKDECDFPEMCTGHSPACPKDQFRVNGFPCKNSEGYCFMGKCPTREDQCSELFDDEAIESHDICYKMNTKGNKFGYCKNKENRFLPCEEKDVRCGKIYCTGGELSSLLGEDKTYHLKDPQKNATVKCKTIFLYHDSTDIGLVASGTKCGEGMVCNNGECLNMEKVYISTNCPSQCNENPVDGHGLQCHCEEGQAPVACEETLHVTNITILVVVLVLVIVGIGVLILLVRYRKCIKLKQVQSPPTETLGVENKGYFGDEQQIRTEPILPEIHFLNHLLYGRHQ

SEQ ID NO: 301 - protein, 245 aa, Homo sapiens
MRGLGLWLLGAMMLPAIAPSRPWALMEQYEVVLPWRLPGPRVRRALPSHLGGQFRPQPCPYLSIRGTYYRPARCPGLIQPVAQLRLSQSSAGRAPACTWGLEMQWSSRRLCRHHQGLHPERVSYVLGATGHNFTLHLRKNRDLLGSGYTETYTAANGSEVTEQPRGQDHCFYQGHVEGYPDSAASLSTCAGLRGFFQVGSDLHLIEPLDEGGEGGRHAVYQAEHLLQTAGTCGVSDDSLGSLLGP

SEQ ID NO: 302 - protein, 742 aa, Homo sapiens
MRGLGLWLLGAMMLPAIAPSRPWALMEQYEVVLPWRLPGPRVRRALPSHLGLHPERVSYVLGATGHNFTLHLRKNRDLLGSGYTETYTAANGSEVTEQPRGQDHCFYQGHVEGYPDSAASLSTCAGLRGFFQVGSDLHLIEPLDEGGEGGRHAVYQAEHLLQTAGTCGVSDDSLGSLLGPRTAAVFRPRPGDSLPSRETRYVELYVVVDNAEFQMLGSEAAVRHRVLEVVNHVDKLYQKLNFRVVLVGLEIWNSQDRFHVSPDPSVTLENLLTWQARQRTRRHLHDNVQLITGVDFTGTTVGFARVSAMCSHSSGAVNQDHSKNPVGVACTMAHEMGHNLGMDHDENVQGCRCQERFEAGRCIMAGSIGSSFPRMFSDCSQAYLESFLERPQSVCLANAPDLSHLVGGPVCGNLFVERGEQCDCGPPEDCRNRCCNSTTCQLAEGAQCAHGTCCQECKVKPAGELCRPKKDMCDLEEFCDGRHPECPEDAFQENGTPCSGGYCYNGACPTLAQQCQAFWGPGGQAAEESCFSYDILPGCKASRYRADMCGVLQCKGGQQPLGRAICIVDVCHALTTEDGTAYEPVPEGTRCGPEKVCWKGRCQDLHVYRSSNCSAQCHNHGVCNHKQECHCHAGWAPPHCAKLLTEVHAGCQPRAGQGRGSSPIQGPPRAGPHHPPGPARPTPGLLGGSEEAAPCSSGHCVQPTLPSSCLHPAGTKAGHQANVRTPSAPSQTRGWCGQPWSS

SEQ ID NO: 303 - protein, 824 aa, Homo sapiens
MRGLGLWLLGAMMLPAIAPSRPWALMEQYEVVLPWRLPGPRVRRALPSHLGLHPERVSYVLGATGHNFTLHLRKNRDLLGSGYTETYTAANGSEVTEQPRGQDHCFYQGHVEGYPDSAASLSTCAGLRGFFQVGSDLHLIEPLDEGGEGGRHAVYQAEHLLQTAGTCGVSDDSLGSLLGPRTAAVFRPRPGDSLPSRETRYVELYVVVDNAEFQMLGSEAAVRHRVLEVVNHVDKLYQKLNFRVVLVGLEIWNSQDRFHVSPDPSVTLENLLTWQARQRTRRHLHDNVQLITGVDFTGTTVGFARVSAMCSHSSGAVNQDHSKNPVGVACTMAHEMGHNLGMDHDENVQGCRCQERFEAGRCIMAGSIGSSFPRMFSDCSQAYLESFLERPQSVCLANAPDLSHLVGGPVCGNLFVERGEQCDCGPPEDCRNRCCNSTTCQLAEGAQCAHGTCCQECKVKPAGELCRPKKDMCDLEEFCDGRHPECPEDAFQENGTPCSGGYCYNGACPTLAQQCQAFWGPGGQAAEESCFSYDILPGCKASRYRADMCGVLQCKGGQQPLGRAICIVDVCHALTTEDGTAYEPVPEGTRCGPEKVCWKGRCQDLHVYRSSNCSAQCHNHGVCNHKQECHCHAGWAPPHCAKLLTEVHAASGSLPVFVVVVLVLLAVVLVTLAGIIVYRKARSRILSRNVAPKTTMGRSNPLFHQAASRVPAKGGAPAPSRGPQELVPTTHPGQPARHPASSVALKRPPPAPPVTVSSPPFPVPVYTRQAPKQVIKPTFAPPVPPVKPGAGAANPGPAEGAVGPKVALKPPIQRKQGAGAPTAP

SEQ ID NO: 304 - protein, 109 aa, Homo sapiens
MRGLGLWLLGAMMLPGPAPREGELRPWGHRAQLHPPPAEEQGPAGLRLHRDLYGCQWLRGDGAASRAGPLLLPGPRRGVPGLSRQPQHLCRPQGFLPGGVRPAPDRAPG

SEQ ID NO: 305 - protein, 733 aa, Homo sapiens
MRGLGLWLLGAMMLPGPAPREGELRPWGHRAQLHPPPAEEQGPAGLRLHRDLYGCQWLRGDGAASRAGPLLLPGPRRGVPGLSRQPQHLCRPQVGSDLHLIEPLDEGGEGGRHAVYQAEHLLQTAGTCGVSDDSLGSLLGPRTAAVFRPRPGDSLPSRETRYVELYVVVDNAEFQMLGSEAAVRHRVLEVVNHVDKLYQKLNFRVVLVGLEIWNSQDRFHVSPDPSVTLENLLTWQARQRTRRHLHDNVQLITGVDFTGTTVGFARVSAMCSHSSGAVNQDHSKNPVGVACTMAHEMGHNLGMDHDENVQGCRCQERFEAGRCIMAGSIGSSFPRMFSDCSQAYLESFLERPQSVCLANAPDLSHLVGGPVCGNLFVERGEQCDCGPPEDCRNRCCNSTTCQLAEGAQCAHGTCCQECKVKPAGELCRPKKDMCDLEEFCDGRHPECPEDAFQENGTPCSGGYCYNGACPTLAQQCQAFWGPGGQAAEESCFSYDILPGCKASRYRADMCGVLQCKGGQQPLGRAICIVDVCHALTTEDGTAYEPVPEGTRCGPEKVCNHKQECHCHAGWAPPHCAKLLTEVHAASGSLPVFVVVVLVLLAVVLVTLAGIIVYRKARSRILSRNVAPKTTMGRSNPLFHQAASRVPAKGGAPAPSRGPQELVPTTHPGQPARHPASSVALKRPPPAPPVTVSSPPFPVPVYTRQAPKQGAVGPKVALKPPIQRKQGAGAPTAP

SEQ ID NO: 306 - protein, 655 aa, Homo sapiens
MGSGARFPSGTLRVRWLLLLGLVGPVLGAARPGFQQTSHLSSYEIITPWRLTRERREAPRPYSKQVSYVIQAEGKEHIIHLERNKDLLPEDFVVYTYNKEGTLITDHPNIQNHCHYRGYVEGVHNSSIALSDCFGLRGLLHLENASYGIEPLQNSSHFEHIIYRMDDVYKEPLKCGVSNKDIEKETAKDEEEEPPSMTQLLRRRRAVLPQTRYVELFIVVDKERYDMMGRNQTAVREEMILLANYLDSMYIMLNIRIVLVGLEIWTNGNLINIVGGAGDVLGNFVQWREKFLITRRRHDSAQLVLKKGFGGTAGMAFVGTVCSRSHAGGINVFGQITVETFASIVAHELGHNLGMNHDDGRDCSCGAKSCIMNSGASGSRNFSSCSAEDFEKLTLNKGGNCLLNIPKPDEAYSAPSCGNKLVDAGEECDCGTPKECELDPCCEGSTCKLKSFAECAYGDCCKDCRFLPGGTLCRGKTSECDVPEYCNGSSQFCQPDVFIQNGYPCQNNKAYCYNGMCQYYDAQCQVIFGSKAKAAPKDCFIEVNSKGDRFGNCGFSGNEYKKCATGNALCGKLQCENVQEIPVFGIVPAIIQTPSRGTKCWGVDFQLGSDVPDPGMVNEGTKCGAGKICRNFQCVDASVLNYDCDVQKKCHGHGK

SEQ ID NO: 307 - protein, 628 aa, Homo sapiens
MGSGARFPSGTLRVRWLLLLGLVGPVLGAARPGFQQTSHLSSYEIITPWRLTRERREAPRPYSKQVSYVIQAEGKEHIIHLERNKDLLPEDFVVYTYNKEGTLITDHPNIQNHCHYRGYVEGVHNSSIALSDCFGLRGLLHLENASYGIEPLQNSSHFEHIIYRMDDVYKEPLKCGVSNKDIEKETAKDEEEEPPSMTQLLRRRRAVLPQTRYVELFIVVDKERYDMMGRNQTAVREEMILLANYLDSMYIMLNIRIVLVGLEIWTNGNLINIVGGAGDVLGNFVQWREKFLITRRRHDSAQLVLKKGFGGTAGMAFVGTVCSRSHAGGINVFGQITVETFASIVAHELGHNLGMNHDDGRDCSCGAKSCIMNSGASGSRNFSSCSAEDFEKLTLNKGGNCLLNIPKPDEAYSAPSCGNKLVDAGEECDCGTPKECELDPCCEGSTCKLKSFAECAYGDCCKDCRFLPGGTLCRGKTSECDVPEYCNGSSQFCQPDVFIQNGYPCQNNKAYCYNGMCQYYDAQCQVIFGSKAKAAPKDCFIEVNSKGDRFGNCGFSGNEYKKCATGNALCGKLQCENVQEIPVFGIVPAIIQTPSRGTKCWGVDFQLGSDVPDPGMVNEGTKCGAGKK

SEQ ID NO: 308 - protein, 819 aa, Homo sapiens
MGSGARFPSGTLRVRWLLLLGLVGPVLGAARPGFQQTSHLSSYEIITPWRLTRERREAPRPYSKQVSYVIQAEGKEHIIHLERNKDLLPEDFVVYTYNKEGTLITDHPNIQNHCHYRGYVEGVHNSSIALSDCFGLRGLLHLENASYGIEPLQNSSHFEHIIYRMDDVYKEPLKCGVSNKDIEKETAKDEEEEPPSMTQLLRRRRAVLPQTRYVELFIVVDKERYDMMGRNQTAVREEMILLANYLDSMYIMLNIRIVLVGLEIWTNGNLINIVGGAGDVLGNFVQWREKFLITRRRHDSAQLVLKKGFGGTAGMAFVGTVCSRSHAGGINVFGQITVETFASIVAHELGHNLGMNHDDGRDCSCGAKSCIMNSGASGSRNFSSCSAEDFEKLTLNKGGNCLLNIPKPDEAYSAPSCGNKLVDAGEECDCGTPKECELDPCCEGSTCKLKSFAECAYGDCCKDCRFLPGGTLCRGKTSECDVPEYCNGSSQFCQPDVFIQNGYPCQNNKAYCYNGMCQYYDAQCQVIFGSKAKAAPKDCFIEVNSKGDRFGNCGFSGNEYKKCATGNALCGKLQCENVQEIPVFGIVPAIIQTPSRGTKCWGVDFQLGSDVPDPGMVNEGTKCGAGKICRNFQCVDASVLNYDCDVQKKCHGHGVCNSNKNCHCENGWAPPNCETKGYGGSVDSGPTYNEMNTALRDGLLVFFFLIVPLIVCAIFIFIKRDQLWRSYFRKKRSQTYESDGKNQANPSRQPGSVPRHVSPVTPPREVPIYANRFAVPTYAAKQPQQFPSRPPPPQPKVSSQGNLIPARPAPAPPLYSSLT

SEQ ID NO: 309 - protein, 712 aa, Homo sapiens
MGSGARFPSGTLRVRWLLLLGLVGPVLGAARPGFQQTSHLSSYEIITPWRLTRERREAPRPYSKQVSYVIQAEGKEHIIHLERNKDLLPEDFVVYTYNKEGTLITDHPNIQNHCHYRGYVEGVHNSSIALSDCFGLRGLLHLENASYGIEPLQNSSHFEHIIYRMDDVYKEPLKCGVSNKDIEKETAKDEEEEPPSMTQLLRRRRAVLPQTRYVELFIVVDKERYDMMGRNQTAVREEMILLANYLDSMYIMLNIRIVLVGLEIWTNGNLINIVGGAGDVLGNFVQWREKFLITRRRHDSAQLVLKKGFGGTAGMAFVGTVCSRSHAGGINVFGQITVETFASIVAHELGHNLGMNHDDGRDCSCGAKSCIMNSGASGSRNFSSCSAEDFEKLTLNKGGNCLLNIPKPDEAYSAPSCGNKLVDAGEECDCGTPKECELDPCCEGSTCKLKSFAECAYGDCCKDCRFLPGGTLCRGKTSECDVPEYCNGSSQFCQPDVFIQNGYPCQNNKAYCYNGMCQYYDAQCQVIFGSKAKAAPKDCFIEVNSKGDRFGNCGFSGNEYKKCATGNALCGKLQCENVQEIPVFGIVPAIIQTPSRGTKCWGVDFQLGSDVPDPGMVNEGTKCGAGKICRNFQCVDASVLNYDCDVQKKCHGHGVCNSNKNCHCENGWAPPNCETKGYGGSVDSGPTYNGQMAKIKQTLLDSRGVFLDMFLQ

SEQ ID NO: 310 - protein, 147 aa, Homo sapiens
MGSGARFPSGTLRVRWLLLLGLVGPVLGAARPGFQQTSHLSSYEIITPWRLTRERREAPRPYSKQVSYVIQAEGKEHIIHLERNKDLLPEDFVVYTYNKEGTLITDHPNIQRCGPLCIREQSTPGDRAGQNTQNNWQMSNLAFCVYY

SEQ ID NO: 311 - protein, 128 aa, Homo sapiens
MGSGARFPSGTLRVRWLLLLGLVGPVLGAARPGFQQTSHLSSYEIITPWRLTRERREAPRPYSKQVSYVIQAEGKEHIIHLERNKDLLPEDFVVYTYNKEGTLITDHPNIQVMYFSLDPIANFKTIII

SEQ ID NO: 312 - protein, 391 aa, Homo sapiens
MILNGEEIILSLQKTKHLLGPDYTETLYSPRGEEITTKPENMEHCYYKGNILNEKNSVASISTCDGLRGYFTHHHQRYQIKPLKSTDEKEHAVFTSNQEEQDPANHTCGVKSTDGKQGPIRISRSLKSPEKEDFLRAQKYIDLYLVLDNAFYKNYNENLTLIRSFVFDVMNLLNVIYNTIDVQVALVGMEIWSDGDKIKVVPSASTTFDNFLRWHSSNLGKKIHDHAQLLSGISFNNRRVGLAASNSLCSPSSVAVIEAKKKNNVALVGVMSHELGHVLGMPDVPFNTKCPSGSCVMNQYLSSKFPKDFSTSCRAHFERYLLSQKPKCLLQAPIPTNIMTTPVCGNHLLEVGEDCDCGSPKECTNLCCEALTCKLKPGTDCGGDAPNHTTE

SEQ ID NO: 313 - protein, 470 aa, Homo sapiens
MLRGISQLPAVATMSWVLLPVLWLIVQTQAIAIKQTPELTLHEIVCPKKLHILHKREIKNNQTEKHGKEERYEPEVQYQMILNGEEIILSLQKTKHLLGPDYTETLYSPRGEEITTKPENMEHCYYKGNILNEKNSVASISTCDGLRGYFTHHHQRYQIKPLKSTDEKEHAVFTSNQEEQDPANHTCGVKSTDGKQGPIRISRSLKSPEKEDFLRAQKYIDLYLVLDNAFYKNYNENLTLIRSFVFDVMNLLNVIYNTIDVQVALVGMEIWSDGDKIKVVPSASTTFDNFLRWHSSNLGKKIHDHAQLLSGISFNNRRVGLAASNSLCSPSSVAVIEAKKKNNVALVGVMSHELGHVLGMPDVPFNTKCPSGSCVMNQYLSSKFPKDFSTSCRAHFERYLLSQKPKCLLQAPIPTNIMTTPVCGNHLLEVGEDCDCGSPKECTNLCCEALTCKLKPGTDCGGDAPNHTTE

SEQ ID NO: 314 - protein, 41 aa, Homo sapiens
MLRGISQLPAVATMSWVLLPVLWLIVQTQASNCAWPKVSIQ

SEQ ID NO: 315 - protein, 171 aa, Homo sapiens
MLVADQSMAEFHGSGLKHYLLTLFSVAARLYKHPSIRNSVSLVVVKILVIHDEQKGPEVTSNAALTLRNFCNWQKQHNPPSDRDAEHYDTAILFTRQDLCGSQTCDTLGMADVGTVCDPSRSCSVIEDDGLQAAFTTAHELGHVFNMPHDDAKQCASLNGVNQDSHMMASM

SEQ ID NO: 316 - protein, 967 aa, Homo sapiens
MQRAVPEGFGRRKLGSDMGNAERAPGSRSFGPVPTLLLLAAALLAVSDALGRPSEEDEELVVPELERAPGHGTTRLRLHAFDQQLDLELRPDSSFLAPGFTLQNVGRKSGSETPLPETDLAHCFYSGTVNGDPSSAAALSLCEGVRGAFYLLGEAYFIQPLPAASERLATAAPGEKPPAPLQFHLLRRNRQGDVGGTCGVVDDEPRPTGKAETEDEDEGTEGEDEGAQWSPQDPALQGVGQPTGTGSIRKKRFVSSHRYVETMLVADQSMAEFHGSGLKHYLLTLFSVAARLYKHPSIRNSVSLVVVKILVIHDEQKGPEVTSNAALTLRNFCNWQKQHNPPSDRDAEHYDTAILFTRQDLCGSQTCDTLGMADVGTVCDPSRSCSVIEDDGLQAAFTTAHELGHVFNMPHDDAKQCASLNGVNQDSHMMASMLSNLDHSQPWSPCSAYMITSFLDNGHGECLMDKPQNPIQLPGDLPGTSYDANRQCQFTFGEDSKHCPDAASTCSTLWCTGTSGGVLVCQTKHFPWADGTSCGEGKWCINGKCVNKTDRKHFDTPFHGSWGMWGPWGDCSRTCGGGVQYTMRECDNPVPKNGGKYCEGKRVRYRSCNLEDCPDNNGKTFREEQCEAHNEFSKASFGSGPAVEWIPKYAGVSPKDRCKLICQAKGIGYFFVLQPKVVDGTPCSPDSTSVCVQGQCVKAGCDRIIDSKKKFDKCGVCGGNGSTCKKISGSVTSAKPGYHDIITIPTGATNIEVKQRNQRGSRNNGSFLAIKAADGTYILNGDYTLSTLEQDIMYKGVVLRYSGSSAALERIRSFSPLKEPLTIQVLTVGNALRPKIKYTYFVKKKKESFNAIPTFSAWVIEEWGECSKSCELGWQRRLVECRDINGQPASECAKEVKPASTRPCADHPCPQWQLGEWSSCSKTCGKGYKKRSLKCLSHDGGVLSHESCDPLKKPKHFIDFCTMAECS

SEQ ID NO: 317 - protein, 128 aa, Homo sapiens
MVTWEGTGSIRKKRFVSSHRYVETMLVADQSMAEFHGSGLKHYLLTLFSVAARLYKHPSIRNSVSLVVVKILVIHDEQKGPEVTSNAALTLRNFCNWQKQHNPPSDRDAEHYDTAILFTRQDLCGSQT

SEQ ID NO: 318 - protein, 200 aa, Homo sapiens
  SITE 1: note = misc_feature - Xaa can be any naturally occurring amino acid
XCRSFLLRPSLCAVLILQFFLFHHFGTGSIRKKRFVSSHRYVETMLVADQSMAEFHGSGLKHYLLTLFSVAARLYKHPSIRNSVSLVVVKILVIHDEQKGPEVTSNAALTLRNFCNWQKQHNPPSDRDAEHYDTAILFTRQDLCGSQTCDTLGMADVGTVCDPSRSCSVIEDDGLQAAFTTAHELGHVFNMPHDDAKQCA

SEQ ID NO: 319 - protein, 1103 aa, Homo sapiens
MAPACQILRWALALGLGLMFEVTHAFRSQDEFLSSLESYEIAFPTRVDHNGALLAFSPPPPRRQRRGTGATAESRLFYKVASPSTHFLLNLTRSSRLLAGHVSVEYWTREGLAWQRAARPHCLYAGHLQGQASSSHVAISTCGGLHGLIVADEEEYLIEPLHGGPKGSRSPEESGPHVVYKRSSLRHPHLDTACGVRDEKPWKGRPWWLRTLKPPPARPLGNETERGQPGLKRSVSRERYVETLVVADKMMVAYHGRRDVEQYVLAIMNIVAKLFQDSSLGSTVNILVTRLILLTEDQPTLEITHHAGKSLDSFCKWQKSIVNHSGHGNAIPENGVANHDTAVLITRYDICIYKNKPCGTLGLAPVGGMCERERSCSVNEDIGLATAFTIAHEIGHTFGMNHDGVGNSCGARGQDPAKLMAAHITMKTNPFVWSSCSRDYITSFLDSGLGLCLNNRPPRQDFVYPTVAPGQAYDADEQCRFQHGVKSRQCKYGEVCSELWCLSKSNRCITNSIPAAEGTLCQTHTIDKGWCYKRVCVPFGSRPEGVDGAWGPWTPWGDCSRTCGGGVSSSSRHCDSPRPTIGGKYCLGERRRHRSCNTDDCPPGSQDFREVQCSEFDSIPFRGKFYKWKTYRGGGVKACSLTCLAEGFNFYTERAAAVVDGTPCRPDTVDICVSGECKHVGCDRVLGSDLREDKCRVCGGDGSACETIEGVFSPASPGAGYEDVVWIPKGSVHIFIQDLNLSLSHLALKGDQESLLLEGLPGTPQPHRLPLAGTTFQLRQGPDQVQSLEALGPINASLIVMVLARTELPALRYRFNAPIARDSLPPYSWHYAPWTKCSAQCAGGSQVQAVECRNQLDSSAVAPHYCSAHSKLPKRQRACNTEPCPPDWVVGNWSLCSRSCDAGVRSRSVVCQRRVSAAEEKALDDSACPQPRPPVLEACHGPTCPPEWAALDWSECTPSCGPGLRHRVVLCKSADHRATLPPAHCSPAAKPPATMRCNLRRCPPARWVAGEWGECSAQCGVGQRQRSVRCTSHTGQASHECTEALRPPTTQQCEAKCDSPTPGDGPEECKDVNKVAYCPLVLKFQFCSRAYFRQMCCKTCHGH

SEQ ID NO: 320 - protein, 289 aa, Homo sapiens
MAPACQILRWALALGLGLMFEVTHAFRSQDEFLSSLESYEIAFPTRVDHNGALLAFSPPPPRRQRRGTGATAESRLFYKVASPSTHFLLNLTRSSRLLAGHVSVEYWTREGLAWQRAARPHCLYAGHLQGQASSSHVAISTCGGLHGLIVADEEEYLIEPLHGGPKGSRSPEESGPHVVYKRSSLRHPHLDTACGVRDEKPWKGRPWWLRTLKPPPARPLGNETERGQPGLKRSVSRERYVETLVVADKMMVAYHGRRDVEQYVLAIMNIVRLPNFSRTRVWEAPLTSS

SEQ ID NO: 321 - protein, 289 aa, Homo sapiens; identical to SEQ ID NO: 320

SEQ ID NO: 322 - protein, 1103 aa, Homo sapiens; identical to SEQ ID NO: 319

SEQ ID NO: 323 - protein, 590 aa, Homo sapiens
MGPTSVLRAGLTPSCLPPPSGATNGSVSPLGRAQRVWTEPGGRGLHGATAAGPVAAACPLLAVTATAPGQPSGASTVWVREGGTAPATRMTVPLAPRTSEKCSVLNLTASLSVGNSTSGKRTGEACSLTCLAEGFNFYTERAAAVVDGTPCRPDTVDICVSGECKHVGCDRVLGSDLREDKCRVCGGDGSACETIEGVFSPASPGAGYEDVVWIPKGSVHIFIQDLNLSLSHLALKGDQESLLLEGLPGTPQPHRLPLAGTTFQLRQGPDQVQSLEALGPINASLIVMVLARTELPALRYRFNAPIARDSLPPYSWHYAPWTKCSAQCAGGSQVQAVECRNQLDSSAVAPHYCSAHSKLPKRQRACNTEPCPPDWVVGNWSLCSRSCDAGVRSRSVVCQRRVSAAEEKALDDSACPQPRPPVLEACHGPTCPPEWAALDWSECTPSCGPGLRHRVVLCKSADHRATLPPAHCSPAAKPPATMRCNLRRCPPARWVAGEWGECSAQCGVGQRQRSVRCTSHTGQASHECTEALRPPTTQQCEAKCDSPTPGDGPEECKDVNKVAYCPLVLKFQFCSRAYFRQMCCKTCHGH

SEQ ID NO: 324 - protein, 126 aa, Homo sapiens
MGPTSVLRAGLTPSCLPPPSGATNGSVSPLGRAQRVWTEPGGRGLHGATAAGPVAAACPLLAVTATAPGQPSGASTVWVREGGTAPATRMTVPLAPRTSEKCSVLNLTASLSVGNSTSGKRTGEGA

SEQ ID NO: 325 - protein, 1509 aa, Homo sapiens
MPCAQRSWLANLSVVAQLLNFGALCYGRQPQPGPVRFPDRRQEHFIKGLPEYHVVGPVRVDASGHFLSYGLHYPITSSRRKRDLDGSEDWVYYRISHEEKDLFFNLTVNQGFLSNSYIMEKRYGNLSHVKMMASSAPLCHLSGTVLQQGTRVGTAALSACHGLTGFFQLPHGDFFIEPVKKHPLVEGGYHPHIVYRRQKVPETKEPTCGLKDSVNISQKQELWREKWERHNLPSRSLSRRSISKERWVETLVVADTKMIEYHGSENVESYILTIMNMVTGLFHNPSIGNAIHIVVVRLILLEEEEQGLKIVHHAEKTLSSFCKWQKSINPKSDLNPVHHDVAVLLTRKDICAGFNRPCETLGLSHLSGMCQPHRSCNINEDSGLPLAFTIAHELGHSFGIQHDGKENDCEPVGRHPYIMSRQLQYDPTPLTWSKCSEEYITRFLDRGWGFCLDDIPKKKGLKSKVIAPGVIYDVHHQCQLQYGPNATFCQEVENVCQTLWCSVKGFCRSKLDAAADGTQCGEKKWCMAGKCITVGKKPESIPGGWGRWSPWSHCSRTCGAGVQSAERLCNNPEPKFGGKYCTGERKRYRLCNVHPCRSEAPTFRQMQCSEFDTVPYKNELYHWFPIFNPGYVDIGLIPKGARDIRVMEIEGAGNFLAIRSEDPEKYYLNGGFIIQWNGNYKLAGTVFQYDRKGDLEKLMATGPTNESVWIQLLFQVTNPGIKYEYTIQKDGLDNDVEQQMYFWQYGHWTECSVTCGTGIRRQTAHCIKKGRGMVKATFCDPETQPNGRQKKCHEKACPPRWWAGEWEACSATCGPHGEKKRTVLCIQTMVSDEQALPPTDCQHLLKPKTLLSCNRDILCPSDWTVGNWSECSVSCGGGVRIRSVTCAKNHDEPCDVTRKPNSRALCGLQQCPSSRRVLKPNKGTISNGKNPPTLKPVPPPTSRPRMLTTPTGPESMSTSTPAISSPSPTTASKEGDLGGKQWQDSSTQPELSSRYLISTGSTSQPILTSQSLSIQPSEENVSSSDTGPTSEGGLVATTTSGSGLSSSRNPITWPVTPFYNTLTKGPEMEIHSGSGEEREQPEDKDESNPVIWTKIRVPGNDAPVESTEMPLAPPLTPDLSRESWWPPFSTVMEGLLPSQRPTTSETGTPRVEGMVTEKPANTLLPLGGDHQPEPSGKTANRNHLKLPNNMNQTKSSEPVLTEEDATSLITEGFLLNASNYKQLTNGHGSAHWIVGNWSECSTTCGLGAYWRRVECSTQMDSDCAAIQRPDPAKRCHLRPCAGWKVGNWSKCSRNCSGGFKIREIQCVDSRDHRNLRPFHCQFLAGIPPPLSMSCNPEPCEAWQVEPWSQCSRSCGGGVQERGVFCPGGLCDWTKRPTSTMSCNEHLCCHWATGNWDLCSTSCGGGFQKRTVQCVPSEGNKTEDQDQCLCDHKPRPPEFKKCNQQACKKSADLLCTKDKLSASFCQTLKAMKKCSVPTVRAECCFSCPQTHITHTQRQRRQRLLQKSKEL

SEQ ID NO: 326 - protein, 1594 aa, Homo sapiens
MPCAQRSWLANLSVVAQLLNFGALCYGRQPQPGPVRFPDRRQEHFIKGLPEYHVVGPVRVDASGHFLSYGLHYPITSSRRKRDLDGSEDWVYYRISHEEKDLFFNLTVNQGFLSNSYIMEKRYGNLSHVKMMASSAPLCHLSGTVLQQGTRVGTAALSACHGLTGFFQLPHGDFFIEPVKKHPLVEGGYHPHIVYRRQKVPETKEPTCGLKDSVNISQKQELWREKWERHNLPSRSLSRRSISKERWVETLVVADTKMIEYHGSENVESYILTIMNMVTGLFHNPSIGNAIHIVVVRLILLEEEEQGLKIVHHAEKTLSSFCKWQKSINPKSDLNPVHHDVAVLLTRKDICAGFNRPCETLGLSHLSGMCQPHRSCNINEDSGLPLAFTIAHELGHSFGIQHDGKENDCEPVGRHPYIMSRQLQYDPTPLTWSKCSEEYITRFLDRGWGFCLDDIPKKKGLKSKVIAPGVIYDVHHQCQLQYGPNATFCQEVENVCQTLWCSVKGFCRSKLDAAADGTQCGEKKWCMAGKCITVGKKPESIPGGWGRWSPWSHCSRTCGAGVQSAERLCNNPEPKFGGKYCTGERKRYRLCNVHPCRSEAPTFRQMQCSEFDTVPYKNELYHWFPIFNPAHPCELYCRPIDGQFSEKMLDAVIDGTPCFEGGNSRNVCINGICKMVGCDYEIDSNATEDRCGVCLGDGSSCQTVRKMFKQKEGSGYVDIGLIPKGARDIRVMEIEGAGNFLAIRSEDPEKYYLNGGFIIQWNGNYKLAGTVFQYDRKGDLEKLMATGPTNESVWIQLLFQVTNPGIKYEYTIQKDGLDNDVEQQMYFWQYGHWTECSVTCGTGIRRQTAHCIKKGRGMVKATFCDPETQPNGRQKKCHEKACPPRWWAGEWEACSATCGPHGEKKRTVLCIQTMVSDEQALPPTDCQHLLKPKTLLSCNRDILCPSDWTVGNWSECSVSCGGGVRIRSVTCAKNHDEPCDVTRKPNSRALCGLQQCPSSRRVLKPNKGTISNGKNPPTLKPVPPPTSRPRMLTTPTGPESMSTSTPAISSPSPTTASKEGDLGGKQWQDSSTQPELSSRYLISTGSTSQPILTSQSLSIQPSEENVSSSDTGPTSEGGLVATTTSGSGLSSSRNPITWPVTPFYNTLTKGPEMEIHSGSGEEREQPEDKDESNPVIWTKIRVPGNDAPVESTEMPLAPPLTPDLSRESWWPPFSTVMEGLLPSQRPTTSETGTPRVEGMVTEKPANTLLPLGGDHQPEPSGKTANRNHLKLPNNMNQTKSSEPVLTEEDATSLITEGFLLNASNYKQLTNGHGSAHWIVGNWSECSTTCGLGAYWRRVECSTQMDSDCAAIQRPDPAKRCHLRPCAGWKVGNWSKCSRNCSGGFKIREIQCVDSRDHRNLRPFHCQFLAGIPPPLSMSCNPEPCEAWQVEPWSQCSRSCGGGVQERGVFCPGGLCDWTKRPTSTMSCNEHLCCHWATGNWDLCSTSCGGGFQKRTVQCVPSEGNKTEDQDQCLCDHKPRPPEFKKCNQQACKKSADLLCTKDKLSASFCQTLKAMKKCSVPTVRAECCFSCPQTHITHTQRQRRQRLLQKSKEL

SEQ ID NO: 327 - protein, 232 aa, Homo sapiens
MPCAQRSWLANLSVVAQLLNFGALCYGRQPQPGPVRFPDRRQEHFIKGLPEYHVVGPVRVDASGHFLSYGLHYPITSSRRKRDLDGSEDWVYYRISHEEKDLFFNLTVNQGFLSNSYIMEKRYGNLSHVKMMASSAPLCHLSGTVLQQGTRVGTAALSACHGLTGFFQLPHGDFFIEPVKKHPLVEGGYHPHIVYRRQKVPETKEPTCGLKGIVTHMSSWVEESVLFFWLFY

SEQ ID NO: 328 - protein, 444 aa, Homo sapiens
MASDGAAPRAGLAWSPCSRRQLLSLLSAGRARCVWDPPRPQPGSAGHPPDAQPGLYYSANEQCRVAFGPKAVACTFAREHLDMCQALSCHTDPLDQSSCSRLLVPLLDGTECGVEKWCSKGRCRSLVELTPIAAVHGRWSSWGPRSPCSRSCGGGVVTRRRQCNNPRPAFGGRACVGADLQAEMCNTQACEKTQLEFMSQQCARTDGQPLRSSPGGASFYHWGAAVPHSQGDALCRHMCRAIGESFIMKRGDSFLDGTRCMPSGPREDGTLSLCVSGSCRTFGCDGRMDSQQVWDRCQVCGGDNSTCSPRKGSFTAGRAREYVTFLTVTPNLTSVYIANHRPLFTHLAVRIGGRYVVAGKMSISPNTTYPSLLEDGRVEYRVALTEDRLPRLEEIRIWGPLQEDADIQVGGVRAQLMHISWWSRPGLGERDLCARGRWPGGSSD

SEQ ID NO: 329 - protein, 276 aa, Homo sapiens
MHQRHPRARCPPLCVAGILACGFLLGCWGPSHFQQSCLQALEPQAVSSYLSPGAPLKGRPPSPGFQRQRQRQRRAAGGILHLELLVAVGPDVFQAHQEDTERYVLTNLNIGAELLRDPSLGAQFRVHLVKMVILTEPEGAPNITANLTSSLLSVCGWSQTINPEDDTDPGHADLVLYITRFDLELPDGNRQVRGVTQLGGACSPTWSCLITEDTGFDLGVTIAHEIGHRICARPSPATQTRWTKAAAAASSFLSWMGQNVAWRSGAPRVAAAPWWS

SEQ ID NO: 330 - protein, 1371 aa, Homo sapiens
MHQRHPRARCPPLCVAGILACGFLLGCWGPSHFQQSCLQALEPQAVSSYLSPGAPLKGRPPSPGFQRQRQRQRRAAGGILHLELLVAVGPDVFQAHQEDTERYVLTNLNIGAELLRDPSLGAQFRVHLVKMVILTEPEGAPNITANLTSSLLSVCGWSQTINPEDDTDPGHADLVLYITRFDLELPDGNRQVRGVTQLGGACSPTWSCLITEDTGFDLGVTIAHEIGHSFGLEHDGAPGSGCGPSGHVMASDGAAPRAGLAWSPCSRRQLLSLLSAGRARCVWDPPRPQPGSAGHPPDAQPGLYYSANEQCRVAFGPKAVACTFAREHLDMCQALSCHTDPLDQSSCSRLLVPLLDGTECGVEKWCSKGRCRSLVELTPIAAVHGRWSSWGPRSPCSRSCGGGVVTRRRQCNNPRPAFGGRACVGADLQAEMCNTQACEKTQLEFMSQQCARTDGQPLRSSPGGASFYHWGAAVPHSQGDALCRHMCRAIGESFIMKRGDSFLDGTRCMPSGPREDGTLSLCVSGSCRTFGCDGRMDSQQVWDRCQVCGGDNSTCSPRKGSFTAGRAREYVTFLTVTPNLTSVYIANHRPLFTHLAVRIGGRYVVAGKMSISPNTTYPSLLEDGRVEYRVALTEDRLPRLEEIRIWGPLQEDADIQVYRRYGEEYGNLTRPDITFTYFQPKPRQAWVWAAVRGPCSVSCGAGLRWVNYSCLDQARKELVETVQCQGSQQPPAWPEACVLEPCPPYWAVGDFGPCSASCGGGLRERPVRCVEAQGSLLKTLPPARCRAGAQQPAVALETCNPQPCPARWEVSEPSSCTSAGGAGLALENETCVPGADGLEAPVTEGPGSVDEKLPAPEPCVGMSCPPGWGHLDATSAGEKAPSPWGSIRTGAQAAHVWTPAAGSCSVSCGRGLMELRFLCMDSALRVPVQEELCGLASKPGSRREVCQAVPCPARWQYKLAACSVSCGRGVVRRILYCARAHGEDDGEEILLDTQCQGLPRPEPQEACSLEPCPPRWKVMSLGPCSASCGLGTARRSVACVQLDQGQDVEVDEAACAALVRPEASVPCLIADCTYRWHVGTWMECSVSCGDGIQRRRDTCLGPQAQAPVPADFCQHLPKPVTVRGCWAGPCVGQGACGRQHLEPTGTIDMRGPGQADCAVAIGRPLGEVVTLRVLESSLNCSAGDMLLLWGRLTWRKMCRKLLDMTFSSKTNTLVVRQRCGRPGGGVLLRYGSQLAPETFYRECDMQLFGPWGEIVSPSLSPATSNAGGCRLFINVAPHARIAIHALATNMGAGTEGANASYILIRDTHSLRTTAFHGQQVLYWESESSQAEMEFSEGFLKAQASLRGQYWTLQSWVPEMQDPQSWKGKEGT

SEQ ID NO: 331 - protein, 1340 aa, Homo sapiens
MHQRHPRARCPPLCVAGILACGFLLGCWGPSHFQQSCLQALEPQAVSSYLSPGAPLKGRPPSPGFQRQRQRQRRAAGGILHLELLVAVGPDVFQAHQEDTERYVLTNLNIGAELLRDPSLGAQFRVHLVKMVILTEPEGAPNITANLTSSLLSVCGWSQTINPEDDTDPGHADLVLYITRFDLELPDGNRQVRGVTQLGGACSPTWSCLITEDTGFDLGVTIAHEIGHSFGLEHDGAPGSGCGPSGHVMASDGAAPRAGLAWSPCSRRQLLSLLSANEQCRVAFGPKAVACTFAREHLDMCQALSCHTDPLDQSSCSRLLVPLLDGTECGVEKWCSKGRCRSLVELTPIAAVHGRWSSWGPRSPCSRSCGGGVVTRRRQCNNPRPAFGGRACVGADLQAEMCNTQACEKTQLEFMSQQCARTDGQPLRSSPGGASFYHWGAAVPHSQGDALCRHMCRAIGESFIMKRGDSFLDGTRCMPSGPREDGTLSLCVSGSCRTFGCDGRMDSQQVWDRCQVCGGDNSTCSPRKGSFTAGRAREYVTFLTVTPNLTSVYIANHRPLFTHLAVRIGGRYVVAGKMSISPNTTYPSLLEDGRVEYRVALTEDRLPRLEEIRIWGPLQEDADIQVYRRYGEEYGNLTRPDITFTYFQPKPRQAWVWAAVRGPCSVSCGAGLRWVNYSCLDQARKELVETVQCQGSQQPPAWPEACVLEPCPPYWAVGDFGPCSASCGGGLRERPVRCVEAQGSLLKTLPPARCRAGAQQPAVALETCNPQPCPARWEVSEPSSCTSAGGAGLALENETCVPGADGLEAPVTEGPGSVDEKLPAPEPCVGMSCPPGWGHLDATSAGEKAPSPWGSIRTGAQAAHVWTPAAGSCSVSCGRGLMELRFLCMDSALRVPVQEELCGLASKPGSRREVCQAVPCPARWQYKLAACSVSCGRGVVRRILYCARAHGEDDGEEILLDTQCQGLPRPEPQEACSLEPCPPRWKVMSLGPCSASCGLGTARRSVACVQLDQGQDVEVDEAACAALVRPEASVPCLIADCTYRWHVGTWMECSVSCGDGIQRRRDTCLGPQAQAPVPADFCQHLPKPVTVRGCWAGPCVGQGACGRQHLEPTGTIDMRGPGQADCAVAIGRPLGEVVTLRVLESSLNCSAGDMLLLWGRLTWRKMCRKLLDMTFSSKTNTLVVRQRCGRPGGGVLLRYGSQLAPETFYRECDMQLFGPWGEIVSPSLSPATSNAGGCRLFINVAPHARIAIHALATNMGAGTEGANASYILIRDTHSLRTTAFHGQQVLYWESESSQAEMEFSEGFLKAQASLRGQYWTLQSWVPEMQDPQSWKGKEGT

SEQ ID NO: 332 - protein, 1427 aa, Homo sapiens
MHQRHPRARCPPLCVAGILACGFLLGCWGPSHFQQSCLQALEPQAVSSYLSPGAPLKGRPPSPGFQRQRQRQRRAAGGILHLELLVAVGPDVFQAHQEDTERYVLTNLNIGAELLRDPSLGAQFRVHLVKMVILTEPEGAPNITANLTSSLLSVCGWSQTINPEDDTDPGHADLVLYITRFDLELPDGNRQVRGVTQLGGACSPTWSCLITEDTGFDLGVTIAHEIGHSFGLEHDGAPGSGCGPSGHVMASDGAAPRAGLAWSPCSRRQLLSLLSAGRARCVWDPPRPQPGSAGHPPDAQPGLYYSANEQCRVAFGPKAVACTFAREHLDMCQALSCHTDPLDQSSCSRLLVPLLDGTECGVEKWCSKGRCRSLVELTPIAAVHGRWSSWGPRSPCSRSCGGGVVTRRRQCNNPRPAFGGRACVGADLQAEMCNTQACEKTQLEFMSQQCARTDGQPLRSSPGGASFYHWGAAVPHSQGDALCRHMCRAIGESFIMKRGDSFLDGTRCMPSGPREDGTLSLCVSGSCRTFGCDGRMDSQQVWDRCQVCGGDNSTCSPRKGSFTAGRAREYVTFLTVTPNLTSVYIANHRPLFTHLAVRIGGRYVVAGKMSISPNTTYPSLLEDGRVEYRVALTEDRLPRLEEIRIWGPLQEDADIQVYRRYGEEYGNLTRPDITFTYFQPKPRQAWVWAAVRGPCSVSCGAGLRWVNYSCLDQARKELVETVQCQGSQQPPAWPEACVLEPCPPYWAVGDFGPCSASCGGGLRERPVRCVEAQGSLLKTLPPARCRAGAQQPAVALETCNPQPCPARWEVSEPSSCTSAGGAGLALENETCVPGADGLEAPVTEGPGSVDEKLPAPEPCVGMSCPPGWGHLDATSAGEKAPSPWGSIRTGAQAAHVWTPAAGSCSVSCGRGLMELRFLCMDSALRVPVQEELCGLASKPGSRREVCQAVPCPARWQYKLAACSVSCGRGVVRRILYCARAHGEDDGEEILLDTQCQGLPRPEPQEACSLEPCPPRWKVMSLGPCSASCGLGTARRSVACVQLDQGQDVEVDEAACAALVRPEASVPCLIADCTYRWHVGTWMECSVSCGDGIQRRRDTCLGPQAQAPVPADFCQHLPKPVTVRGCWAGPCVGQGTPSLVPHEEAAAPGRTTATPAGASLEWSQARGLLFSPAPQPRRLLPGPQENSVQSSACGRQHLEPTGTIDMRGPGQADCAVAIGRPLGEVVTLRVLESSLNCSAGDMLLLWGRLTWRKMCRKLLDMTFSSKTNTLVVRQRCGRPGGGVLLRYGSQLAPETFYRECDMQLFGPWGEIVSPSLSPATSNAGGCRLFINVAPHARIAIHALATNMGAGTEGANASYILIRDTHSLRTTAFHGQQVLYWESESSQAEMEFSEGFLKAQASLRGQYWTLQSWVPEMQDPQSWKGKEGT

SEQ ID NO: 333 - protein, 344 aa, Homo sapiens
MHQRHPRARCPPLCVAGILACGFLLGCWGPSHFQQSCLQALEPQAVSSYLSPGAPLKGRPPSPGFQRQRQRQRRAAGGILHLELLVAVGPDVFQAHQEDTERYVLTNLNIGAELLRDPSLGAQFRVHLVKMVILTEPEGAPNITANLTSSLLSVCGWSQTINPEDDTDPGHADLVLYITRFDLELPDGNRQVRGVTQLGGACSPTWSCLITEDTGFDLGVTIAHEIGHSFGLEHDGAPGSGCGPSGHVMASDGAAPRAGLAWSPCSRRQLLSLLRPVPPSPLPLLATHLCAGRSLSLGPSQEPAPGGGRGPRTPVPTHKRPRFQTLPSSCPLLRPASSRCTPRD

SEQ ID NO: 334 - protein, 344 aa, Homo sapiens; identical to SEQ ID NO: 333

SEQ ID NO: 335 - protein, 223 aa, Homo sapiens
MRGPGQADCAVAIGRPLGEVVTLRVLESSLNCSAGDMLLLWGRLTWRKMCRKLLDMTFSSKTNTLVVRQRCGRPGGGVLLRYGSQLAPETFYRECDMQLFGPWGEIVSPSLSPATSNAGGCRLFINVAPHARIAIHALATNMGAGTEGANASYILIRDTHSLRTTAFHGQQVLYWESESSQAEMEFSEGFLKAQASLRGQYWTLQSWVPEMQDPQSWKGKEGT

SEQ ID NO: 336 - protein, 1226 aa, Homo sapiens
MAPLRALLSYLLPLHCALCAAAGSRTPELHLSGKLSDYGVTVPCSTDFRGRFLSHVVSGPAAASAGSMVVDTPPTLPRHSSHLRVARSPLHPGGTLWPGRVGRHSLYFNVTVFGKELHLRLRPNRRLVVPGSSVEWQEDFRELFRQPLRQECVYTGGVTGMPGAAVAISNCDGLAGLIRTDSTDFFIEPLERGQQEKEASGRTHVVYRREAVQQEWAEPDGDLHNEAFGLGDLPNLLGLVGDQLGDTERKRRHAKPGSYSIEVLLVVDDSVVRFHGKEHVQNYVLTLMNIVDEIYHDESLGVHINIALVRLIMVGYRQSLSLIERGNPSRSLEQVCRWAHSQQRQDPSHAEHHDHVVFLTRQDFGPSGMQGYAPVTGMCHPLRSCALNHEDGFSSAFVIAHETGHVLGMEHDGQGNGCADETSLGSVMAPLVQAAFHRFHWSRCSKLELSRYLPSYDCLLDDPFDPAWPQPPELPGINYSMDEQCRFDFGSGYQTCLAFRTFEPCKQLWCSHPDNPYFCKTKKGPPLDGTECAPGKWCFKGHCIWKSPEQTYGQDGGWSSWTKFGSCSRSCGGGVRSRSRSCNNPSPAYGGRLCLGPMFEYQVCNSEECPGTYEDFRAQQCAKRNSYYVHQNAKHSWVPYEPDDDAQKCELICQSADTGDVVFMNQVVHDGTRCSYRDPYSVCARGECVPVGCDKEVGSMKADDKCGVCGGDNSHCRTVKGTLGKASKQAGALKLVQIPAGARHIQIEALEKSPHRIVVKNQVTGSFILNPKGKEATSRTFTAMGLEWEDAVEDAKESLKTSGPLPEAIAILALPPTEGGPRSSLAYKYVIHEDLLPLIGSNNVLLEEMDTYEWALKSWAPCSKACGGGIQFTKYGCRRRRDHHMVQRHLCDHKKRPKPIRRRCNQHPCSQPVWVTEEWGACSRSCGKLGVQTRGIQCLLPLSNGTHKVMPAKACAGDRPEARRPCLRVPCPAQWRLGAWSQCSATCGEGIQQRQVVCRTNANSLGHCEGDRPDTVQVCSLPACGGNHQNSTVRADVWELGTPEGQWVPQSEPLHPINKISSTEPCTGDRSVFCQMEVLDRYCSIPGYHRLCCVSCIKKASGPNPGPDPGPTSLPPFSTPGSPLPGPQDPADAAEPPGKPTGSEDHQHGRATQLPGALDTSSPGTQHPFAPETPIPGASWSISPTTPGGLPWGWTQTPTPVPEDKGQPGEDLRHPGTSLPAASPVT

SEQ ID NO: 337 - protein, 1223 aa, Homo sapiens
MAPLRALLSYLLPLHCALCAAAGSRTPELHLSGKLSDYGVTVPCSTDFRGRFLSHVVSGPAAASAGSMVVDTPPTLPRHSSHLRVARSPLHPGGTLWPGRVGRHSLYFNVTVFGKELHLRLRPNRRLVVPGSSVEWQEDFRELFRQPLRQECVYTGGVTGMPGAAVAISNCDGLAGLIRTDSTDFFIEPLERGQQEKEASGRTHVVYRREAVQQEWAEPDGDLHNEAFGLGDLPNLLGLVGDQLGDTERKRRHAKPGSYSIEVLLVVDDSVVRFHGKEHVQNYVLTLMNIVDEIYHDESLGVHINIALVRLIMVGYRQSLSLIERGNPSRSLEQVCRWAHSQQRQDPSHAEHHDHVVFLTRQDFGPSGYAPVTGMCHPLRSCALNHEDGFSSAFVIAHETGHVLGMEHDGQGNGCADETSLGSVMAPLVQAAFHRFHWSRCSKLELSRYLPSYDCLLDDPFDPAWPQPPELPGINYSMDEQCRFDFGSGYQTCLAFRTFEPCKQLWCSHPDNPYFCKTKKGPPLDGTECAPGKWCFKGHCIWKSPEQTYGQDGGWSSWTKFGSCSRSCGGGVRSRSRSCNNPSPAYGGRLCLGPMFEYQVCNSEECPGTYEDFRAQQCAKRNSYYVHQNAKHSWVPYEPDDDAQKCELICQSADTGDVVFMNQVVHDGTRCSYRDPYSVCARGECVPVGCDKEVGSMKADDKCGVCGGDNSHCRTVKGTLGKASKQAGALKLVQIPAGARHIQIEALEKSPHRIVVKNQVTGSFILNPKGKEATSRTFTAMGLEWEDAVEDAKESLKTSGPLPEAIAILALPPTEGGPRSSLAYKYVIHEDLLPLIGSNNVLLEEMDTYEWALKSWAPCSKACGGGIQFTKYGCRRRRDHHMVQRHLCDHKKRPKPIRRRCNQHPCSQPVWVTEEWGACSRSCGKLGVQTRGIQCLLPLSNGTHKVMPAKACAGDRPEARRPCLRVPCPAQWRLGAWSQCSATCGEGIQQRQVVCRTNANSLGHCEGDRPDTVQVCSLPACGGNHQNSTVRADVWELGTPEGQWVPQSEPLHPINKISSTEPCTGDRSVFCQMEVLDRYCSIPGYHRLCCVSCIKKASGPNPGPDPGPTSLPPFSTPGSPLPGPQDPADAAEPPGKPTGSEDHQHGRATQLPGALDTSSPGTQHPFAPETPIPGASWSISPTTPGGLPWGWTQTPTPVPEDKGQPGEDLRHPGTSLPAASPVT

SEQ ID NO: 338 - protein, 950 aa, Homo sapiens
MLLLGILTLAFAGRTAGGSEPEREVVVPIRLDPDINGRRYYWRGPEDSGDQGLIFQITAFQEDFYLHLTPDAQFLAPAFSTEHLGVPLQGLTGGSSDLRRCFYSGDVNAEPDSFAAVSLCGGLRGAFGYRGAEYVISPLPNASAPAAQRNSQGAHLLQRRGVPGGPSGDPTSRCGVASGWNPAILRALDPYKPRRAGFGESRSRRRSGRAKRFVSIPRYVETLVVADESMVKFHGADLEHYLLTLLATAARLYRHPSILNPINIVVVKVLLLRDRDSGPKVTGNAALTLRNFCAWQKKLNKVSDKHPEYWDTAILFTRQDLCGATTCDTLGMADVGTMCDPKRSCSVIEDDGLPSAFTTAHELGHVFNMPHDNVKVCEEVFGKLRANHMMSPTLIQIDRANPWSACSAAIITDFLDSGHGDCLLDQPSKPISLPEDLPGASYTLSQQCELAFGVGSKPCPYMQYCTKLWCTGKAKGQMVCQTRHFPWADGTSCGEGKLCLKGACVERHNLNKHRVDGSWAKWDPYGPCSRTCGGGVQLARRQCTNPTPANGGKYCEGVRVKYRSCNLEPCPSSASGKSFREEQCEAFNGYNHSTNRLTLAVAWVPKYSGVSPRDKCKLICRANGTGYFYVLAPKVVDGTLCSPDSTSVCVQGKCIKAGCDGNLGSKKRFDKCGVCGGDNKSCKKVTGLFTKPMHGYNFVVAIPAGASSIDIRQRGYKGLIGDDNYLALKNSQGKYLLNGHFVVSAVERDLVVKGSLLRYSGTGTAVESLQASRPILEPLTVEVLSVGKMTPPRVRYSFYLPKEPREDKSSHPKDPRGPSVLHNSVLSLSNQVEQPDDRPPARWVAGSWGPCSASCGSGLQKRAVDCRGSAGQRTVPACDAAHRPVETQACGEPCPTWELSAWSPCSKSCGRGFQRRSLKCVGHGGRLLARDQCNLHRKPQELDFCVLRPC

SEQ ID NO: 339 - protein, 1224 aa, Homo sapiens
MKPRARGWRGLAALWMLLAQVAEQAPACAMGPAAAAPGSPSVPRPPPPAERPGWMEKGEYDLVSAYEVDHRGDYVSHEIMHHQRRRRAVPVSEVESLHLRLKGSRHDFHMDLRTSSSLVAPGFIVQTLGKTGTKSVQTLPPEDFCFYQGSLRSHRNSSVALSTCQGLSGMIRTEEADYFLRPLPSHLSWKLGRAAQGSSPSHVLYKRSTEPHAPGASEVLVTSRTWELAHQPLHSSDLRLGLPQKQHFCGRRKKYMPQPPKEDLFILPDEYKSCLRHKRSLLRSHRNEELNVETLVVVDKKMMQNHGHENITTYVLTILNMVSALFKDGTIGGNINIAIVGLILLEDEQPGLVISHHADHTLSSFCQWQSGLMGKDGTRHDHAILLTGLDICSWKNEPCDTLGFAPISGMCSKYRSCTINEDTGLGLAFTIAHESGHNFGMIHDGEGNMCKKSEGNIMSPTLAGRNGVFSWSPCSRQYLHKFLSTAQAICLADQPKPVKEYKYPEKLPGELYDANTQCKWQFGEKAKLCMLDFKKDICKALWCHRIGRKCETKFMPAAEGTICGHDMWCRGGQCVKYGDEGPKPTHGHWSDWSSWSPCSRTCGGGVSHRSRLCTNPKPSHGGKFCEGSTRTLKLCNSQKCPRDSVDFRAAQCAEHNSRRFRGRHYKWKPYTQVEDQDLCKLYCIAEGFDFFFSLSNKVKDGTPCSEDSRNVCIDGICERVGCDNVLGSDAVEDVCGVCNGNNSACTIHRGLYTKHHHTNQYYHMVTIPSGARSIRIYEMNVSTSYISVRNALRRYYLNGHWTVDWPGRYKFSGTTFDYRRSYNEPENLIATGPTNETLIVELLFQGRNPGVAWEYSMPRLGTEKQPPAQPSYTWAIVRSECSVSCGGGQMTVREGCYRDLKFQVNMSFCNPKTRPVTGLVPCKVSACPPSWSVGNWSACSRTCGGGAQSRPVQCTRRVHYDSEPVPASLCPQPAPSSRQACNSQSCPPAWSAGPWAECSHTCGKGWRKRAVACKSTNPSARAQLLPDAVCTSEPKPRMHEACLLQRCHKPKKLQWLVSAWSQCSVTCERGTQKRFLKCAEKYVSGKYRELASKKCSHLPKPSLELERACAPLPCPRHPPFAAAGPSRGSWFASPWSQCTASCGGGVQTRSVQCLAGGRPASGCLLHQKPSASLACNTHFCPIAEKKDAFCKDYFHWCYLVPQHGMCSHKFYGKQCCKTCSKSNL

SEQ ID NO: 340 - protein, 570 aa, Homo sapiens
MKPRARGWRGLAALWMLLAQVAEQAPACAMGPAAAAPGSPSVPRPPPPAERPGWMEKGEYDLVSAYEVDHRGDYVSHEIMHHQRRRRAVPVSEVESLHLRLKGSRHDFHMDLRTSSSLVAPGFIVQTLGKTGTKSVQTLPPEDFCFYQGSLRSHRNSSVALSTCQGLSGMIRTEEADYFLRPLPSHLSWKLGRAAQGSSPSHVLYKRSTEPHAPGASEVLVTSRTWELAHQPLHSSDLRLGLPQKQHFCGRRKKYMPQPPKEDLFILPDEYKSCLRHKRSLLRSHRNEELNVETLVVVDKKMMQNHGHENITTYVLTILNMVSALFKDGTIGGNINIAIVGLILLEDEQPGLVISHHADHTLSSFCQWQSGLMGKDGTRHDHAILLTGLDICSWKNEPCDTLGFAPISGMCSKYRSCTINEDTGLGLAFTIAHESGHNFGMIHDGEGNMCKKSEGNIMSPTLAGRNGVFSWSPCSRQYLHKFLSTAQAICLADQPKPVKEYKYPEKLPGELYDANTQCKWQFGEKAKLCMLDFKKDICKALWCHRIGRKCETKFMPAAEGTICGHDMVRS

SEQ ID NO: 341 - protein, 1095 aa, Homo sapiens
MCDGALLPPLVLPVLLLLVWGLDPGTAVGDAAADVEVVLPWRVRPDDVHLPPLPAAPGPRRRRRPRTPPAAPRARPGERALLLHLPAFGRDLYLQLRRDLRFLSRGFEVEEAGAARRRGRPAELCFYSGRVLGHPGSLVSLSACGAAGGLVGLIQLGQEQVLIQPLNNSQGPFSGREHLIRRKWSLTPSPSAEAQRPEQLCKVLTEKKKPTWGRPSRDWRERRNAIRLTSEHTVETLVVADADMVQYHGAEAAQRFILTVMNMVYNMFQHQSLGIKINIQVTKLVLLRQRPAKLSIGHHGERSLESFCHWQNEEYGGARYLGNNQVPGGKDDPPLVDAAVFVTRTDFCVHKDEPCDTVGIAYLGGVCSAKRKCVLAEDNGLNLAFTIAHELGHNLGMNHDDDHSSCAGRSHIMSGEWVKGRNPSDLSWSSCSRDDLENFLKSKVSTCLLVTDPRSQHTVRLPHKLPGMHYSANEQCQILFGMNATFCRNMEHLMCAGLWCLVEGDTSCKTKLDPPLDGTECGADKWCRAGECVSKTPIPEHVDGDWSPWGAWSMCSRTCGTGARFRQRKCDNPPPGPGGTHCPGASVEHAVCENLPCPKGLPSFRDQQCQAHDRLSPKKKGLLTAVVVDDKPCELYCSPLGKESPLLVADRVLDGTPCGPYETDLCVHGKCQKIGCDGIIGSAAKEDRCGVCSGDGKTCHLVKGDFSHARGTALKDSGKGSINSDWKIELPGEFQIAGTTVRYVRRGLWEKISAKGPTKLPLHLMVLLFHDQDYGIHYEYTVPVNRTAENQSEPEKPQDSLFIWTHSGWEGCSVQCGGGERRTIVSCTRIVNKTTTLVNDSDCPQASRPEPQVRRCNLHPCQSRWVAGPWSPCSATCEKGFQHREVTCVYQLQNGTHVATRPLYCPGPRPAAVQSCEGQDCLSIWEASEWSQCSASCGKGVWKRTVACTNSQGKCDASTRPRAEEACEDYSGCYEWKTGDWSTCSSTCGKGLQSRVVQCMHKVTGRHGSECPALSKPAPYRQCYQEVCNDRINANTITSPRLAALTYKCTRDQWTVYCRVIREKNLCQDMRWYQRCCQTCRDFYANKMRQPPPNS

SEQ ID NO: 342 - protein, 68 aa, Homo sapiens
MCDGALLPPLVLPVLLLLVWGLDPGTGWPHSAWAGAGANPAPQQLPGPIQWTRTSDQAQMVLDPQPFC

SEQ ID NO: 343 - protein, 214 aa, Homo sapiens
  SITE 1: note = misc_feature - Xaa can be any naturally occurring amino acid
XELYCSPLGKESPLLVADRVLDGTPCGPYETDLCVHGKCQKIGCDGIIGSAAKEDRCGVCSGDGKTCHLVKGDFSHARGTGYIEAAVIPAGARRIRVVEDKPAHSFLALKDSGKGSINSDWKIELPGEFQIAGTTVRYVRRGLWEKISAKGPTKLPLHLMVLLFHDQDYGIHYEYTVPVNRTAENQSEPEKPQDSLFIWTHSGWEGCSVQCGGG

SEQ ID NO: 344 - protein, 120 aa, Homo sapiens
  SITE 1: note = misc_feature - Xaa can be any naturally occurring amino acid
XGRPAELCFYSGRVLGHPGSLVSLSACGAAGGLVGLIQLGQEQVLIQPLNNSQGPFSGREHLIRRKWSLTPSPSAEAQRPEQLCKVLTVPQCLGLTWEDLKSGGWSDLEVPHSCVWPGGG

SEQ ID NO: 345 - protein, 1221 aa, Homo sapiens
MECALLLACAFPAAGSGPPRGLAGLGRVAKALQLCCLCCASVAAALASDSSSGASGLNDDYVFVTPVEVDSAGSYISHDILHNGRKKRSAQNARSSLHYRFSAFGQELHLELKPSAILSSHFIVQVLGKDGASETQKPEVQQCFYQGFIRNDSSSSVAVSTCAGLSGLIRTRKNEFLISPLPQLLAQEHNYSSPAGHHPHVLYKRTAEEKIQRYRGYPGSGRNYPGYSPSHIPHASQSRETEYHHRRLQKQHFCGRRKKYAPKPPTEDTYLRFDEYGSSGRPRRSAGKSQKGLNVETLVVADKKMVEKHGKGNVTTYILTVMNMVSGLFKDGTIGSDINVVVVSLILLEQEPGGLLINHHADQSLNSFCQWQSALIGKNGKRHDHAILLTGFDICSWKNEPCDTLGFAPISGMCSKYRSCTINEDTGLGLAFTIAHESGHNFGMIHDGEGNPCRKAEGNIMSPTLTGNNGVFSWSSCSRQYLKKFLSTPQAGCLVDEPKQAGQYKYPDKLPGQIYDADTQCKWQFGAKAKLCSLGFVKDICKSLWCHRVGHRCETKFMPAAEGTVCGLSMWCRQGQCVKFGELGPRPIHGQWSAWSKWSECSRTCGGGVKFQERHCNNPKPQYGGLFCPGSSRIYQLCNINPCNENSLDFRAQQCAEYNSKPFRGWFYQWKPYTKVEEEDRCKLYCKAENFEFFFAMSGKVKDGTPCSPNKNDVCIDGVCELVGCDHELGSKAVSDACGVCKGDNSTCKFYKGLYLNQHKANEYYPVVLIPAGARSIEIQELQVSSSYLAVRSLSQKYYLTGGWSIDWPGEFPFAGTTFEYQRSFNRPERLYAPGPTNETLVFEILMQGKNPGIAWKYALPKVMNGTPPATKRPAYTWSIVQSECSVSCGGGYINVKAICLRDQNTQVNSSFCSAKTKPVTEPKICNAFSCPAYWMPGEWSTCSKACAGGQQSRKIQCVQKKPFQKEEAVLHSLCPVSTPTQVQACNSHACPPQWSLGPWSQCSKTCGRGVRKRELLCKGSAAETLPESQCTSLPRPELQEGCVLGRCPKNSRLQWVASSWSECSATCGLGVRKREMKCSEKGFQGKLITFPERRCRNIKKPNLDLEETCNRRACPAHPVYNMVAGWYSLPWQQCTVTCGGGVQTRSVHCVQQGRPSSSCLLHQKPPVLRACNTNFCPAPEKREDPSCVDFFNWCHLVPQHGVCNHKFYGKQCCKSCTRKI

SEQ ID NO: 346 - protein, 274 aa, Homo sapiens
MECALLLACAFPAAGSGPPRGLAGLGRVAKALQLCCLCCASVAAALASDSSSGASGLNDDYVFVTPVEVDSAGSYISHDILHNGRKKRSAQNARSSLHYRFSAFGQELHLELKPSAILSSHFIVQVLGKDGASETQKPEVQQCFYQGFIRNDSSSSVAVSTCAGLSGLIRTRKNEFLISPLPQLLAQEHNYSSPAGHHPHVLYKRTAEEKIQRYRGYPGSGRNYPGYSPSHIPHASQSRETEYHHRRLQKQHFCGRRKKCICSQASHRGHLSKV

SEQ ID NO: 347 - protein, 62 aa, Homo sapiens
  SITE 1: note = misc_feature - Xaa can be any naturally occurring amino acid
XQGRPSSSCLLHQKPPVLRACNTNFCPAPEKRDSAGSQLPCCDGPQAVHEEGLRFPDNHWAM

SEQ ID NO: 348 - protein, 186 aa, Homo sapiens
  SITE 1: note = misc_feature - Xaa can be any naturally occurring amino acid
XVDSAGSYISHDILHNGRKKRSAQNARSSLHYRFSAFGQELHLELKPSAILSSHFIVQVLGKDGASETQKPEVQQCFYQGFIRNDSSSSVAVSTCAGLLLAQEHNYSSPAGHHPHVLYKRTAEEKIQRYRGYPGSGRNYPGYSPSHIPHASQSRETEYHHRRLQKQHFCGRRKKCICSQASHRGHL

SEQ ID NO: 349 - protein, 37 aa, Homo sapiens
MGKNREMRLTHICCCCLLYQLGFLSNGIVSDGIYTAQ

SEQ ID NO: 350 - protein, 1213 aa, Homo sapiens
MGKNREMRLTHICCCCLLYQLGFLSNGIVSELQFAPDREEWEVVFPALWRREPVDPAGGSGGSADPGWVRGVGGGGSARAQAAGSSREVRSVAPVPLEEPVEGRSESRLRPPPPSEGEEDEELESQELPRGSSGAAALSPGAPASWQPPPPPQPPPSPPPAQHAEPDGDEVLLRIPAFSRDLYLLLRRDGRFLAPRFAVEQRPNPGPGPTGAASAPQPPAPPDAGCFYTGAVLRHPGSLASFSTCGGGLMGFIQLNEDFIFIEPLNDTMAITGHPHRVYRQKRSMEEKVTEKSALHSHYCGIISDKGRPRSRKIAESGRGKRYSYKLPQEYNIETVVVADPAMVSYHGADAARRFILTILNMVFNLFQHKSLSVQVNLRVIKLILLHETPPELYIGHHGEKMLESFCKWQHEEFGKKNDIHLEMSTNWGEDMTSVDAAILITRKDFCVHKDEPCDTVGIAYLSGMCSEKRKCIIAEDNGLNLAFTIAHEMGHNMGINHDNDHPSCADGLHIMSGEWIKGQNLGDVSWSRCSKEDLERFLRSKASNCLLQTNPQSVNSVMVPSKLPGMTYTADEQCQILFGPLASFCQEMQHVICTGLWCKVEGEKECRTKLDPPMDGTDCDLGKWCKAGECTSRTSAPEHLAGEWSLWSPCSRTCSAGISSRERKCPGLDSEARDCNGPRKQYRICENPPCPAGLPGFRDWQCQAYSVRTSSPKHILQWQAVLDEEKPCALFCSPVGKEQPILLSEKVMDGTSCGYQGLDICANGRCQKVGCDGLLGSLAREDHCGVCNGNGKSCKIIKGDFNHTRGAGYVEVLVIPAGARRIKVVEEKPAHSYLALRDAGKQSINSDWKIEHSGAFNLAGTTVHYVRRGLWEKISAKGPTTAPLHLLVLLFQDQNYGLHYEYTIPSDPLPENQSSKAPEPLFMWTHTSWEDCDATCGGGERKTTVSCTKIMSKNISIVDNEKCKYLTKPEPQIRKCNEQPCQTRWMMTEWTPCSRTCGKGMQSRQVACTQQLSNGTLIRARERDCIGPKPASAQRCEGQDCMTVWEAGVWSECSVKCGKGIRHRTVRCTNPRKKCVLSTRPREAEDCEDYSKCYVWRMGDWSKCSITCGKGMQSRVIQCMHKITGRHGNECFSSEKPAAYRPCHLQPCNEKINVNTITSPRLAALTFKCLGDQWPVYCRVIREKNLCQDMRWYQRCCETCRDFYAQKLQQKS

SEQ ID NO: 351 - protein, 1207 aa, Homo sapiens
MRLTHICCCCLLYQLGFLSNGIVSELQFAPDREEWEVVFPALWRREPVDPAGGSGGSADPGWVRGVGGGGSARAQAAGSSREVRSVAPVPLEEPVEGRSESRLRPPPPSEGEEDEELESQELPRGSSGAAALSPGAPASWQPPPPPQPPPSPPPAQHAEPDGDEVLLRIPAFSRDLYLLLRRDGRFLAPRFAVEQRPNPGPGPTGAASAPQPPAPPDAGCFYTGAVLRHPGSLASFSTCGGGLMGFIQLNEDFIFIEPLNDTMAITGHPHRVYRQKRSMEEKVTEKSALHSHYCGIISDKGRPRSRKIAESGRGKRYSYKLPQEYNIETVVVADPAMVSYHGADAARRFILTILNMVFNLFQHKSLSVQVNLRVIKLILLHETPPELYIGHHGEKMLESFCKWQHEEFGKKNDIHLEMSTNWGEDMTSVDAAILITRKDFCVHKDEPCDTVGIAYLSGMCSEKRKCIIAEDNGLNLAFTIAHEMGHNMGINHDNDHPSCADGLHIMSGEWIKGQNLGDVSWSRCSKEDLERFLRSKASNCLLQTNPQSVNSVMVPSKLPGMTYTADEQCQILFGPLASFCQEMQHVICTGLWCKVEGEKECRTKLDPPMDGTDCDLGKWCKAGECTSRTSAPEHLAGEWSLWSPCSRTCSAGISSRERKCPGLDSEARDCNGPRKQYRICENPPCPAGLPGFRDWQCQAYSVRTSSPKHILQWQAVLDEEKPCALFCSPVGKEQPILLSEKVMDGTSCGYQGLDICANGRCQKVGCDGLLGSLAREDHCGVCNGNGKSCKIIKGDFNHTRGAGYVEVLVIPAGARRIKVVEEKPAHSYLALRDAGKQSINSDWKIEHSGAFNLAGTTVHYVRRGLWEKISAKGPTTAPLHLLVLLFQDQNYGLHYEYTIPSDPLPENQSSKAPEPLFMWTHTSWEDCDATCGGGERKTTVSCTKIMSKNISIVDNEKCKYLTKPEPQIRKCNEQPCQTRWMMTEWTPCSRTCGKGMQSRQVACTQQLSNGTLIRARERDCIGPKPASAQRCEGQDCMTVWEAGVWSECSVKCGKGIRHRTVRCTNPRKKCVLSTRPREAEDCEDYSKCYVWRMGDWSKCSITCGKGMQSRVIQCMHKITGRHGNECFSSEKPAAYRPCHLQPCNEKINVNTITSPRLAALTFKCLGDQWPVYCRVIREKNLCQDMRWYQRCCETCRDFYAQKLQQKS

SEQ ID NO: 352 - protein, 145 aa, Homo sapiens
  SITE 1: note = misc_feature - Xaa can be any naturally occurring amino acid
XDAGCFYTGAVLRHPGSLASFSTCGGGLMGFIQLNEDFIFIEPLNDTMAITGHPHRVYRQKRSMEEKVTEKSALHSHYCGIISDKGRPRSRKIAESGRGKRYSYKLPQEYNIETVVVADPAMVSYHGADAARRFILTILNMVGKL

SEQ ID NO: 353 - protein, 1211 aa, Homo sapiens
MDPPAGAARRLLCPALLLLLLLLPPPLLPPPPPPANARLAAAADPPGGPLGHGAERILAVPVRTDAQGRLVSHVVSAATSRAGVRARRAAPVRTPSFPGGNEEEPGSHLFYNVTVFGRDLHLRLRPNARLVAPGATMEWQGEKGTTRVEPLLGSCLYVGDVAGLAEASSVALSNCDGLAGLIRMEEEEFFIEPLEKGLAAQEAEQGRVHVVYRRPPTSPPLGGPQALDTGASLDSLDSLSRALGVLEEHANSSRRRARRHAADDDYNIEVLLGVDDSVVQFHGKEHVQKYLLTLMNIVNEIYHDESLGAHINVVLVRIILLSYGKSMSLIEIGNPSQSLENVCRWAYLQQKPDTGHDEYHDHAIFLTRQDFGPSGMQGYAPVTGMCHPVRSCTLNHEDGFSSAFVVAHETGHVLGMEHDGQGNRCGDEVRLGSIMAPLVQAAFHRFHWSRCSQQELSRYLHSYDCLLDDPFAHDWPALPQLPGLHYSMNEQCRFDFGLGYMMCTAFRTFDPCKQLWCSHPDNPYFCKTKKGPPLDGTMCAPGKHCFKGHCIWLTPDILKRDGSWGAWSPFGSCSRTCGTGVKFRTRQCDNPHPANGGRTCSGLAYDFQLCSRQDCPDSLADFREEQCRQWDLYFEHGDAQHHWLPHEHRDAKERCHLYCESRETGEVVSMKRMVHDGTRCSYKDAFSLCVRGDCRKVGCDGVIGSSKQEDKCGVCGGDNSHCKVVKGTFTRSPKKHGYIKMFEIPAGARHLLIQEVDATSHHLAVKNLETGKFILNEENDVDASSKTFIAMGVEWEYRDEDGRETLQTMGPLHGTITVLVIPVGDTRVSLTYKYMIHEDSLNVDDNNVLEEDSVVYEWALKKWSPCSKPCGGGSQFTKYGCRRRLDHKMVHRGFCAALSKPKAIRRACNPQECSQPVWVTGEWEPCSQTCGRTGMQVRSVRCIQPLHDNTTRSVHAKHCNDARPESRRACSRELCPGRWRAGPWSQCSVTCGNGTQERPVLCRTADDSFGICQEERPETARTCRLGPCPRNISDPSKKSYVVQWLSRPDPDSPIRKISSKGHCQGDKSIFCRMEVLSRYCSIPGYNKLCCKSCNLYNNLTNVEGRIEPPPGKHNDIDVFMPTLPVPTVAMEVRPSPSTPLEVPLNASSTNATEDHPETNAVDEPYKIHGLEDEVQPPNLIPRRPSPYEKTRNQRIQELIDEMRKKEMLGKF

SEQ ID NO: 354 - protein, 566 aa, Homo sapiens
MDPPAGAARRLLCPALLLLLLLLPPPLLPPPPPPANARLAAAADPPGGPLGHGAERILAVPVRTDAQGRLVSHVVSAATSRAGVRARRAAPVRTPSFPGGNEEEPGSHLFYNVTVFGRDLHLRLRPNARLVAPGATMEWQGEKGTTRVEPLLGSCLYVGDVAGLAEASSVALSNCDGLAGLIRMEEEEFFIEPLEKGLAAQEAEQGRVHVVYRRPPTSPPLGGPQALDTGASLDSLDSLSRALGVLEEHANSSRRRARRHAADDDYNIEVLLGVDDSVVQFHGKEHVQKYLLTLMNIVNEIYHDESLGAHINVVLVRIILLSYGKSMSLIEIGNPSQSLENVCRWAYLQQKPDTGHDEYHDHAIFLTRQDFGPSGMQGYAPVTGMCHPVRSCTLNHEDGFSSAFVVAHETGHVLGMEHDGQGNRCGDEVRLGSIMAPLVQAAFHRFHWSRCSQQELSRYLHSYDCLLDDPFAHDWPALPQLPGLHYSMNEQCRFDFGLGYMMCTAFRTFDPCKQLWCSHPDNPYFCKTKKGPPLDGTMCAPGKFRPGAVAHACYPSTLGGQGRWIA

SEQ ID NO: 355 - protein, 106 aa, Homo sapiens
VTCGNGTQERPVLCRTADDSFGICQEERPETARTCRLGPCPRNISDPSKKSYVVQWLSRPDPDSPIRKISSSNRPVYNSASALQCMPCALWSLPWAPLLSVYGKLP

SEQ ID NO: 356 - protein, 1910 aa, Homo sapiens
MWVAKWLTGLLYHLSLFITRSWEVDFHPRQEALVRTLTSYEVVIPERVNEFGEVFPQSHHFSRQKRSSEALEPMPFRTHYRFTAYGQLFQLNLTADASFLAAGYTEVHLGTPERGAWESDAGPSDLRHCFYRGQVNSQEDYKAVVSLCGGLTGTFKGQNGEYFLEPIMKADGNEYEDGHNKPHLIYRQDLNNSFLQTLKYCSVSESQIKETSLPFHTYSNMNEDLNVMKERVLGHTSKNVPLKDERRHSRKKRLISYPRYIEIMVTADAKVVSAHGSNLQNYILTLMSIVATIYKDPSIGNLIHIVVVKLVMIHREEEGPVINFDGATTLKNFCSWQQTQNDLDDVHPSHHDTAVLITREDICSSKEKCNMLGLSYLGTICDPLQSCFINEEKGLISAFTIAHELGHTLGVQHDDNPRCKEMKVTKYHVMAPALSFHMSPWSWSNCSRKYVTEFLDTGYGECLLDKPDEEIYNLPSELPGSRYDGNKQCELAFGPGSQMCPHINICMHLWCTSTEKLHKGCFTQHVPPADGTDCGPGMHCRHGLCVNKETETRPVNGEWGPWEPYSSCSRTCGGGIESATRRCNRPEPRNGGNYCVGRRMKFRSCNTDSCPKGTQDFREKQCSDFNGKHLDISGIPSNVRWLPRYSGIGTKDRCKLYCQVAGTNYFYLLKDMVEDGTPCGTETHDICVQGQCMAAGCDHVLNSSAKIDKCGVCGGDNSSCKTITGVFNSSHYGYNVVVKIPAGATNVDIRQYSYSGQPDDSYLALSDAEGNFLFNGNFLLSTSKKEINVQGTRTVIEYSGSNNAVERINSTNRQEKELILQVLCVGNLYNPDVHYSFNIPLEERSDMFTWDPYGPWEGCTKMCQGLQRRNITCIHKSDHSVVSDKECDHLPLPSFVTQSCNTDCELRWHVIGKSECSSQCGQGYRTLDIHCMKYSIHEGQTVQVDDHYCGDQLKPPTQELCHGNCVFTRWHYSEWSQCSRSCGGGERSRESYCMNNFGHRLADNECQELSRVTRENCNEFSCPSWAASEWSECLVTCGKGTKQRQVWCQLNVDHLSDGFCNSSTKPESLSPCELHTCASWQVGPWGPCTTTCGHGYQMRDVKCVNELASAVLEDTECHEASRPSDRQSCVLTPCSFISKLETALLPTVLIKKMAQWRHGSWTPCSVSCGRGTQARYVSCRDALDRIADESYCAHLPRPAEIWDCFTPCGEWQAGDWSPCSASCGHGKTTRQVLCMNYHQPIDENYCDPEVRPLMEQECSLAACPPAHSHFPSSPVQPSYYLSTNLPLTQKLEDNENQVVHPSVRGNQWRTGPWGSCSSSCSGGLQHRAVVCQDENGQSASYCDAASKPPELQQCGPGPCPQWNYGNWGECSQTCGGGIKSRLVICQFPNGQILEDHNCEIVNKPPSVIQCHMHACPADVSWHQEPWTSCSASCGKGRKYREVFCIDQFQRKLEDTNCSQVQKPPTHKACRSVRCPSWKANSWNECSVTCGSGVQQRDVYCRLKGVGQVVEEMCDQSTRPCSQRRCWSQDCVQHKGMERGRLNCSTSCERKDSHQRMECTDNQIRQVNEIVYNSSTISLTSKNCRNPPCNYIVVTADSSQCANNCGFSYRQRITYCTEIPSTKKHKLHRLRPIVYQECPVVPSSQVYQCINSCLHLATWKVGKWSKCSVTCGIGIMKRQVKCITKHGLSSDLCLNHLKPGAQKKCYANDCKSFTTCKEIQVKNHIRKDGDYYLNIKGRIIKIYCADMYLENPKEYLTLVQGEENFSEVYGFRLKNPYQCPFNGSRREDCECDNGHLAAGYTVFSKIRIDLTSMQIKTTDLLFSKTIFGNAVPFATAGDCYSAFRCPQGQFSINLSGTGMKISSTAKWLTQGSYTSVSIRRSEDGTRFFGKCGGYCGKCLPHMTTGLPIQVI

SEQ ID NO: 357 - protein, 1504 aa, Homo sapiens
MWVAKWLTGLLYHLSLFITRSWEVDFHPRQEALVRTLTSYEVVIPERVNEFGEVFPQSHHFSRQKRSSEALEPMPFRTHYRFTAYGQLFQLNLTADASFLAAGYTEVHLGTPERGAWESDAGPSDLRHCFYRGQVNSQEDYKAVVSLCGGLTGTFKGQNGEYFLEPIMKADGNEYEDGHNKPHLIYRQDLNNSFLQTLKYCSVSESQIKETSLPFHTYSNMNEDLNVMKERVLGHTSKNVPLKDERRHSRKKRLISYPRYIEIMVTADAKVVSAHGSNLQNYILTLMSIVATIYKDPSIGNLIHIVVVKLVMIHREEEGPVINFDGATTLKNFCSWQQTQNDLDDVHPSHHDTAVLITREDICSSKEKCNMLGLSYLGTICDPLQSCFINEEKGLISAFTIAHELGHTLGVQHDDNPRCKEMKVTKYHVMAPALSFHMSPWSWSNCSRKYVTEFLDTGYGECLLDKPDEEIYNLPSELPGSRYDGNKQCELAFGPGSQMCPHINICMHLWCTSTEKLHKGCFTQHVPPADGTDCGPGMHCRHGLCVNKETETRPVNGEWGPWEPYSSCSRTCGGGIESATRRCNRPEPRNGGNYCVGRRMKFRSCNTDSCPKGTQDFREKQCSDFNGKHLDISGIPSNVRWLPRYSGIGTKDRCKLYCQVAGTNYFYLLKDMVEDGTPCGTETHDICVQGQCMAAGCDHVLNSSAKIDKCGVCGGDNSSCKTITGVFNSSHYGYNVVVKIPAGATNVDIRQYSYSGQPDDSYLALSDAEGNFLFNGNFLLSTSKKEINVQGTRTVIEYSGSNNAVERINSTNRQEKELILQVLCVGNLYNPDVHYSFNIPLEERSDMFTWDPYGPWEGCTKMCQGLQRRNITCIHKSDHSVVSDKECDHLPLPSFVTQSCNTDCELRWHVIGKSECSSQCGQGYRTLDIHCMKYSIHEGQTVQVDDHYCGDQLKPPTQELCHGNCVFTRWHYSEWSQCSRSCGGGERSRESYCMNNFGHRLADNECQELSRVTRENCNEFSCPSWAASEWSECLVTCGKGTKQRQVWCQLNVDHLSDGFCNSSTKPESLSPCELHTCASWQVGPWGPCTTTCGHGYQMRDVKCVNELASAVLEDTECHEASRPSDRQSCVLTPCSFISKLETALLPTVLIKKMAQWRHGSWTPCSVSCGRGTQARYVSCRDALDRIADESYCAHLPRPAEIWDCFTPCGEWQAGDWSPCSASCGHGKTTRQVLCMNYHQPIDENYCDPEVRPLMEQECSLAACPPAHSHFPSSPVQPSYYLSTNLPLTQKLEDNENQVVHPSVRGNQWRTGPWGSCSSSCSGGLQHRAVVCQDENGQSASYCDAASKPPELQQCGPGPCPQWNYGNWGECSQTCGGGIKSRLVICQFPNGQILEDHNCEIVNKPPSVIQCHMHACPADVSWHQEPWTSEDLKVKLLPQRTIILWELMKNIFCHGKHSHMYLINVVTDHLLYPRHCDPETIETYFLSLWSLQFTWGDLKYYKNSL

SEQ ID NO: 358 - protein, 1504 aa, Homo sapiens [sequence omitted]

SEQ ID NO: 359 - protein, 634 aa, Homo sapiens
YSFNIPLEERSDMFTWDPYGPWEGCTKMCQGLQRRNITCIHKSDHSVVSDKECDHLPLPSFVTQSCNTDCELRWHVIGKSECSSQCGQGYRTLDIHCMKYSIHEGQTVQVDDHYCGDQLKPPTQELCHGNCVFTRWHYSEWSQCSRSCGGGERSRESYCMNNFGHRLADNECQELSRVTRENCNEFSCPSWAASEWSECLVTCGKGTKQRQVWCQLNVDHLSDGFCNSSTKPESLSPCELHTCASWQVGPWGPCTTTCGHGYQMRDVKCVNELASAVLEDTECHEASRPSDRQCSVSCGRGTQARYVSCRDALDRIADESYCAHLPRPAEIWDCFTPCGEWQAGDWSPCSASCGHGKTTRQVLCMNYHQPIDENYCDPEVRPLMEQECSLAACPPAHSHFPSSPVQPSYYLSTNLPLTQKLEDNENQVVHPSVRGNQWRTGPWGSCSSSCSGGLQHRAVVCQDENGQSASYCDAASKPPELQQCGPGPCPQWNYGNWGECSQTCGGGIKSRLVICQFPNGQILEDHNCEIVNKPPSVIQCHMHACPADVSWHQEPWTSEDLKVKLLPQRTIILWELMKNIFCHGKHSHMYLINVVTDHLLYPRHCDPETIETYFLSLWSLQFTWGDLKYYKNSL

SEQ ID NO: 360 - protein, 1205 aa, Homo sapiens
MVLLSLWLIAAALVEVRTSADGQAGNEEMVQIDLPIKRYREYELVTPVSTNLEGRYLSHTLSASHKKRSARDVSSNPEQLFFNITAFGKDFHLRLKPNTQLVAPGAVVEWHETSLVPGNITDPINNHQPGSATYRIRRTEPLQTNCAYVGDIVDIPGTSVAISNCDGLAGMIKSDNEEYFIEPLERGKQMEEEKGRIHVVYKRSAVEQAPIDMSKDFHYRESDLEGLDDLGTVYGNIHQQLNETMRRRRHAGENDYNIEVLLGVDDSVVRFHGKEHVQNYLLTLMNIVNEIYHDESLGVHINVVLVRMIMLGYAKSISLIERGNPSRSLENVCRWASQQQRSDLNHSEHHDHAIFLTRQDFGPAGMQGYAPVTGMCHPVRSCTLNHEDGFSSAFVVAHETGHVLGMEHDGQGNRCGDETAMGSVMAPLVQAAFHRYHWSRCSGQELKRYIHSYDCLLDDPFDHDWPKLPELPGINYSMDEQCRFDFGVGYKMCTAFRTFDPCKQLWCSHPDNPYFCKTKKGPPLDGTECAAGKWCYKGHCMWKNANQQKQDGNWGSWTKFGSCSRTCGTGVRFRTRQCNNPMPINGGQDCPGVNFEYQLCNTEECQKHFEDFRAQQCQQRNSHFEYQNTKHHWLPYEHPDPKKRCHLYCQSKETGDVAYMKQLVHDGTHCSYKDPYSICVRGECVKVGCDKEIGSNKVEDKCGVCGGDNSHCRTVKGTFTRTPRKLGYLKMFDIPPGARHVLIQEDEASPHILAIKNQATGHYILNGKGEEAKSRTFIDLGVEWDYNIEDDIESLHTDGPLHDPVIVLIIPQENDTRSSLTYKYIIHEDSVPTINSNNVIQEELDTFEWALKSWSQCSKPCGGGFQYTKYGCRRKSDNKMVHRSFCEANKKPKPIRRMCNIQECTHPLWVAEEWEHCTKTCGSSGYQLRTVRCLQPLLDGTNRSVHSKYCMGDRPESRRPCNRVPCPAQWKTGPWSECSVTCGEGTEVRQVLCRAGDHCDGEKPESVRACQLPPCNDEPCLGDKSIFCQMEVLARYCSIPGYNKLCCESCSKRSSTLPPPYLLEAAETHDDVISNPSDLPRSLVMPTSLVPYHSETPAKKMSLSSISSVGGPNAYAAFRPNSKPDGANLRQRSAQQAGSKTVRLVTVPSSPPTKRVHLSSASQMAAASFFAASDSIGASSQARTSKKDGKIIDNRRPTRSSTLER

SEQ ID NO: 361 - protein, 1205 aa, Homo sapiens; identical to SEQ ID NO: 360

SEQ ID NO: 362 - protein, 930 aa, Homo sapiens
MLLGWASLLLCAFRLPLAAVGPAATPAQDKAGQPPTAAAAAQPRRRQGEEVQERAEPPGHPHPLAQRRRSKGLVQNIDQLYSGGGKVGYLVYAGGRRFLLDLERDGSVGIAGFVPAGGGTSAPWRHRSHCFYRGTVDGSPRSLAVFDLCGGLDGFFAVKHARYTLKPLLRGPWAEEEKGRVYGDGSARILHVYTREGFSFEALPPRASCETPASTPEAHEHAPAHSNPSGRAALASQLLDQSALSPAGGSGPQTWWRRRRRSISRARQVELLLVADASMARLYGRGLQHYLLTLASIANRLYSHASIENHIRLAVVKVVVLGDKDKSLEVSKNAATTLKNFCKWQHQHNQLGDDHEEHYDAAILFTREDLCGHHSCDTLGMADVGTICSPERSCAVIEDDGLHAAFTVAHEIGHLLGLSHDDSKFCEETFGSTEDKRLMSSILTSIDASKPWSKCTSATITEFLDDGHGNCLLDLPRKQILGPEELPGQTYDATQQCNLTFGPEYSVCPGMDVCARLWCAVVRQGQMVCLTKKLPAVEGTPCGKGRICLQGKCVDKTKKKYYSTSSHGNWGSWGSWGQCSRSCGGGVQFAYRHCNNPAPRNNGRYCTGKRAIYRSCSLMPCPPNGKSFRHEQCEAKNGYQSDAKGVKTFVEWVPKYAGVLPADVCKLTCRAKGTGYYVVFSPKVTDGTECRLYSNSVCVRGKCVRTGCDGIIGSKLQYDKCGVCGGDNSSCTKIVGTFNKKSKGYTDVVRIPEGATHIKVRQFKAKDQTRFTAYLALKKKNGEYLINGKYMISTSETIIDINGTVMNYSGWSHRDDFLHGMGYSATKEILIVQILATDPTKPLDVRYSFFVPKKSTPKVNSVTSHGSNKVGSHTSQPQWVTGPWLACSRTCDTGWHTRTVQCQDGNRKLAKGCPLSQRPSAFKQCLLKKC

SEQ ID NO: 363 - protein, 292 aa, Homo sapiens
MEILWKTLTWILSLIMASSEFHSDHRLSYSSQEEFLTYLEHYQLTIPIRVDQNGAFLSFTVKNDKHSRRRRSMDPIDPQQAVSKLFFKLSAYGKHFHLNLTLNTDFVSKHFTVEYWGKDGPQWKHDFLDNCHYTGYLQDQRSTTKVALSNCVGLHGVIATEDEEYFIEPLKNTTEDSKHFSYENGHPHVIYKKSALQQRHLYDHSHCGVSDFTRSGKPWWLNDTSTVSYSLPINNTHIHHRQKRSVSIERFVETLVVADKMMVGYHGRKDIEHYILSVMNIVRLPNFTVIPA

SEQ ID NO: 364 - protein, 1117 aa, Homo sapiens
MEILWKTLTWILSLIMASSEFHSDHRLSYSSQEEFLTYLEHYQLTIPIRVDQNGAFLSFTVKNDKHSRRRRSMDPIDPQQAVSKLFFKLSAYGKHFHLNLTLNTDFVSKHFTVEYWGKDGPQWKHDFLDNCHYTGYLQDQRSTTKVALSNCVGLHGVIATEDEEYFIEPLKNTTEDSKHFSYENGHPHVIYKKSALQQRHLYDHSHCGVSDFTRSGKPWWLNDTSTVSYSLPINNTHIHHRQKRSVSIERFVETLVVADKMMVGYHGRKDIEHYILSVMNIVAKLYRDSSLGNVVNIIVARLIVLTEDQPNLEINHHADKSLDSFCKWQKSILSHQSDGNTIPENGIAHHDNAVLITRYDICTYKNKPCGTLGLASVAGMCEPERSCSINEDIGLGSAFTIAHEIGHNFGMNHDGIGNSCGTKGHEAAKLMAAHITANTNPFSWSACSRDYITSFLDSGRGTCLDNEPPKRDFLYPAVAPGQVYDADEQCRFQYGATSRQCKYGEVCRELWCLSKSNRCVTNSIPAAEGTLCQTGNIEKGWCYQGDCVPFGTWPQSIDGGWGPWSLWGECSRTCGGGVSSSLRHCDSPAPSGGGKYCLGERKRYRSCNTDPCPLGSRDFREKQCADFDNMPFRGKYYNWKPYTGGGVKPCALNCLAEGYNFYTERAPAVIDGTQCNADSLDICINGECKHVGCDNILGSDAREDRCRVCGGDGSTCDAIEGFFNDSLPRGGYMEVVQIPRGSVHIEVREVAMSKNYIALKSEGDDYYINGAWTIDWPRKFDVAGTAFHYKRPTDEPESLEALGPTSENLIVMVLLQEQNLGIRYKFNVPITRTGSGDNEVGFTWNHQPWSECSATCAGGVQRQEVVCKRLDDNSIVQNNYCDPDSKPPENQRACNTEPCPPEWFIGDWLECSKTCDGGMRTRAVLCIRKIGPSEEETLDYSGCLTHRPVEKEPCNNQSCPPQWVALDWSECTPKCGPGFKHRIVLCKSSDLSKTFPAAQCPEESKPPVRIRCSLGRCPPPRWVTGDWGQCSAQCGLGQQMRTVQCLSYTGQASSDCLETVRPPSMQQCESKCDSTPISNTEECKDVNKVAYCPLVLKFKFCSRAYFRQMCCKTCQGH

SEQ ID NO: 365 - protein, 1686 aa, Homo sapiens
MPGGPSPRSPAPLLRPLLLLLCALAPGAPGPAPGRATEGRAALDIVHPVRVDAGGSFLSYELWPRALRKRDVSVRRDAPAFYELQYRGRELRFNLTANQHLLAPGFVSETRRRGGLGRAHIRAHTPACHLLGEVQDPELEGGLAAISACDGLKGVFQLSNEDYFIEPLDSAPARPGHAQPHVVYKRQAPERLAQRGDSSAPSTCGVQVYPELESRRERWEQRQQWRRPRLRRLHQRSVSKEKWVETLVVADAKMVEYHGQPQVESYVLTIMNMVAGLFHDPSIGNPIHITIVRLVLLEDEEEDLKITHHADNTLKSFCKWQKSINMKGDAHPLHHDTAILLTRKDLCAAMNRPCETLGLSHVAGMCQPHRSCSINEDTGLPLAFTVAHELGHSFGIQHDGSGNDCEPVGKRPFIMSPQLLYDAAPLTWSRCSRQYITRFLDRGWGLCLDDPPAKDIIDFPSVPPGVLYDVSHQCRLQYGAYSAFCEDMDNVCHTLWCSVGTTCHSKLDAAVDGTRCGENKWCLSGECVPVGFRPEAVDGGWSGWSAWSICSRSCGMGVQSAERQCTQPTPKYKGRYCVGERKRFRLCNLQACPAGRPSFRHVQCSHFDAMLYKGQLHTWVPVVNDVNPCELHCRPANEYFAEKLRDAVVDGTPCYQVRASRDLCINGICKNVGCDFEIDSGAMEDRCGVCHGNGSTCHTVSGTFEEAEGLGYVDVGLIPAGAREIRIQEVAEAANFLALRSEDPEKYFLNGGWTIQWNGDYQVAGTTFTYARRGNWENLTSPGPTKEPVWIQLLFQESNPGVHYEYTIHREAGGHDEVPPPVFSWHYGPWTKCTVTCGRGVQRQNVYCLERQAGPVDEEHCDPLGRPDDQQRKCSEQPCPARWWAGEWQLCSSSCGPGGLSRRAVLCIRSVGLDEQSALEPPACEHLPRPPTETPCNRHVPCPATWAVGNWSQCSVTCGEGTQRRNVLCTNDTGVPCDEAQQPASEVTCSLPLCRWPLGTLGPEGSGSGSSSHELFNEADFIPHHLAPRPSPASSPKPGTMGNAIEEEAPELDLPGPVFVDDFYYDYNFINFHEDLSYGPSEEPDLDLAGTGDRTPPPHSHPAAPSTGSPVPATEPPAAKEEGVLGPWSPSPWPSQAGRSPPPPSEQTPGNPLINFLPEEDTPIGAPDLGLPSLSWPRVSTDGLQTPATPESQNDFPVGKDSQSQLPPPWRDRTNEVFKDDEEPKGRGAPHLPPRPSSTLPPLSPVGSTHSSPSPDVAELWTGGTVAWEPALEGGLGPVDSELWPTVGVASLLPPPIAPLPEMKVRDSSLEPGTPSFPTPGPGSWDLQTVAVWGTFLPTTLTGLGHMPEPALNPGPKGQPESLSPEVPLSSRLLSTPAWDSPANSHRVPETQPLAPSLAEAGPPADPLVVRNAGWQAGNWSECSTTCGLGAVWRPVRCSSGRDEDCAPAGRPQPARRCHLRPCATWHSGNWSKCSRSCGGGSSVRDVQCVDTRDLRPLRPFHCQPGPAKPPAHRPCGAQPCLSWYTSSWRECSEACGGGEQQRLVTCPEPGLCEEALRPNTTRPCNTHPCTQWVVGPWGQCSGPCGGGVQRRLVKCVNTQTGLPEEDSDQCGHEAWPESSRPCGTEDCEPVEPPRCERDRLSFGFCETLRLLGRCQLPTIRTQCCRSCSPPSHGAPSRGHQRVARR

SEQ ID NO: 366 - protein, 889 aa, Homo sapiens
MLPAPAAPRWPPLLLLLLLLLPLARGAPARPAAGGQASELVVPTRLPGSAGELALHLSAFGKGFVLRLAPDDSFLAPEFKIERLGGSGRATGGERGLRGCFFSGTVNGEPESLAAVSLCRGLSGSFLLDGEEFTIQPQGAGGSLAQPHRLQRWGPAGARPLPRGPEWEVETGEGQRQERGDHQEDSEEESQEEEAEGASEPPPPLGATSRTKRFVSEARFVETLLVADASMAAFYGADLQNHILTLMSVAARIYKHPSIKNSINLMVVKVLIVEDEKWGPEVSDNGGLTLRNFCNWQRRFNQPSDRHPEHYDTAILLTRQNFCGQEGLCDTLGVADIGTICDPNKSCSVIEDEGLQAAHTLAHELGHVLSMPHDDSKPCTRLFGPMGKHHVMAPLFVHLNQTLPWSPCSAMYLTELLDGGHGDCLLDAPAAALPLPTGLPGRMALYQLDQQCRQIFGPDFRHCPNTSAQDVCAQLWCHTDGAEPLCHTKNGSLPWADGTPCGPGHLCSEGSCLPEEEVERPKPVADGGWAPWGPWGECSRTCGGGVQFSHRECKDPEPQNGGRYCLGRRAKYQSCHTEECPPDGKSFREQQCEKYNAYNYTDMDGNLLQWVPKYAGVSPRDRCKLFCRARGRSEFKVFEAKVIDGTLCGPETLAICVRGQCVKAGCDHVVDSPRKLDKCGVCGGKGNSCRKVSGSLTPTNYGYNDIVTIPAGATNIDVKQRSHPGVQNDGNYLALKTADGQYLLNGNLAISAIEQDILVKGTILKYSGSIATLERLQSFRPLPEPLTVQLLTVPGEVFPPKVKYTFFVPNDVDFSMQSSKERATTNIIQPLLHAQWVLGDWSECSSTCGAGWQRRTVECRDPSGQASATCNKALKPEDAKPCESQLCPL

SEQ ID NO: 367 - protein, 69 aa, Homo sapiens
AKCPQGRFSINLYGTGLSLTESARWISQGNYAVSDIKKSPDGTRVVGKCGGYCGKCTPSSGTGLEVRVL

SEQ ID NO: 368 - protein, 1907 aa, Homo sapiens
MQFVSWATLLTLLVRDLAEMGSPDAAAAVRKDRLHPRQVKLLETLSEYEIVSPIRVNALGEPFPTNVHFKRTRRSINSATDPWPAFASSSSSSTSSQAHYRLSAFGQQFLFNLTANAGFIAPLFTVTLLGTPGVNQTKFYSEEEAELKHCFYKGYVNTNSEHTAVISLCSGMLGTFRSHDGDYFIEPLQSMDEQEDEEEQNKPHIIYRRSAPQREPSTGRHACDTSEHKNRHSKDKKKTRARKWGERINLAGDVAALNSGLATEAFSAYGNKTDNTREKRTHRRTKRFLSYPRFVEVLVVADNRMVSYHGENLQHYILTLMSIDGPSISFNAQTTLKNFCQWQHSKNSPGGIHHDTAVLLTRQDICRAHDKCDTLGLAELGTICDPYRSCSISEDSGLSTAFTIAHELGHVFNMPHDDNNKCKEEGVKSPQHVMAPTLNFYTNPWMWSKCSRKYITEFLDTGYGECLLNEPESRPYPLPVQLPGILYNVNKQCELIFGPGSQVCPYMMQCRRLWCNNVNGVHKGCRTQHTPWADGTECEPGKHCKYGFCVPKEMDVPVTDGSWGSWSPFGTCSRTCGGGIKTAIRECNRPEPKNGGKYCVGRRMKFKSCNTEPCLKQKRDFRDEQCAHFDGKHFNINGLLPNVRWVPKYSGILMKDRCKLFCRVAGNTAYYQLRDRVIDGTPCGQDTNDICVQGLCRQAGCDHVLNSKARRDKCGVCGGDNSSCKTVAGTFNTVHYGYNTVVRIPAGATNIDVRQHSFSGETDDDNYLALSSSKGEFLLNGNFVVTMAKREIRIGNAVVEYSGSETAVERINSTDRIEQELLLQVLSVGKLYNPDVRYSFNIPIEDKPQQFYWNSHGPWQACSKPCQGERKRKLVCTRESDQLTVSDQRCDRLPQPGHITEPCGTDCDLRWHVASRSECSAQCGLGYRTLDIYCAKYSRLDGKTEKVDDGFCSSHPKPSNREKCSGECNTGGWRYSAWTECSKSCDGGTQRRRAICVNTRNDVLDDSKCTHQEKVTIQRCSEFPCPQWKSGDWSECLVTCGKGHKHRQVWCQFGEDRLNDRMCDPETKPTSMQTCQQPECASWQAGPWGQCSVTCGQGYQLRAVKCIIGTYMSVVDDNDCNAATRPTDTQDCELPSCHPPPAAPETRRSTYSAPRTQWRFGSWTPCSATCGKGTRMRYVSCRDENGSVADESACATLPRPVAKEECSVTPCGQWKALDWSSCSVTCGQGRATRQVMCVNYSDHVIDRSECDQDYIPETDQDCSMSPCPQRTPDSGLAQHPFQNEDYRPRSASPSRTHVLGGNQWRTGPWGACSSTCAGGSQRRVVVCQDENGYTANDCVERIKPDEQRACESGPCPQWAYGNWGECTKLCGGGIRTRLVVCQRSNGERFPDLSCEILDKPPDREQCNTHACPHDAAWSTGPWSSCSVSCGRGHKQRNVYCMAKDGSHLESDYCKHLAKPHGHRKCRGGRCPKWKAGAWSQCSVSCGRGVQQRHVGCQIGTHKIARETECNPYTRPESERDCQGPRCPLYTWRAEEWQECTKTCGEGSRYRKVVCVDDNKNEVHGARCDVSKRPVDRESCSLQPCEYVWITGEWSECSVTCGKGYKQRLVSCSEIYTGKENYEYSYQTTINCPGTQPPSVHPCYLRDCPVSATWRVGNWGSCSVSCGVGVMQRSVQCLTNEDQPSHLCHTDLKPEERKTCRNVYNCELPQNCKEVKRLKGASEDGEYFLMIRGKLLKIFCAGMHSDHPKEYVTLVHGDSENFSEVYGHRLHNPTECPYNGSRRDDCQCRKDYTAAGFSSFQKIRIDLTSMQIITTDLQFARTSEGHPVPFATAGDCYSAAKCPQGRFSINLYGTGLSLTESARWISQGNYAVSDIKKSPDGTRVVGKCGGYCGKCTPSSGTGLEVRVL

SEQ ID NO: 369 - protein, 1935 aa, Homo sapiens
MQFVSWATLLTLLVRDLAEMGSPDAAAAVRKDRLHPRQVKLLETLSEYEIVSPIRVNALGEPFPTNVHFKRTRRSINSATDPWPAFASSSSSSTSSQAHYRLSAFGQQFLFNLTANAGFIAPLFTVTLLGTPGVNQTKFYSEEEAELKHCFYKGYVNTNSEHTAVISLCSGMLGTFRSHDGDYFIEPLQSMDEQEDEEEQNKPHIIYRRSAPQREPSTGRHACDTSEHKNRHSKDKKKTRARKWGERINLAGDVAALNSGLATEAFSAYGNKTDNTREKRTHRRTKRFLSYPRFVEVLVVADNRMVSYHGENLQHYILTLMSIVASIYKDPSIGNLINIVIVNLIVIHNEQDGPSISFNAQTTLKNFCQWQHSKNSPGGIHHDTAVLLTRQDICRAHDKCDTLGLAELGTICDPYRSCSISEDSGLSTAFTIAHELGHVFNMPHDDNNKCKEEGVKSPQHVMAPTLNFYTNPWMWSKCSRKYITEFLDTGYGECLLNEPESRPYPLPVQLPGILYNVNKQCELIFGPGSQVCPYMMQCRRLWCNNVNGVHKGCRTQHTPWADGTECEPGKHCKYGFCVPKEMDVPVTDGSWGSWSPFGTCSRTCGGGIKTAIRECNRPEPKNGGKYCVGRRMKFKSCNTEPCLKQKRDFRDEQCAHFDGKHFNINGLLPNVRWVPKYSGILMKDRCKLFCRVAGNTAYYQLRDRVIDGTPCGQDTNDICVQGLCRQAGCDHVLNSKARRDKCGVCGGDNSSCKTVAGTFNTVHYGYNTVVRIPAGATNIDVRQHSFSGETDDDNYLALSSSKGEFLLNGNFVVTMAKREIRIGNAVVEYSGSETAVERINSTDRIEQELLLQVLSVGKLYNPDVRYSFNIPIEDKPQQFYWNSHGPWQACSKPCQGERKRKLVCTRESDQLTVSDQRCDRLPQPGHITEPCGTDCDLRWHVASRSECSAQCGLGYRTLDIYCAKYSRLDGKTEKVDDGFCSSHPKPSNREKCSGECNTGGWRYSAWTECSKSCDGGTQRRRAICVNTRNDVLDDSKCTHQEKVTIQRCSEFPCPQWKSGDWSECLVTCGKGHKHRQVWCQFGEDRLNDRMCDPETKPTSMQTCQQPECASWQAGPWGQCSVTCGQGYQLRAVKCIIGTYMSVVDDNDCNAATRPTDTQDCELPSCHPPPAAPETRRSTYSAPRTQWRFGSWTPCSATCGKGTRMRYVSCRDENGSVADESACATLPRPVAKEECSVTPCGQWKALDWSSCSVTCGQGRATRQVMCVNYSDHVIDRSECDQDYIPETDQDCSMSPCPQRTPDSGLAQHPFQNEDYRPRSASPSRTHVLGGNQWRTGPWGACSSTCAGGSQRRVVVCQDENGYTANDCVERIKPDEQRACESGPCPQWAYGNWGECTKLCGGGIRTRLVVCQRSNGERFPDLSCEILDKPPDREQCNTHACPHDAAWSTGPWSSCSVSCGRGHKQRNVYCMAKDGSHLESDYCKHLAKPHGHRKCRGGRCPKWKAGAWSQCSVSCGRGVQQRHVGCQIGTHKIARETECNPYTRPESERDCQGPRCPLYTWRAEEWQECTKTCGEGSRYRKVVCVDDNKNEVHGARCDVSKRPVDRESCSLQPCEYVWITGEWSECSVTCGKGYKQRLVSCSEIYTGKENYEYSYQTTINCPGTQPPSVHPCYLRDCPVSATWRVGNWGSCSVSCGVGVMQRSVQCLTNEDQPSHLCHTDLKPEERKTCRNVYNCELPQNCKEVKRLKGASEDGEYFLMIRGKLLKIFCAGMHSDHPKEYVTLVHGDSENFSEVYGHRLHNPTECPYNGSRRDDCQCRKDYTAAGFSSFQKIRIDLTSMQIITTDLQFARTSEGHPVPFATAGDCYSAAKCPQGRFSINLYGTGLSLTESARWISQGNYAVSDIKKSPDGTRVVGKCGGYCGKCTPSSGTGLEVRVL

SEQ ID NO: 370 - protein, 488 aa, Homo sapiens
MQFVSWATLLTLLVRDLAEMGSPDAAAAVRKDRLHPRQVKLLETLSEYEIVSPIRVNALGEPFPTNVHFKRTRRSINSATDPWPAFASSSSSSTSSQAHYRLSAFGQQFLFNLTANAGFIAPLFTVTLLGTPGVNQTKFYSEEEAELKHCFYKGYVNTNSEHTAVISLCSGMLGTFRSHDGDYFIEPLQSMDEQEDEEEQNKPHIIYRRSAPQREPSTGRHACDTSEHKNRHSKDKKKTRARKWGERINLAGDVAALNSGLATEAFSAYGNKTDNTREKRTHRRTKRFLSYPRFVEVLVVADNRMVSYHGENLQHYILTLMSIVASIYKDPSIGNLINIVIVNLIVIHNEQDGPSISFNAQTTLKNFCQWQHSKNSPGGIHHDTAVLLTRQDICRAHDKCDTLGLAELGTICDPYRSCSISEDSGLSTAFTIAHELGHVFNMPHDDNNKCKEEGVKSPQHVMAPTLNFYTNPWMWSKCSRKYITEFLE

SEQ ID NO: 371 - protein, 991 aa, Homo sapiens
  SITE 1: note = misc_feature - Xaa can be any naturally occurring amino acid
XECSAQCGLGYRTLDIYCAKYSRLDGKTEKVDDGFCSSHPKPSNREKCSGECNTGGWRYSAWTECSKSCDGGTQRRRAICVNTRNDVLDDSKCTHQEKVTIQRCSEFPCPQWKSGDWSECLVTCGKGHKHRQVWCQFGEDRLNDRMCDPETKPTSMQTCQQPECASWQAGPWGQCSVTCGQGYQLRAVKCIIGTYMSVVDDNDCNAATRPTDTQDCELPSCHPPPAAPETRRSTYSAPRTQWRFGSWTPCSATCGKGTRMRYVSCRDENGSVADESACATLPRPVAKEECSVTPCGQWKALDWSSCSVTCGQGRATRQVMCVNYSDHVIDRSECDQDYIPETDQDCSMSPCPQRTPDSGLAQHPFQNEDYRPRSASPSRTHVLGGNQWRTGPWGACSSTCAGGSQRRVVVCQDENGYTANDCVERIKPDEQRACESGPCPQWAYGNWGECTKLCGGGIRTRLVVCQRSNGERFPDLSCEILDKPPDREQCNTHACPHDAAWSTGPWSSCSVSCGRGHKQRNVYCMAKDGSHLESDYCKHLAKPHGHRKCRGGRCPKWKAGAWSQCSVSCGRGVQQRHVGCQIGTHKIARETECNPYTRPESERDCQGPRCPLYTWRAEEWQECTKTCGEGSRYRKVVCVDDNKNEVHGARCDVSKRPVDRESCSLQPCEYVWITGEWSECSVTCGKGYKQRLVSCSEIYTGKENYEYSYQTTINCPGTQPPSVHPCYLRDCPVSATWRVGNWGSCSVSCGVGVMQRSVQCLTNEDQPSHLCHTDLKPEERKTCRNVYNCELPQNCKEVKRLKGASEDGEYFLMIRGKLLKIFCAGMHSDHPKEYVTLVHGDSENFSEVYGHRLHNPTECPYNGSRRDDCQCRKDYTAAGFSSFQKIRIDLTSMQIITTDLQFARTSEGHPVPFATAGDCYSAAKCPQGRFSINLYGTGLSLTESARWISQGNYAVSDIKKSPDGTRVVGKCGGYCGKCTPSSGTGLEVRVL

SEQ ID NO: 372 - protein, 127 aa, Homo sapiens
MARLEAPQCPGFLARLLGGTWCLLCIAGQVCGDQSQGAVFLREFTLIRRESLHEDFLSDLLNSHKTEDSSSRTARSEEDRDGLWDAWGPWSECSRTCGGGASYSLRRCLSSKSCEGRNIRYRTCSNV

SEQ ID NO: 373 - protein, 219 aa, Homo sapiens
MECCRRATPGTLLLFLAFLLLSSRTARSEEDRDGLWDAWGPWSECSRTCGGGASYSLRRCLSSKSCEGRNIRYRTCSNVDCPPEAGDFRAQQCSAHNDVKHHGQFYEWLPVSNDPDNPCSLKCQAKGTTLVVELAPKVLDGTRCYTESLDMCISGLCQIVGCDHQLGSTVKEDNCGVCNGDGSTCRLVRGQYKSQLSATKCKTHRDGRPLDLLTYPLLA

SEQ ID NO: 374 - protein, 683 aa, Homo sapiens
MECCRRATPGTLLLFLAFLLLSSRTARSEEDRDGLWDAWGPWSECSRTCGGGASYSLRRCLSSKSCEGRNIRYRTCSNVDCPPEAGDFRAQQCSAHNDVKHHGQFYEWLPVSNDPDNPCSLKCQAKGTTLVVELAPKVLDGTRCYTESLDMCISGLCQIVGCDHQLGSTVKEDNCGVCNGDGSTCRLVRGQYKSQLSATKSDDTVVAIPYGSRHIRLVLKGPDHLYLETKTLQGTKGENSLSSTGTFLVDNSSVDFQKFPDKEILRMAGPLTADFIVKIRNSGSADSTVQFIFYQPIIHRWRETDFFPCSATCGGGYQLTSAECYDLRSNRVVADQYCHYYPENIKPKPKLQECNLDPCPASDGYKQIMPYDLYHPLPRWEATPWTACSSSCGGGIQSRAVSCVEEDIQGHVTSVEEWKCMYTPKMPIAQPCNIFDCPKWLAQEWSPCTVTCGQGLRYRVVLCIDHRGMHTGGCSPKTKPHIKEECIVPTPCYKPKEKLPVEAKLPWFKQAQELEEGAAVSEEPSFIPEAWSACTVTCGVGTQVRIVRCQVLLSFSQSVADLPIDECEGPKPASQRACYAGPCSGEIPEFNPDETDGLFGGLQDFDELYDWEYEGFTKCSESCGGGVQEAVVSCLNKQTREPAEENLCVTSRRPPQLLKSCNLDPCPARSSIDSAWNACNVLC

SEQ ID NO: 375 - protein, 525 aa, Homo sapiens
MECCRRATPGTLLLFLAFLLLSSRTARSEEDRDGLWDAWGPWSECSRTCGGGASYSLRRCLSSKSCEGRNIRYRTCSNVDCPPEAGDFRAQQCSAHNDVKHHGQFYEWLPVSNDPDNPCSLKCQAKGTTLVVELAPKVLDGTRCYTESLDMCISGLCQIVGCDHQLGSTVKEDNCGVCNGDGSTCRLVRGQYKSQLSATKSDDTVVAIPYGSRHIRLVLKGPDHLYLETKTLQGTKGENSLSSTGTFLVDNSSVDFQKFPDKEILRMAGPLTADFIVKIRNSGSADSTVQFIFYQPIIHRWRETDFFPCSATCGGGYQLTSAECYDLRSNRVVADQYCHYYPENIKPKPKLQECNLDPCPASDGYKQIMPYDLYHPLPRWEATPWTACSSSCGGGIQSRAVSCVEEDIQGHVTSVEEWKCMYTPKMPIAQPCNIFDCPKWLAQEWSPCTVTCGQGLRYRVVLCIDHRGMHTGGCSPKTKPHIKEECIVPTPCYKPKEKLPVEAKLPWFKQAQELEEGAAVSEEPS

SEQ ID NO: 376 - protein, 1762 aa, Homo sapiens
MECCRRATPGTLLLFLAFLLLSSRTARSEEDRDGLWDAWGPWSECSRTCGGGASYSLRRCLSSKSCEGRNIRYRTCSNVDCPPEAGDFRAQQCSAHNDVKHHGQFYEWLPVSNDPDNPCSLKCQAKGTTLVVELAPKVLDGTRCYTESLDMCISGLCQIVGCDHQLGSTVKEDNCGVCNGDGSTCRLVRGQYKSQLSATKSDDTVVAIPYGSRHIRLVLKGPDHLYLETKTLQGTKGENSLSSTGTFLVDNSSVDFQKFPDKEILRMAGPLTADFIVKIRNSGSADSTVQFIFYQPIIHRWRETDFFPCSATCGGGYQLTSAECYDLRSNRVVADQYCHYYPENIKPKPKLQECNLDPCPASDGYKQIMPYDLYHPLPRWEATPWTACSSSCGGGIQSRAVSCVEEDIQGHVTSVEEWKCMYTPKMPIAQPCNIFDCPKWLAQEWSPCTVTCGQGLRYRVVLCIDHRGMHTGGCSPKTKPHIKEECIVPTPCYKPKEKLPVEAKLPWFKQAQELEEGAAVSEEPSFIPEAWSACTVTCGVGTQVRIVRCQVLLSFSQSVADLPIDECEGPKPASQRACYAGPCSGEIPEFNPDETDGLFGGLQDFDELYDWEYEGFTKCSESCGGGVQEAVVSCLNKQTREPAEENLCVTSRRPPQLLKSCNLDPCPARWEIGKWSPCSLTCGVGLQTRDVFCSHLLSREMNETVILADELCRQPKPSTVQACNRFNCPPAWYPAQWQPCSRTCGGGVQKREVLCKQRMADGSFLELPETFCSASKPACQQACKKDDCPSEWLLSDWTECSTSCGEGTQTRSAICRKMLKTGLSTVVNSTLCPPLPFSSSIRPCMLATCARPGRPSTKHSPHIAAARKVYIQTRRQRKLHFVVGGFAYLLPKTAVVLRCPARRVRKPLITWEKDGQHLISSTHVTVAPFGYLKIHRLKPSDAGVYTCSAGPAREHFVIKLIGGNRKLVARPLSPRSEEEVLAGRKGGPKEALQTHKHQNGIFSNGSKAEKRGLAANPGSRYDDLVSRLLEQGGWPGELLASWEAQDSAERNTTSEEDPGAEQVLLHLPFTMVTEQRRLDDILGNLSQQPEELRDLYSKHLVAQLAQEIFRSHLEHQDTLLKPSERRTSPVTLSPHKHVSGFSSSLRTSSTGDAGGGSRRPHRKPTILRKISAAQQLSASEVVTHLGQTVALASGTLSVLLHCEAIGHPRPTISWARNGEEVQFSDRILLQPDDSLQILAPVEADVGFYTCNATNALGYDSVSIAVTLAGKPLVKTSRMTVINTEKPAVTVDIGSTIKTVQGVNVTINCQVAGVPEAEVTWFRNKSKLGSPHHLHEGSLLLTNVSSSDQGLYSCRAANLHGELTESTQLLILDPPQVPTQLEDIRALLAATGPNLPSVLTSPLGTQLVLDPGNSALLGCPIKGHPVPNITWFHGGQPIVTATGLTHHILAAGQILQVANLSGGSQGEFSCLAQNEAGVLMQKASLVIQDYWWSVDRLATCSASCGNRGVQQPRLRCLLNSTEVNPAHCAGKVRPAVQPIACNRRDCPSRWMVTSWSACTRSCGGGVQTRRVTCQKLKASGISTPVSNDMCTQVAKRPVDTQACNQQLCVEWAFSSWGQCNGPCIGPHLAVQHRQVFCQTRDGITLPSEQCSALPRPVSTQNCWSEACSVHWRVSLWTLCTATCGNYGFQSRRVECVHARTNKAVPEHLCSWGPRPANWQRCNITPCENMECRDTTRYCEKVKQLKLCQLSQFKSRCCGTCGKA

SEQ ID NO: 377 - protein, 439 aa, Homo sapiens
MECCRRATPGTLLLFLAFLLLSSRTARSEEDRDGLWDAWGPWSECSRTCGGGASYSLRRCLSSKSCEGRNIRYRTCSNVDCPPEAGDFRAQQCSAHNDVKHHGQFYEWLPVSNDPDNPCSLKCQAKGTTLVVELAPKVLDGTRCYTESLDMCISGLCQIVGCDHQLGSTVKEDNCGVCNGDGSTCRLVRGQYKSQLSATKSDDTVVAIPYGSRHIRLVLKGPDHLYLETKTLQGTKGENSLSSTGTFLVDNSSVDFQKFPDKEILRMAGPLTADFIVKIRNSGSADSTVQFIFYQPIIHRWRETDFFPCSATCGGGYQLTSAECYDLRSNRVVADQYCHYYPENIKPKPKLQECNLDPCPARWEATPWTACSSSCGGGIQSRAVSCVEEDIQGHVTSVEEWKCMYTPKMPIAQPCNIFDCPKWLAQEWSPVTVPSFFVH

SEQ ID NO: 378 - protein, 185 aa, Homo sapiens
MECCRRATPGTLLLFLAFLLLSSRTARSEEDRDGLWDAWGPWSECSRTCGGGASYSLRRCLSSKSCEGRNIRYRTCSNVDCPPEAGDFRAQQCSAHNDVKHHGQFYEWLPVSNDPDNPCSLKCQAKGTTLVVELAPKVLDGTRCYTESLDMCISGLCQVSADLFSFNLSRGFQCLCVNGLHSLTL

SEQ ID NO: 379 - protein, 258 aa, Homo sapiens
MSGVFCFFFFFLGVPEAEVTWFRNKSKLGSPHHLHEGSLLLTNVSSSDQGLYSCRAANLHGELTESTQLLILDPPQVPTQLEDIRALLAATGPNLPSVLTSPLGTQLVLDPGNSALLGCPIKGHPVPNITWFHGGQPIVTATGLTHHILAAGQILQVANLSGGSQGEFSCLAQNEAGVLMQKASLVIQDYWWSVDRLATCSASCGNRGVQQPRLRCLLNSTEVNPAHCAGKVRPAVQPIACNRRDCPSRAMGLASGLT

SEQ ID NO: 380 - protein, 463 aa, Homo sapiens
MSGVFCFFFFFLGVPEAEVTWFRNKSKLGSPHHLHEGSLLLTNVSSSDQGLYSCRAANLHGELTESTQLLILDPPQVPTQLEDIRALLAATGPNLPSVLTSPLGTQLVLDPGNSALLGCPIKGHPVPNITWFHGGQPIVTATGLTHHILAAGQILQVANLSGGSQGEFSCLAQNEAGVLMQKASLVIQDYWWSVDRLATCSASCGNRGVQQPRLRCLLNSTEVNPAHCAGKVRPAVQPIACNRRDCPSRWMVTSWSACTRSCGGGVQTRRVTCQKLKASGISTPVSNDMCTQVAKRPVDTQACNQQLCVEWAFSSWGQCNGPCIGPHLAVQHRQVFCQTRDGITLPSEQCSALPRPVSTQNCWSEACSVHWRVSLWTLCTATCGNYGFQSRRVECVHARTNKAVPEHLCSWGPRPANWQRCNITPCENMECRDTTRYCEKVKQLKLCQLSQFKSRCCGTCGKA

SEQ ID NO: 381 - protein, 275 aa, Homo sapiens
MSGVFCFFFFFLGVPEAEVTWFRNKSKLGSPHHLHEGSLLLTNVSSSDQGLYSCRAANLHGELTESTQLLILDPPQVPTQLEDIRALLAATGPNLPSVLTSPLGTQLVLDPGNSALLGCPIKGHPVPNITWFHGGQPIVTATGLTHHILAAGQILQVANLSGGSQGEFSCLAQNEAGVLMQKASLVIQVQWALHRASPSCATQTSLLPDTGWHHLTIRAVQCSSEACEHPELLVRGLQCTLESQPVDPVHSYLWQLRLPVPACGVCACPHQQGSA

SEQ ID NO: 382 - protein, 150 aa, Homo sapiens
TSPLGTQLVLDPGNSALLGCPIKGHPVPNITWFHGGQPIVTATGLTHHILAAGQILQVANLSGGSQGEFSCLAQNEAGVLMQKASLVIQDYWWSVDRLATCSASCGNRGVQQPRLRCLLNSTEVNPAHCAGKVRPAVQPIACNRRDCPSR

SEQ ID NO: 383 - protein, 951 aa, Homo sapiens
MDGRWQCSCWAWFLLVLAVVAGDTVSTGSTDNSPTSNSLEGGTDATAFWWGEWTKWTACSRSCGGGVTSQERHCLQQRRKSVPGPGNRTCTGTSKRYQLCRVQECPPDGRSFREEQCVSFNSHVYNGRTHQWKPLYPDDYVHISSKPCDLHCTTVDGQRQLMVPARDGTSCKLTDLRGVCVSGKCEPIGCDGVLFSTHTLDKCGICQGDGSSCTHVTGNYRKGNAHLGYSLVTHIPAGARDIQIVERKKSADVLALADEAGYYFFNGNYKVDSPKNFNIAGTVVKYRRPMDVYETGIEYIVAQGPTNQGLNVMVWNQNGKSPSITFEYTLLQPPHESRPQPIYYGFSESAESQGLDGAGLMGFVPHNGSLYGQASSERLGLDNRLFGHPGLDMELGPSQGQETNEVCEQAGGGACEGPPRGKGFRDRNVTGTPLTGDKDDEEVDTHFASQEFFSANAISDQLLGAGSDLKDFTLNETVNSIFAQGAPRSSLAESFFVDYEENEGAGPYLLNGSYLELSSDRVANSSSEAPFPNVSTSLLTSAGNRTHKARTRPKARKQGVSPADMYRWKLSSHEPCSATCTTGVMSAYAMCVRYDGVEVDDSYCDALTRPEPVHEFCAGRECQPRWETSSWSECSRTCGEGYQFRVVRCWKMLSPGFDSSVYSDLCEAAEAVRPEERKTCRNPACGPQWEMSEWSECTAKCGERSVVTRDIRCSEDEKLCDPNTRPVGEKNCTGPPCDRQWTVSDWGPCSGSCGQGRTIRHVYCKTSDGRVVPESQCQMETKPLAIHPCGDKNCPAHWLAQDWERCNTTCGRGVKKRLVLCMELANGKPQTRSGPECGLAKKPPEESTCFERPCFKWYTSPWSECTKTCGVGVRMRDVKCYQGTDIVRGCDPLVKPVGRQACDLQPCPTEPPDDSCQDQPGTNCALAIKVNLCGHWYYSKACCRSCRPPHS

SEQ ID NO: 384 - protein, 951 aa, Homo sapiens; identical to SEQ ID NO: 383

SEQ ID NO: 385 - protein, 1060 aa, Homo sapiens
MLFEVGEGGGAGEEGKGRGRPGRSLCTHAAPARTAHLAPSALRSARPFLWEDNLLTRSQGLPDNHDQLVPDNLEAWALAGPRGLFPKRTLVIWKRIGAGLVVTVALLPRMDGRWQCSCWAWFLLVLAVVAGDTVSTGSTDNSPTSNSLEGGTDATAFWWGEWTKWTACSRSCGGGVTSQERHCLQQRRKSVPGPGNRTCTGTSKRYQLCRVQECPPDGRSFREEQCVSFNSHVYNGRTHQWKPLYPDDYVHISSKPCDLHCTTVDGQRQLMVPARDGTSCKLTDLRGVCVSGKCEPIGCDGVLFSTHTLDKCGICQGDGSSCTHVTGNYRKGNAHLGYSLVTHIPAGARDIQIVERKKSADVLALADEAGYYFFNGNYKVDSPKNFNIAGTVVKYRRPMDVYETGIEYIVAQGPTNQGLNVMVWNQNGKSPSITFEYTLLQPPHESRPQPIYYGFSESAESQGLDGAGLMGFVPHNGSLYGQASSERLGLDNRLFGHPGLDMELGPSQGQETNEVCEQAGGGACEGPPRGKGFRDRNVTGTPLTGDKDDEEVDTHFASQEFFSANAISDQLLGAGSDLKDFTLNETVNSIFAQGAPRSSLAESFFVDYEENEGAGPYLLNGSYLELSSDRVANSSSEAPFPNVSTSLLTSAGNRTHKARTRPKARKQGVSPADMYRWKLSSHEPCSATCTTGVMSAYAMCVRYDGVEVDDSYCDALTRPEPVHEFCAGRECQPRWETSSWSECSRTCGEGYQFRVVRCWKMLSPGFDSSVYSDLCEAAEAVRPEERKTCRNPACGPQWEMSEWSECTAKCGERSVVTRDIRCSEDEKLCDPNTRPVGEKNCTGPPCDRQWTVSDWGPCSGSCGQGRTIRHVYCKTSDGRVVPESQCQMETKPLAIHPCGDKNCPAHWLAQDWERCNTTCGRGVKKRLVLCMELANGKPQTRSGPECGLAKKPPEESTCFERPCFKWYTSPWSECTKTCGVGVRMRDVKCYQGTDIVRGCDPLVKPVGRQACDLQPCPTEPPDDSCQDQPGTNCALAIKVNLCGHWYYSKACCRSCRPPHS

SEQ ID NO: 386 - protein, 1691 aa, Homo sapiens
MASWTSPWWVLIGMVFMHSPLPQTTAEKSPGAYFLPEFALSPQGSFLEDTTGEQFLTYRYDDQTSRNTRSDEDKDGNWDAWGDWSDCSRTCGGGASYSLRRCLTGRNCEGQNIRYKTCSNHDCPPDAEDFRAQQCSAYNDVQYQGHYYEWLPRYNDPAAPCALKCHAQGQNLVVELAPKVLDGTRCNTDSLDMCISGICQAVGCDRQLGSNAKEDNCGVCAGDGSTCRLVRGQSKSHVSPEKREENVIAVPLGSRSVRITVKGPAHLFIESKTLQGSKGEHSFNSPGVFLVENTTVEFQRGSERQTFKIPGPLMADFIFKTRYTAAKDSVVQFFFYQPISHQWRQTDFFPCTVTCGGGYQLNSAECVDIRLKRVVPDHYCHYYPENVKPKPKLKECSMDPCPSSDGFKEIMPYDHFQPLPRWEHNPWTACSVSCGGGIQRRSFVCVEESMHGEILQVEEWKCMYAPKPKVMQTCNLFDCPKWIAMEWSQCTVTCGRGLRYRVVLCINHRGEHVGGCNPQLKLHIKEECVIPIPCYKPKEKSPVEAKLPWLKQAQELEETRIATEEPTFIPEPWSACSTTCGPGVQVREVKCRVLLTFTQTETELPEEECEGPKLPTERPCLLEACDESPASRELDIPLPEDSETTYDWEYAGFTPCTATCVGGHQEAIAVCLHIQTQQTVNDSLCDMVHRPPAMSQACNTEPCPPRWHVGSWGPCSATCGVGIQTRDVYCLHPGETPAPPEECRDEKPHALQACNQFDCPPGWHIEEWQQCSRTCGGGTQNRRVTCRQLLTDGSFLNLSDELCQGPKASSHKSCARTDCPPHLAVGDWSKCSVSCGVGIQRRKQVCQRLAAKGRRIPLSEMMCRDLPGLPLVRSCQMPECSKIKSEMKTKLGEQGPQILSVQRVYIQTREEKRINLTIGSRAYLLPNTSVIIKCPVRRFQKSLIQWEKDGRCLQNSKRLGITKSGSLKIHGLAAPDIGVYRCIAGSAQETVVLKLIGTDNRLIARPALREPMREYPGMDHSEANSLGVTWHKMRQMWNNKNDLYLDDDHISNQPFLRALLGHCSNSAGSTNSWELKNKQFEAAVKQGAYSMDTAQFDELIRNMSQLMETGEVSDDLASQLIYQLVAELAKAQPTHMQWRGIQEETPPAAQLRGETGSVSQSSHAKNSGKLTFKPKGPVLMRQSQPPSISFNKTINSRIGNTVYITKRTEVINILCDLITPSEATYTWTKDGTLLQPSVKIILDGTGKIQIQNPTRKEQGIYECSVANHLGSDVESSSVLYAEAPVILSVERNITKPEHNHLSVVVGGIVEAALGANVTIRCPVKGVPQPNITWLKRGGSLSGNVSLLFNGSLLLQNVSLENEGTYVCIATNALGKAVATSVLHLLERRWPESRIVFLQGHKKYILQATNTRTNSNDPTGEPPPQEPFWEPGNWSHCSATCGHLGARIQRPQCVMANGQEVSEALCDHLQKPLAGFEPCNIRDCPARWFTSVWSQCSVSCGEGYHSRQVTCKRTKANGTVQVVSPRACAPKDRPLGRKPCFGHPCVQWEPGNRCPGRCMGRAVRMQQRHTACQHNSSDSNCDDRKRPTLRRNCTSGACDVCWHTGPWKPCTAACGRGFQSRKVDCIHTRSCKPVAKRHCVQKKKPISWRHCLGPSCDRDCTDTTHYCMFVKHLNLCSLDRYKQRCCQSCQEG

SEQ ID NO: 387 - protein, 1682 aa, Homo sapiens
MASWTSPWWVLIGMVFMHSPLPQTTAEKSPGAYFLPEFALSPQGSFLEDTTGEQFLTYRYDDQTSRNTRSDEDKDGNWDAWGDWSDCSRTCGGGASYSLRRCLTGRNCEGQNIRYKTCSNHDCPPDAEDFRAQQCSAYNDVQYQGHYYEWLPRYNDPAAPCALKCHAQGQNLVVELAPKVLDGTRCNTDSLDMCISGICQAVGCDRQLGSNAKEDNCGVCAGDGSTCRLVRGQSKSHVSPEKREENVIAVPLGSRSVRITVKGPAHLFIESKTLQGSKGEHSFNSPGVFLVENTTVEFQRGSERQTFKIPGPLMADFIFKTRYTAAKDSVVQFFFYQPISHQWRQTDFFPCTVTCGGGYQLNSAECVDIRLKRVVPDHYCHYYPENVKPKPKLKECSMDPCPSSDGFKEIMPYDHFQPLPRWEHNPWTACSVSCGGGIQRRSFVCVEESMHGEILQVEEWKCMYAPKPKVMQTCNLFDCPKWIAMEWSQCTVTCGRGLRYRVVLCINHRGEHVGGCNPQLKLHIKEECVIPIPCYKPKEKSPVEAKLPWLKQAQELEETRIATEEPTFIPEPWSACSTTCGPGVQVREVKCRVLLTFTQTETELPEEECEGPKLPTERPCLLEACDESPASRELDIPLPEDSETTYDWEYAGFTPCTATCVGGHQEAIAVCLHIQTQQTVNDSLCDMVHRPPAMSQACNTEPCPPRWHVGSWGPCSATCGVGIQTRDVYCLHPGETPAPPEECRDEKPHALQACNQFDCPPGWHIEEWQQCSRTCGGGTQNRRVTCRQLLTDGSFLNLSDELCQGPKASSHKSCARTDCPPHLAVGDWSKCSVSCGVGIQRRKQVCQRLAAKGRRIPLSEMMCRDLPGLPLVRSCQMPECSKIKSEMKTKLGEQGPQILSVQRVYIQTREEKRINLTIGSRAYLLPNTSVIIKCPVRRFQKSLIQWEKDGRCLQNSKRLGITKSGSLKIHGLAAPDIGVYRCIAGSAQETVVLKLIGTDNRLIARPALREPMREYPGMDHSEANSLGVTWHKMRQMWNNKNDLYLDDDHISNQPFLRALLGHCSNSAGSTNSWELKNKQFEAAVKQGAYSMDTAQFDELIRNMSQLMETGEVSDDLASQLIYQLVAELAKAQPTHMQWRGIQEETPPAAQLRGETGSVSQSSHAKNSGKLTFKPKGPVLMRQSQPPSISFNKTINSRIGNTVYITKRTEVINILCDLITPSEATYTWTKDGTLLQPSVKIILDGTGKIQIQNPTRKEQGIYECSVANHLGSDVESSSVLYAEAPVILSVERNITKPEHNHLSVVVGGIVEAALGANVTIRCPVKGVPQPNITWLKRGGSLSGNVSLLFNGSLLLQNVSLENEGTYVCIATNALGKAVATSVLHLLERRWPESRIVFLQGHKKYILQATNTRTNSNDPTGEPPPQEPFWEPGNWSHCSATCGHLGARIQRPQCVMANGQEVSEALCDHLQKPLAGFEPCNIRDCPARWFTSVWSQCSVSCGEGYHSRQVTCKRTKANGTVQVVSPRACAPKDRPLGRKPCFGHPCVQWEPGNRCPGRCMGRAVRMQQRHTACQHNSSDSNCDDRKRPTLRRNCTSGACDVCWHTGPWKPCTAACGRGFQSRKVDCIHTRSCKPVAKRHCVQKKKPISWRHCLGPSCDSTYTSQTATNKGAASHVKRDKPLEGS

SEQ ID NO: 388 - protein, 1074 aa, Homo sapiens
MENWTGRPWLYLLLLLSLPQLCLDQEVLSGHSLQTPTEEGQGPEGVWGPWVQWASCSQPCGVGVQRRSRTCQLPTVQLHPSLPLPPRPPRHPEALLPRGQGPRPQTSPETLPLYRTQSRGRGGPLRGPASHLGREETQEIRAARRSRLRDPIKPGMFGYGRVPFALPLHRNRRHPRSPPRSELSLISSRGEEAIPSPTPRAEPFSANGSPQTELPPTELSVHTPSPQAEPLSPETAQTEVAPRTRPAPLRHHPRAQASGTEPPSPTHSLGEGGFFRASPQPRRPSSQGWASPQVAGRRPDPFPSVPRGRGQQGQGPWGTGGTPHGPRLEPDPQHPGAWLPLLSNGPHASSLWSLFAPSSPIPRCSGESEQLRACSQAPCPPEQPDPRALQCAAFNSQEFMGQLYQWEPFTEVQGSQRCELNCRPRGFRFYVRHTEKVQDGTLCQPGAPDICVAGRCLSPGCDGILGSGRRPDGCGVCGGDDSTCRLVSGNLTDRGGPLGYQKILWIPAGALRLQIAQLRPSSNYLALRGPGGRSIINGNWAVDPPGSYRAGGTVFRYNRPPREEGKGESLSAEGPTTQPVDVYMIFQEENPGVFYQYVISSPPPILENPTPEPPVPQLQPEILRVEPPLAPAPRPARTPGTLQRQVRIPQMPAPPHPRTPLGSPAAYWKRVGHSACSASCGKGVWRPIFLCISRESGEELDERSCAAGARPPASPEPCHGTPCPPYWEAGEWTSCSRSCGPGTQHRQLQCRQEFGGGGSSVPPERCGHLPRPNITQSCQLRLCGHWEVGSPWSQCSVRCGRGQRSRQVRCVGNNGDEVSEQECASGPPQPPSREACDMGPCTTAWFHSDWSSKCSAECGTGIQRRSVVCLGSGAALGPGQGEAGAGTGQSCPTGSRPPDMRACSLGPCERTWRWYTGPWGECSSECGSGTQRRDIICVSKLGTEFNVTSPSNCSHLPRPPALQPCQGQACQDRWFSTPWSPCSRSCQGGTQTREVQCLSTNQTLSTRCPPQLRPSRKRPCNSQPCSQRPDDQCKDSSPHCPLVVQARLCVYPYYTATCCRSCAHVLERSPQDPS

SEQ ID NO: 389 - protein, 1097 aa, Homo sapiens
MENWTGRPWLYLLLLLSLPQLCLDQEVLSGHSLQTPTEEGQGPEGVWGPWVQWASCSQPCGVGVQRRSRTCQLPTVQLHPSLPLPPRPPRHPEALLPRGQGPRPQTSPETLPLYRTQSRGRGGPLRGPASHLGREETQEIRAARRSRLRDPIKPGMFGYGRVPFALPLHRNRRHPRSPPRSELSLISSRGEEAIPSPTPRAEPFSANGSPQTELPPTELSVHTPSPQAEPLSPETAQTEVAPRTRPAPLRHHPRAQASGTEPPSPTHSLGEGGFFRASPQPRRPSSQGWASPQVAGRRPDPFPSVPRGRGQQGQGPWGTGGTPHGPRLEPDPQHPGAWLPLLSNGPHASSLWSLFAPSSPIPRCSGESEQLRACSQAPCPPEQPDPRALQCAAFNSQEFMGQLYQWEPFTEAPLLPLRHAFFLLPGAGSGDSTGVQGSQRCELNCRPRGFRFYVRHTEKVQDGTLCQPGAPDICVAGRCLSPGCDGILGSGRRPDGCGVCGGDDSTCRLVSGNLTDRGGPLGYQKILWIPAGALRLQIAQLRPSSNYLALRGPGGRSIINGNWAVDPPGSYRAGGTVFRYNRPPREEGKGESLSAEGPTTQPVDVYMIFQEENPGVFYQYVISSPPPILENPTPEPPVPQLQPEILRVEPPLAPAPRPARTPGTLQRQVRIPQMPAPPHPRTPLGSPAAYWKRVGHSACSASCGKGVWRPIFLCISRESGEELDERSCAAGARPPASPEPCHGTPCPPYWEAGEWTSCSRSCGPGTQHRQLQCRQEFGGGGSSVPPERCGHLPRPNITQSCQLRLCGHWEVGSPWSQCSVRCGRGQRSRQVRCVGNNGDEVSEQECASGPPQPPSREACDMGPCTTAWFHSDWSSKCSAECGTGIQRRSVVCLGSGAALGPGQGEAGAGTGQSCPTGSRPPDMRACSLGPCERTWRWYTGPWGECSSECGSGTQRRDIICVSKLGTEFNVTSPSNCSHLPRPPALQPCQGQACQDRWFSTPWSPCSRSCQGGTQTREVQCLSTNQTLSTRCPPQLRPSRKRPCNSQPCSQRPDDQCKDSSPHCPLVVQARLCVYPYYTATCCRSCAHVLERSPQDPS

SEQ ID NO: 390 - protein, 1074 aa, Homo sapiens; identical to SEQ ID NO: 388

SEQ ID NO: 391 - protein, 877 aa, Homo sapiens
MENWTGRPWLYLLLLLSLPQLCLDQEVLSGHSLQTPTEEGQGPEGVWGPWVQWASCSQPCGVGVQRRSRTCQLPTVQLHPSLPLPPRPPRHPEALLPRGQGPRPQTSPETLPLYRTQSRGRGGPLRGPASHLGREETQEIRAARRSRLRDPIKPGMFGYGRVPFALPLHRNRRHPRSPPRSELSLISSRGEEAIPSPTPRAEPFSANGSPQTELPPTELSVHTPSPQAEPLSPETAQTEVAPRTRPAPLRHHPRAQASGTEPPSPTHSLGEGGFFRASPQPRRPSSQGWASPQVAGRRPDPFPSVPRGRGQQGQGPWGTGGTPHGPRLEPDPQHPGAWLPLLSNGPHASSLWSLFAPSSPIPRCSGESEQLRACSQAPCPPEQPDPRALQCAAFNSQEFMGQLYQWEPFTEVQGSQRCELNCRPRGFRFYVRHTEKVQDGTLCQPGAPDICVAGRCLSPGCDGILGSGRRPDGCGVCGGDDSTCRLVSGNLTDRGGPLGYQKILWIPAGALRLQIAQLRPSSNYLALRGPGGRSIINGNWAVDPPGSYRAGGTVFRYNRPPREEGKGESLSAEGPTTQPVDVYMIFQEENPGVFYQYVISSPPPILENPTPEPPVPQLQPEILRVEPPLAPAPRPARTPGTLQRQVRIPQMPAPPHPRTPLGSPAAYWKRVGHSACSASCGKGVWRPIFLCISRESGEELDERSCAAGARPPASPEPCHGTPCPPYWEAGEWTSCSRSCGPGTQHRQLQCRQEFGGGGSSVPPERCGHLPRPNITQSCQLRLCGHWEVGSPWSQCSVRCGRGQRSRQVRCVGNNGDEVSEQECASGPPQPPSREACDMGPCTTAWFHSDWSSKVSPEPPAISCILGNHAQDTSAFPA

SEQ ID NO: 392 - protein, 471 aa, Homo sapiens
MDSAPLFPRPHLFQNLLLFLWALLNCGLGVSAQGPGEWTPWVSWTRCSSSCGRGVSVRSRRCLRLPGEEPCWGDSHEYRLCQLPDCPPGAVPFRDLQCALYNGRPVLGTQKTYQWVPFHGAPNQCDLNCLAEGHAFYHSFGRVLDGTACSPGAQGVCVAGRCLSAGCDGLLGSGALEDRCGRCGGANDSCLFVQRVFRDAGAFAGYWNVTLIPEGARHIRVEHRSRNHLALMGGDGRYVLNGHWVVSPPGTYEAAGTHVVYTRDTGPQETLQAAGPTSHDLLLQVLLQEPNPGIEFEFWLPRERYSPFQARVQALGWPLRQPQPRGVEPQPPAAPAVTPAQTPTLAPDPCPPCPDTRGRAHRLLHYCGSDFVFQARVLGHHHQAQETRYEVRIQLVYKNRSPLRAREYVWAPGHCPCPMLAPHRDYLMAVQRLVSPDGTQDQLLLPHAGYARPWSPAEDSRIRLTARRCPG

SEQ ID NO: 393 - protein, 131 aa, Homo sapiens
MGGDGRYVLNGHWVVSPPGTYEAAGTHVVYTRDTGPQETLQAAGPTSHDLLLQVLLQEPNPGIEFEFWLPRERYSPFQARVQALGWPLRQPQPRGVEPQPPAAPAVTPAQTPTLAPGPSAGPPPPGPGDPL

SEQ ID NO: 394 - protein, 130 aa, Homo sapiens
MGKLRPGRVEWLASGHTERPHLFQNLLLFLWALLNCGLGVSAQGPGEWTPWVSWTRCSSSCGRGVSVRSRRCLRLPGEEPCWGDSHEYRLCQLPDCPPGAVPFRDLQCALYNGRPVLGTQKTYQWVPFHG

SEQ ID NO: 395 - protein, 141 aa, Homo sapiens
MGKLRPGRVEWLASGHTERPHLFQNLLLFLWALLNCGLGVSAQGPGEWTPWVSWTRCSSSCGRGVSVRSRRCLRLPGEEPCWGDSHEYRLCQLPDCPPGAVPFRDLQCALYNGRPVLGTQKTYQWVPFHGAPNQCDLNCLA

SEQ ID NO: 396 - protein, 210 aa, Homo sapiens
MGKLRPGRVEWLASGHTERPHLFQNLLLFLWALLNCGLGVSAQGPGEWTPWVSWTRCSSSCGRGVSVRSRRCLRLPGEEPCWGDSHEYRLCQLPDCPPGAVPFRDLQCALYNGRPVLGTQKTYQWVPFHGAPNQCDLNCLAEGHAFYHSFGRVLDGTACSPGAQGVCVAGRCLSAGCDGLLGSGALEDRCGRCGGANDSCLFVQRVFRDA

SEQ ID NO: 397 - protein, 135 aa, Homo sapiens
RHIRVEHRSRNHLGILGSLMGGDGRYVLNGHWVVSPPGTYEAAGTHVVYTRDTGPQETLQAAGPTSHDLLLQVLLQEPNPGIEFEFWLPRERYSPFQARVQALGWPLRQPQPRGVEPQPPAAPAVTPAQTPTLAP

SEQ ID NO: 398 - protein, 455 aa, Homo sapiens
MARKALKLASWTSMALAASGIYFYSNKYLDPNDFGAVRVGRAVATTAVISYDYLTSLKSVPYGSEEYLQLRSKIHDLFQSFDDTPLGTASLAQVHKAVLHDGRTVAVKVQHPKVRAQSSKDILLMEVLVLAVKQLFPEFEFMWLVDEAKKNLPLELDFLNEGRNAEKVSQMLRHFDFLKVPRIHWDLSTERVLLMEFVDGGQVNDRDYMERNKIDVNEISRHLGKMYSEMIFVNGFVHCDPHPGNVLVRKHPGTGKAEIVLLDHGLYQMLTEEFRLNYCHLWQSLIWTDMKRVKEYSQRLGAGDLYPLFACMLTARSWDSVNRGISQAPVTATEDLEIRNNAANYLPQISHLLNHVPRQMLLILKTNDLLRGIEAALGTRASASSFLNMSRCCIRALAEHKKKNTCSFFRRTQISFSEAFNLWQINLHELILRVKGLKLADRVLALICWLFPAPL

SEQ ID NO: 399 - protein, 122 aa, Homo sapiens
MARKALKLASWTSMALAASGIYFYSNKYLDPNDFGAVRVGRAVATTAVISYDYLTSLKSVPYGSEEYLQLRSKSLAVSPRLECIGVISAHCNLYLLGSSDSPASASQVAGTTGAPSLCQASL

SEQ ID NO: 400 - protein, 266 aa, Homo sapiens
MARKALKLASWTSMALAASGIYFYSNKYLDPNDFGAVRVGRAVATTAVISYDYLTSLKSVPYGSEEYLQLRSKVHLRSARRLCELCCANRGTFIKVGQHLGALDYLLPEEYTSTLKVLHSQAPQSSMQEIRQVIREDLGKEIHDLFQSFDDTPLGTASLAQVHKAVLHDGRTVAVKVQHPKVRAQSSKDILLMEVLVLAVKQLFPEFEFMWLVDEAKKNLPLELDFLNEGRNAEKVSQMLRHFDFLKISRHLGKMYSEMIFVNGFV

SEQ ID NO: 401 - protein, 523 aa, Homo sapiens
MARKALKLASWTSMALAASGIYFYSNKYLDPNDFGAVRVGRAVATTAVISYDYLTSLKSVPYGSEEYLQLRSKVHLRSARRLCELCCANRGTFIKVGQHLGALDYLLPEEYTSTLKVLHSQAPQSSMQEIRQVIREDLGKEIHDLFQSFDDTPLGTASLAQVHKAVLHDGRTVAVKVQHPKVRAQSSKDILLMEVLVLAVKQLFPEFEFMWLVDEAKKNLPLELDFLNEGRNAEKVSQMLRHFDFLKVPRIHWDLSTERVLLMEFVDGGQVNDRDYMERNKIDVNEISRHLGKMYSEMIFVNGFVHCDPHPGNVLVRKHPGTGKAEIVLLDHGLYQMLTEEFRLNYCHLWQSLIWTDMKRVKEYSQRLGAGDLYPLFACMLTARSWDSVNRGISQAPVTATEDLEIRNNAANYLPQISHLLNHVPRQMLLILKTNDLLRGIEAALGTRASASSFLNMSRCCIRALAEHKKKNTCSFFRRTQISFSEAFNLWQINLHELILRVKGLKLADRVLALICWLFPAPL

SEQ ID NO: 402 - protein, 218 aa, Homo sapiens
MARKALKLASWTSMALAASGIYFYSNKYLDPNDFGAVRVGRAVATTAVISYDYLTSLKSVPYGSEEYLQLRSKVHLRSARRLCELCCANRGTFIKVGQHLGALDYLLPEEYTSTLKVLHSQAPQSSMQEIRQVIREDLGKEVLVLAVKQLFPEFEFMWLVDEAKKNLPLELDFLNEGRNAEKVSQMLRHFDFLKPGQQSETASQGTTTTTKKKWDRKL

SEQ ID NO: 403 - protein, 176 aa, Homo sapiens
MTMCSGARLALLVYGIIMHSSVYSSPAAAGLRFPGIRPEEEAYGEDGNPLPDFDGSEPPGAGSPASAPRAAAAWYRPAGRRDVAHGILNEAYRKVLDQLSAGKHLQSLVARGVGGSLGGGAGDDAEPLSKRHSDGIFTDSYSRYRKQMAVKKYLAAVLGKRYKQRVKNKGRRIAYL

SEQ ID NO: 404 - protein, 176 aa, Homo sapiens; identical to SEQ ID NO: 403

SEQ ID NO: 405 - protein, 74 aa, Homo sapiens
MAGVVHVSLAALLLLPMAPAMHSDCIFKKEQAMCLEKIQRANELMGFNDSSPGCPGMWDNITCWKPAHVGEMVL

SEQ ID NO: 406 - protein, 447 aa, Homo sapiens
MAGVVHVSLAALLLLPMAPAMHSDCIFKKEQAMCLEKIQRANELMGFNDSSPGCPGMWDNITCWKPAHVGEMVLVSCPELFRIFNPDQDMGVVSRNCTEDGWSEPFPHYFDACGFDEYESETGDQDYYYLSVKALYTVGYSTSLVTLTTAMVILCRFRKLHCTRNFIHMNLFVSFMLRAISVFIKDWILYAEQDSNHCFISTVECKAVMVFFHYCVVSNYFWLFIEGLYLFTLLVETFFPERRYFYWYTIIGWGTPTVCVTVWATLRLYFDDTGCWDMNDSTALWWVIKGPVVGSIMVNFVLFIGIIVILVQKLQSPDMGGNESSIYLRLARSTLLLIPLFGIHYTVFAFSPENVSKRERLVFELGLGSFQGFVVAVLYCFLNGEVQAEIKRKWRSWKVNRYFAVDFKHRHPSLASSGVNGGTQLSILSKSSSQIRMSGLPADNLAT

SEQ ID NO: 407 - protein, 468 aa, Homo sapiens
MAGVVHVSLAALLLLPMAPAMHSDCIFKKEQAMCLEKIQRANELMGFNDSSPGCPGMWDNITCWKPAHVGEMVLVSCPELFRIFNPDQVWETETIGESDFGDSNSLDLSDMGVVSRNCTEDGWSEPFPHYFDACGFDEYESETGDQDYYYLSVKALYTVGYSTSLVTLTTAMVILCRFRKLHCTRNFIHMNLFVSFMLRAISVFIKDWILYAEQDSNHCFISTVECKAVMVFFHYCVVSNYFWLFIEGLYLFTLLVETFFPERRYFYWYTIIGWGTPTVCVTVWATLRLYFDDTGCWDMNDSTALWWVIKGPVVGSIMVNFVLFIGIIVILVQKLQSPDMGGNESSIYLRLARSTLLLIPLFGIHYTVFAFSPENVSKRERLVFELGLGSFQGFVVAVLYCFLNGEVQAEIKRKWRSWKVNRYFAVDFKHRHPSLASSGVNGGTQLSILSKSSSQIRMSGLPADNLAT

SEQ ID NO: 408 - protein, 524 aa, Homo sapiens
MAGVVHVSLAALLLLPMAPAMHSDCIFKKEQAMCLEKIQRANELMGFNDSSPGCPGMWDNITCWKPAHVGEMVLVSCPELFRIFNPDQVWETETIGESDFGDSNSLDLSDMGVVSRNCTEDGWSEPFPHYFDACGFDEYESETGDQDYYYLSVKALYTVGYSTSLVTLTTAMVILCRFRKLHCTRNFIHMNLFVSFMLRAISVFIKDWILYAEQDSNHCFISTVECKAVMVFFHYCVVSNYFWLFIEGLYLFTLLVETFFPERRYFYWYTIIGWGTPTVCVTVWATLRLYFDDTGCWDMNDSTALWWVIKGPVVGSIMVNFVLFIGIIVILVQKLQSPDMGGNESSIYLTNLSPRVPKKAREDPLPVPSDQHSLPFLSCVQKCYCKPQRAQQHSCKMSELSTITLRLARSTLLLIPLFGIHYTVFAFSPENVSKRERLVFELGLGSFQGFVVAVLYCFLNGEVQAEIKRKWRSWKVNRYFAVDFKHRHPSLASSGVNGGTQLSILSKSSSQIRMSGLPADNLAT

SEQ ID NO: 409 - protein, 496 aa, Homo sapiens
MAGVVHVSLAALLLLPMAPAMHSDCIFKKEQAMCLEKIQRANELMGFNDSSPGCPGMWDNITCWKPAHVGEMVLVSCPELFRIFNPDQVWETETIGESDFGDSNSLDLSDMGVVSRNCTEDGWSEPFPHYFDACGFDEYESETGDQDYYYLSVKALYTVGYSTSLVTLTTAMVILCRFRKLHCTRNFIHMNLFVSFMLRAISVFIKDWILYAEQDSNHCFISTVECKAVMVFFHYCVVSNYFWLFIEGLYLFTLLVETFFPERRYFYWYTIIGWGTPTVCVTVWATLRLYFDDTGCWDMNDSTALWWVIKGPVVGSIMVNFVLFIGIIVILVQKLQSPDMGGNESSIYFSCVQKCYCKPQRAQQHSCKMSELSTITLRLARSTLLLIPLFGIHYTVFAFSPENVSKRERLVFELGLGSFQGFVVAVLYCFLNGEVQAEIKRKWRSWKVNRYFAVDFKHRHPSLASSGVNGGTQLSILSKSSSQIRMSGLPADNLAT

SEQ ID NO: 410 - protein, 496 aa, Homo sapiens; identical to SEQ ID NO: 409

SEQ ID NO: 411 - protein, 148 aa, Homo sapiens
  SITE 1: note = misc_feature - Xaa can be any naturally occurring amino acid
XATLRLYFDDTGCWDMNDSTALWWVIKGPVVGSIMVNFVLFIGIIVILVQKLQSPDMGGNESSIYLTNLSPRVPKKAREDPLPVPSDQHSLPFLRLARSTLLLIPLFGIHYTVFAFSPENVSKRERLVFELGLGSFQGFVVAVLYCFL

SEQ ID NO: 412 - protein, 97 aa, Homo sapiens
MASYIDQDMQVLWYQDGRIVETDESQGIFVEKNMIHNCSLIASALTISNIQAGSTGNWGCHVQTKRGNNTRTVDIVVLESSAQYCPPERVVNNKGDF

SEQ ID NO: 413 - protein, 1321 aa, Homo sapiens
MEPPGRRRGRAQPPLLLPLSLLALLALLGGGGGGGAAALPAGCKHDGRPRGAGRAAGAAEGKVVCSSLELAQVLPPDTLPNRTVTLILSNNKISELKNGSFSGLSLLERLDLRNNLISSIDPGAFWGLSSLKRLDLTNNRIGCLNADIFRGLTNLVRLNLSGNLFSSLSQGTFDYLASLRSLEFQTEYLLCDCNILWMHRWVKEKNITVRDTRCVYPKSLQAQPVTGVKQELLTCDPPLELPSFYMTPSHRQVVFEGDSLPFQCMASYIDQDMQVLWYQDGRIVETDESQGIFVEKNMIHNCSLIASALTISNIQAGSTGNWGCHVQTKRGNNTRTVDIVVLESSAQYCPPERVVNNKGDFRWPRTLAGITAYLQCTRNTHGSGIYPGNPQDERKAWRRCDRGGFWADDDYSRCQYANDVTRVLYMFNQMPLNLTNAVATARQLLAYTVEAANFSDKMDVIFVAEMIEKFGRFTKEEKSKELGDVMVDIASNIMLADERVLWLAQREAKACSRIVQCLQRIATYRLAGGAHVYSTYSPNIALEAYVIKSTGFTGMTCTVFQKVAASDRTGLSDYGRRDPEGNLDKQLSFKCNVSNTFSSLALKNTIVEASIQLPPSLFSPKQKRELRPTDDSLYKLQLIAFRNGKLFPATGNSTNLADDGKRRTVVTPVILTKIDGVNVDTHHIPVNVTLRRIAHGADAVAARWDFDLLNGQGGWKSDGCHILYSDENITTIQCYSLSNYAVLMDLTGSELYTQAASLLHPVVYTTAIILLLCLLAVIVSYIYHHSLIRISLKSWHMLVNLCFHIFLTCVVFVGGITQTRNASICQAVGIILHYSTLATVLWVGVTARNIYKQVTKKAKRCQDPDEPPPPPRPMLRFYLIGGGIPIIVCGITAAANIKNYGSRPNAPYCWMAWEPSLGAFYGPASFITFVNCMYFLSIFIQLKRHPERKYELKEPTEEQQRLAANENGEINHQDSMSLSLISTSALENEHTFHSQLLGASLTLLLYVALWMFGALAVSLYYPLDLVFSFVFGATSLSFSAFFVVHHCVNREDVRLAWIMTCCPGRSSYSVQVNVQPPNSNGTNGEAPKCPNSSAESSCTNKSASSFKNSSQGCKLTNLQAAAAQCHANSLPLNSTPQLDNSLTEHSMDNDIKMHVAPLEVQFRTNVHSSRHHKNRSKGHRASRLTVLREYAYDVPTSVEGSVQNGLPKSRLGNNEGHSRSRRAYLAYRERQYNPPQQDSSDACSTLPKSSRNFEKPVSTTSKKDALRKPAVVELENQQKSYGLNLAIQNGPIKSNGQEGPLLGTDSTGNVRTGLWKHETTV

SEQ ID NO: 414 - protein, 616 aa, Homo sapiens
MEPPGRRRGRAQPPLLLPLSLLALLALLGGGGGGGAAALPAGCKHDGRPRGAGRAAGAAEGKVVCSSLELAQVLPPDTLPNRTVTLILSNNKISELKNGSFSGLSLLERLDLRNNLISSIDPGAFWGLSSLKRLDLTNNRIGCLNADIFRGLTNLVRLNLSGNLFSSLSQGTFDYLASLRSLEFQTEYLLCDCNILWMHRWVKEKNITVRDTRCVYPKSLQAQPVTGVKQELLTCDPPLELPSFYMTPSHRQVVFEGDSLPFQCMASYIDQDMQVLWYQDGRIVETDESQGIFVEKNMIHNCSLIASALTISNIQAGSTGNWGCHVQTKRGNNTRTVDIVVLESSAQYCPPERVVNNKGDFRWPRTLAGITAYLQCTRNTHGSGIYPGNPQDERKAWRRCDRGGFWADDDYSRCQYANDVTRVLYMFNQMPLNLTNAVATARQLLAYTVEAANFSDKMDVIFVAEMIEKFGRFTKEEKSKELGDVMVDIASNIMLADERVLWLAQREAKACSRIVQCLQRIATYRLAGGAHVYSTYSPNIALEAYVIKSTGFTGMTCTVFQKVAASDRTGLSDYGRRDPEGNLDKQLSFKCNVSNTFSSLALKVCYILQSFKTIYS

SEQ ID NO: 415 - protein, 34 aa, Homo sapiens
MLRFYLIGGGIPIIVCGITAAANIKNYGSRPNAP

SEQ ID NO: 416 - protein, 381 aa, Homo sapiens
MPLKRNNSKYPPLELPSFYMTPSHRQVVFEGDSLPFQCMASYIDQDMQVLWYQDGRIVETDESQGIFVEKNMIHNCSLIASALTISNIQAGSTGNWGCHVQTKRGNNTRTVDIVVLESSAQYCPPERVVNNKGDFRWPRTLAGITAYLQCTRNTHGSGIYPGNPQDERKAWRRCDRGGFWADDDYSRCQYANDVTRVLYMFNQMPLNLTNAVATARQLLAYTVEAANFSDKMDVIFVAEMIEKFGRFTKEEKSKELGDVMVDIASNIMLADERVLWLAQREAKACSRIVQCLQRIATYRLAGGAHVYSTYSPNIALEAYVIKSTGFTGMTCTVFQKVAASDRTGLSDYGRRDPEGNLDKQLSFKCNVSNTFSSLALKGKFR

SEQ ID NO: 417 - protein, 847 aa, Homo sapiens
GKGHRMTPACPLLLSVILSLRLATAFDPAPSACSALASGVLYGAFSLQDLFPTIASGCSWTLENPDPTKYSLYLRFNRQEQVCAHFAPRLLPLDHYLVNFTCLRPSPEEAVAQAESEVGRPEEEEAEAAAGLELCSGSGPFTFLHFDKNFVQLCLSAEPSEAPRLLAPAALAFRFVEVLLINNNNSSQFTCGVLCRWSEECGRAAGRACGFAQPGCSCPGEAGAGSTTTTSPGPPAAHTLSNALVPGGPAPPAEADLHSGSSNDLFTTEMRYGEEPEEEPKVKTQWPRSADEPGLYMAQTGDPAAEEWSPWSVCSLTCGQGLQVRTRSCVSSPYGTLCSGPLRETRPCNNSATCPVEGQWLEWGPWGPCSTSCANGTQQRSRKCSVAGPAWATCTGALTDTRECSNLECPATDSKWGPWNAWSLCSKTCDTGWQRRFRMCQATGTQGYPCEGTGEEVKPCSEKRCPAFHEMCRDEYVMLMTWKKAAAGEIIYNKCPPNASGSASRRCLLSAQGVAYWGLPSFARCISHEYRYLYLSLREHLAKGQRMLAGEGMSQVVRSLQELLARRTYYSGDLLFSVDILRNVTDTFKRATYVPSADDVQRFFQVVSFMVDAENKEKWDDAQQVSPGSVHLLRVVEDFIHLVGDALKAFQSSLIVTDNLVISIQREPVSAVSSDITFPMRGRRGMKDWVRHSEDRLFLPKEVLSLSSPGKPATSGAAGSPGRGRGPGTVPPGPGHSHQRLLPADPDESSYFVIGAVLYRTLGLILPPPRPPLAVTSRVMTVTVRPPTQPPAEPLITVELSYIINGTTDPHCASWDYSRADASSGDWDTENCQTLETQAAHTRCQCQ

SEQ ID NO: 418 - protein, 1585 aa, Homo sapiens
MENTGWMGKGHRMTPACPLLLSVILSLRLATAFDPAPSACSALASGVLYGAFSLQDLFPTIASGCSWTLENPDPTKYSLYLRFNRQEQVCAHFAPRLLPLDHYLVNFTCLRPSPEEAVAQAESEVGRPEEEEAEAAAGLELCSGSGPFTFLHFDKNFVQLCLSAEPSEAPRLLAPAALAFRFVEVLLINNNNSSQFTCGVLCRWSEECGRAAGRACGFAQPGCSCPGEAGAGSTTTTSPGPPAAHTLSNALVPGGPAPPAEADLHSGSSNDLFTTEMRYGEEPEEEPKVKTQWPRSADEPGLYMAQTGDPAAEEWSPWSVCSLTCGQGLQVRTRSCVSSPYGTLCSGPLRETRPCNNSATCPVHGVWEEWGSWSLCSRSCGRGSRSRMRTCVPPQHGGKACEGPELQTKLCSMAACPVEGQWLEWGPWGPCSTSCANGTQQRSRKCSVAGPAWATCTGALTDTRECSNLECPATDSKWGPWNAWSLCSKTCDTGWQRRFRMCQATGTQGYPCEGTGEEVKPCSEKRCPAFHEMCRDEYVMLMTWKKAAAGEIIYNKCPPNASGSASRRCLLSAQGVAYWGLPSFARCISHEYRYLYLSLREHLAKGQRMLAGEGMSQVVRSLQELLARRTYYSGDLLFSVDILRNVTDTFKRATYVPSADDVQRFFQVVSFMVDAENKEKWDDAQQVSPGSVHLLRVVEDFIHLVGDALKAFQSSLIVTDNLVISIQREPVSAVSSDITFPMRGRRGMKDWVRHSEDRLFLPKEVLSLSSPGKPATSGAAGSPGRGRGPGTVPPGPGHSHQRLLPADPDESSYFVIGAVLYRTLGLILPPPRPPLAVTSRVMTVTVRPPTQPPAEPLITVELSYIINGTTDPHCASWDYSRADASSGDWDTENCQTLETQAAHTRCQCQHLSTFAVLAQPPKDLTLELAGSPSVPLVIGCAVSCMALLTLLAIYAAFWRFIKSERSIILLNFCLSILASNILILVGQSRVLSKGVCTMTAAFLHFFFLSSFCWVLTEAWQSYLAVIGRMRTRLVRKRFLCLGWGLPALVVAVSVGFTRTKGYGTSSYCWLSLEGGLLYAFVGPAAVIVLVNMLIGIIVFNKLMARDGISDKSKKQRAGSERCPWASLLLPCSACGAVPSPLLSSASARNAMASLWSSCVVLPLLALTWMSAVLAMTDRRSVLFQALFAVFNSAQGFVITAVHCFLRREVQDVVKCQMGVCRADESEDSPDSCKNGQLQILSDFEKDVDLACQTVLFKEVNTCNPSTITGTLSRLSLDEDEEPKSCLVGPEGSLSFSPLPGNILVPMAASPGLGEPPPPQEANPVYMCGEGGLRQLDLTWLRPTEPGSEGDYMVLPRRTLSLQPGGGGGGGEDAPRARPEGTPRRAAKTVAHTEGYPSFLSVDHSGLGLGPAYGSLQNPYGMTFQPPPPTPSARQVPEPGERSRTMPRTVPGSTMKMGSLERKKLRYSDLDFEKVMHTRKRHSELYHELNQKFHTFDRYRSQSTAKREKRWSVSSGGAAERSVCTDKPSPGERPSLSQHRRHQSWSTFKSMTLGSLPPKPRERLTLHRAAAWEPTEPPDGDFQTEV

SEQ ID NO: 419 - protein, 1584 aa, Homo sapiens
MENTGWMGKGHRMTPACPLLLSVILSLRLATAFDPAPSACSALASGVLYGAFSLQDLFPTIASGCSWTLENPDPTKYSLYLRFNRQEQVCAHFAPRLLPLDHYLVNFTCLRPSPEEAVAQAESEVGRPEEEEAEAAAGLELCSGSGPFTFLHFDKNFVQLCLSAEPSEAPRLLAPAALAFRFVEVLLINNNNSSQFTCGVLCRWSEECGRAAGRACGFAQPGCSCPGEAGAGSTTTTSPGPPAAHTLSNALVPGGPAPPAEADLHSGSSNDLFTTEMRYGEEPEEEPKVKTQWPRSADEPGLYMAQTGDPAAEEWSPWSVCSLTCGQGLQVRTRSCVSSPYGTLCSGPLRETRPCNNSATCPVHGVWEEWGSWSLCSRSCGRGSRSRMRTCVPPQHGGKACEGPELQTKLCSMAACPVEGQWLEWGPWGPCSTSCANGTQQRSRKCSVAGPAWATCTGALTDTRECSNLECPATDSKWGPWNAWSLCSKTCDTGWQRRFRMCQATGTQGYPCEGTGEEVKPCSEKRCPAFHEMCRDEYVMLMTWKKAAAGEIIYNKCPPNASGSASRRCLLSAQGVAYWGLPSFARCISHEYRYLYLSLREHLAKGQRMLAGEGMSQVVRSLQELLARRTYYSGDLLFSVDILRNVTDTFKRATYVPSADDVQRFFQVVSFMVDAENKEKWDDAQQVSPGSVHLLRVVEDFIHLVGDALKAFQSSLIVTDNLVISIQREPVSAVSSDITFPMRGRRGMKDWVRHSEDRLFLPKEVLSLSSPGKPATSGAAGSPGRGRGPGTVPPGPGHSHQRLLPADPDESSYFVIGAVLYRTLGLILPPPRPPLAVTSRVMTVTVRPPTQPPAEPLITVELSYIINGTTDPHCASWDYSRADASSGDWDTENCQTLETQAAHTRCQCQHLSTFAVLAQPPKDLTLELAGSPSVPLVIGCAVSCMALLTLLAIYAAFWRFIKSERSIILLNFCLSILASNILILVGQSRVLSKGVCTMTAAFLHFFFLSSFCWVLTEAWQSYLAVIGRMRTRLVRKRFLCLGWGLPALVVAVSVGFTRTKGYGTSSYCWLSLEGGLLYAFVGPAAVIVLVNMLIGIIVFNKLMARDGISDKSKKQRAGSERCPWASLLLPCSACGAVPSPLLSSASARNAMASLWSSCVVLPLLALTWMSAVLAMTDRRSVLFQALFAVFNSAQGFVITAVHCFLRREVQDVVKCQMGVCRADESEDSPDSCKNGQLQILSDFEKDVDLACQTVLFKEVNTCNPSTITGTLSRLSLDEDEEPKSCLVGPEGSLSFSPLPGNILVPMAASPGLGEPPPPQEANPVYMCGEGGLRQLDLTWLRPTEPGSEGDYMVLPRRTLSLQPGGGGGGGEDAPRARPEGTPRRAAKTVAHTEGYPSFLSVDHSGLGLGPAYGSLQNPYGMTFQPPPPTPSARQVPEPGERSRTMPRTVPGSTMKMGSLERKKLRYSDLDFEVMHTRKRHSELYHELNQKFHTFDRYRSQSTAKREKRWSVSSGGAAERSVCTDKPSPGERPSLSQHRRHQSWSTFKSMTLGSLPPKPRERLTLHRAAAWEPTEPPDGDFQTEV

SEQ ID NO: 420 - protein, 1551 aa, Homo sapiens
MENTGWMGKGHRMTPACPLLLSVILSLRLATAFDPAPSACSALASGVLYGAFSLQDLFPTIASGCSWTLENPDPTKYSLYLRFNRQEQVCAHFAPRLLPLDHYLVNFTCLRPSPEEAVAQAESEVGRPEEEEAEAAAGLELCSGSGPFTFLHFDKNFVQLCLSAEPSEAPRLLAPAALAFRFVEVLLINNNNSSQFTCGVLCRWSEECGRAAGRACGFAQPGCSCPGEAGAGSTTTTSPGPPAAHTLSNALVPGGPAPPAEADLHSGSSNDLFTTEMRYGEEPEEEPKVKTQWPRSADEPGLYMAQTGDPAAEEWSPWSVCSLTCGQGLQVRTRSCVSSPYGTLCSGPLRETRPCNNSATCPVHGVWEEWGSWSLCSRSCGRGSRSRMRTCVPPQHGGKACEGPELQTKLCSMAACPVEGQWLEWGPWGPCSTSCANGTQQRSRKCSVAGPAWATCTGALTDTRECSNLECPATDSKWGPWNAWSLCSKTCDTGWQRRFRMCQATGTQGYPCEGTGEEVKPCSEKRCPAFHEMCRDEYVMLMTWKKAAAGEIIYNKCPPNASGSASRRCLLSAQGVAYWGLPSFARCISHEYRYLYLSLREHLAKGQRMLAGEGMSQVVRSLQELLARRTYYSGDLLFSVDILRNVTDTFKRATYVPSADDVQRFFQVVSFMVDAENKEKWDDAQQVSPGSVHLLRVVEDFIHLVGDALKAFQSSLIVTDNLVISIQREPVSAVSSDITFPMRGRRGMKDWVRHSEDRLFLPKEVLSLSSPGKPATSGAAGSPGRGRGPGTVPPGPGHSHQRLLPADPDESSYFVIGAVLYRTLGLILPPPRPPLAVTSRVMTVTVRPPTQPPAEPLITVELSYIINGTTDPHCASWDYSRADASSGDWDTENCQTLETQAAHTRCQCQHLSTFAVLAQPPKDLTLELAGSPSVPLVIGCAVSCMALLTLLAIYAAFWRFIKSERSIILLNFCLSILASNILILVGQSRVLSKGVCTMTAAFLHFFFLSSFCWVLTEAWQSYLAVIGRMRTRLVRKRFLCLGWGLPALVVAVSVGFTRTKGYGTSSYCWLSLEGGLLYAFVGPAAVIVLVNMLIGIIVFNKLMARDGISDKSKKQRAGASLWSSCVVLPLLALTWMSAVLAMTDRRSVLFQALFAVFNSAQGFVITAVHCFLRREVQDVVKCQMGVCRADESEDSPDSCKNGQLQILSDFEKDVDLACQTVLFKEVNTCNPSTITGTLSRLSLDEDEEPKSCLVGPEGSLSFSPLPGNILVPMAASPGLGEPPPPQEANPVYMCGEGGLRQLDLTWLRPTEPGSEGDYMVLPRRTLSLQPGGGGGGGEDAPRARPEGTPRRAAKTVAHTEGYPSFLSVDHSGLGLGPAYGSLQNPYGMTFQPPPPTPSARQVPEPGERSRTMPRTVPGSTMKMGSLERKKLRYSDLDFEVMHTRKRHSELYHELNQKFHTFDRYRSQSTAKREKRWSVSSGGAAERSVCTDKPSPGERPSLSQHRRHQSWSTFKSMTLGSLPPKPRERLTLHRAAAWEPTEPPDGDFQTEV

SEQ ID NO: 421 - protein, 507 aa, Homo sapiens
MHLPRQHGSAHLGHLYAYAKFSAHDWHLHAQGHAICNAHGKGKGHRMTPACPLLLSVILSLRLATAFDPAPSACSALASGVLYGAFSLQDLFPTIASGCSWTLENPDPTKYSLYLRFNRQEQVCAHFAPRLLPLDHYLVNFTCLRPSPEEAVAQAESEVGRPEEEEAEAAAGLELCSGSGPFTFLHFDKNFVQLCLSAEPSEAPRLLAPAALAFRFVEVLLINNNNSSQFTCGVLCRWSEECGRAAGRACGFAQPGCSCPGEAGAGSTTTTSPGPPAAHTLSNALVPGGPAPPAEADLHSGSSNDLFTTEMRYGEEPEEEPKVKTQWPRSADEPGLYMAQTVHGVWEEWGSWSLCSRSCGRGSRSRMRTCVPPQHGGKACEGPELQTKLCSMAACPVEGQWLEWGPWGPCSTSCANGTQQRSRKCSVAGPAWATCTGALTDTRECSNLECPATDSKWGPWNAWSLCSKTCDTGWQRRFRMCQATGTQGYPCEGTGEEVKPCSEKRCP

SEQ ID NO: 422 - protein, 1500 aa, Homo sapiens
MLSLRGPDTHGKGHRMTPACPLLLSVILSLRLATAFDPAPSACSALASGVLYGAFSLQDLFPTIASGCSWTLENPDPTKYSLYLRFNRQEQVCAHFAPRLLPLDHYLVNFTCLRPSPEEAVAQAESEVGRPEEEEAEAAAGLELCSGSGPFTFLHFDKNFVQLCLSAEPSEAPRLLAPAALAFRFVEVLLINNNNSSQFTCGVLCRWSEECGRAAGRACGFAQPGCSCPGEAGAGSTTTTSPGPPAAHTLSNALVPGGPAPPAEADLHSGSSNDLFTTEMRYGEEPEEEPKVKTQWPRSADEPGLYMAQTVHGVWEEWGSWSLCSRSCGRGSRSRMRTCVPPQHGGKACEGPELQTKLCSMAACPVEGQWLEWGPWGPCSTSCANGTQQRSRKCSVAGPAWATCTGALTDTRECSNLECPATDSKWGPWNAWSLCSKTCDTGWQRRFRMCQATGTQGYPCEGTGEEVKPCSEKRCPAFHEMCRDEYVMLMTWKKAAAGEIIYNKCPPNASGSASRRCLLSAQGVAYWGLPSFARCISHEYRYLYLSLREHLAKGQRMLAGEGMSQVVRSLQELLARRTYYSGDLLFSVDILRNVTDTFKRATYVPSADDVQRFFQVVSFMVDAENKEKWDDAQQVSPGSVHLLRVVEDFIHLVGDALKAFQSSLIVTDNLVISIQREPVSAVSSDITFPMRGRRGMKDWVRHSEDRLFLPKEVLSLSSPGKPATSGAAGSPGRGRGPGTVPPGPGHSHQRLLPADPDESSYFVIGAVLYRTLGLILPPPRPPLAVTSRVMTVTVRPPTQPPAEPLITVELSYIINGTTDPHCASWDYSRADASSGDWDTENCQTLETQAAHTRCQCQHLSTFAVLAQPPKDLTLELAGSPSVPLVIGCAVSCMALLTLLAIYAAFWRFIKSERSIILLNFCLSILASNILILVGQSRVLSKGVCTMTAAFLHFFFLSSFCWVLTEAWQSYLAVIGRMRTRLVRKRFLCLGWGLPALVVAVSVGFTRTKGYGTSSYCWLSLEGGLLYAFVGPAAVIVLVNMLIGIIVFNKLMARDGISDKSKKQRAGASLWSSCVVLPLLALTWMSAVLAMTDRRSVLFQALFAVFNSAQGFVITAVHCFLRREVQDVVKCQMGVCRADESEDSPDSCKNGQLQILSDFEKDVDLACQTVLFKEVNTCNPSTITGTLSRLSLDEDEEPKSCLVGPEGSLSFSPLPGNILVPMAASPGLGEPPPPQEANPVYMCGEGGLRQLDLTWLRPTEPGSEGDYMVLPRRTLSLQPGGGGGGGEDAPRARPEGTPRRAAKTVAHTEGYPSFLSVDHSGLGLGPAYGSLQNPYGMTFQPPPPTPSARQVPEPGERSRTMPRTVPGSTMKMGSLERKKLRYSDLDFEKVMHTRKRHSELYHELNQKFHTFDRYRSQSTAKREKRWSVSSGGAAERSVCTDKPSPGERPSLSQHRRHQSWSTFKSMTLGSLPPKPRERLTLHRAAAWEPTEPPDGDFQTEV

SEQ ID NO: 423 - protein, 1554 aa, Homo sapiens
MTPACPLLLSVILSLRLATAFDPAPSACSALASGVLYGAFSLQDLFPTIASGCSWTLENPDPTKYSLYLRFNRQEQVCAHFAPRLLPLDHYLVNFTCLRPSPEEAVAQAESEVGRPEEEEAEAAAGLELCSGSGPFTFLHFDKNFVQLCLSAEPSEAPRLLAPAALAFRFVEVLLINNNNSSQFTCGVLCRWSEECGRAAGRACGFAQPGCSCPGEAGAGSTTTTSPGPPAAHTLSNALVPGGPAPPAEADLHSGSSNDLFTTEMRYGEEPEEEPKVKTQWPRSADEPGLYMAQTGDPAAEEWSPWSVCSLTCGQGLQVRTRSCVSSPYGTLCSGPLRETRPCNNSATCPVHGVWEEWGSWSLCSRSCGRGSRSRMRTCVPPQHGGKACEGPELQTKLCSMAACPVEGQWLEWGPWGPCSTSCANGTQQRSRKCSVAGPAWATCTGALTDTRECSNLECPATDSKWGPWNAWSLCSKTCDTGWQRRFRMCQATGTQGYPCEGTGEEVKPCSEKRCPAFHEMCRDEYVMLMTWKKAAAGEIIYNKCPPNASGSASRRCLLSAQGVAYWGLPSFARCISHEYRYLYLSLREHLAKGQRMLAGEGMSQVVRSLQELLARRTYYSGDLLFSVDILRNVTDTFKRATYVPSADDVQRFFQVVSFMVDAENKEKWDDAQQVSPGSVHLLRVVEDFIHLVGDALKAFQSSLIVTDNLVISIQREPVSAVSSDITFPMRGRRGMKDWVRHSEDRLFLPKEVLSLSSPGKPATSGAAGSPGRGRGPGTVPPGPGHSHQRLLPADPDESSYFVIGAVLYRTLGLILPPPRPPLAVTSRVMTVTVRPPTQPPAEPLITVELSYIINGTTDPHCASWDYSRADASSGDWDTENCQTLETQAAHTRCQCQHLSTFAVLAQPPKDLTLELAGSPSVPLVIGCAVSCMALLTLLAIYAAFWRFIKSERSIILLNFCLSILASNILILVGQSRVLSKGVCTMTAAFLHFFFLSSFCWVLTEAWQSYLAVIGRMRTRLVRKRFLCLGWGLPALVVAVSVGFTRTKGYGTSSYCWLSLEGGLLYAFVGPAAVIVLVNMLIGIIVFNKLMARDGISDKSKKQRAGSERCPWASLLLPCSACGAVPSPLLSSASARNAMASLWSSCVVLPLLALTWMSAVLAMTDRRSVLFQALFAVFNSAQGFVITAVHCFLRREVQDVVKCQMGVCRADESEDSPDSCKNGQLQILSDFEKDVDLACQTVLFKEVNTCNPSTITGTLSRLSLDEDEEPKSCLVGPEGSLSFSPLPGNILVPMAASPGLGEPPPPQEANPVYMCGEGGLRQLDLTWLRPTEPGSEGDYMVLPRRTLSLQPGGGGGGGEDAPRARPEGTPRRAAKTVAHTEGYPSFLSVDHSGLGLGPAYGSLQNPYGMTFQPPPPTPSARQVPEPGERSRTMPRTVPGSTMKMGSLERKKLRYSDLDFEKVMHTRKRHSELYHELNQKFHTFDRYRSQSTAKDKPSPGERPSLSQHRRHQSWSTFKSMTLGSLPPKPRERLTLHRAAAWEPTEPPDGDFQTEV

SEQ ID NO: 424 - protein, 1499 aa, Homo sapiens
MTPACPLLLSVILSLRLATAFDPAPSACSALASGVLYGAFSLQDLFPTIASGCSWTLENPDPTKYSLYLRFNRQEQVCAHFAPRLLPLDHYLVNFTCLRPSPEEAVAQAESEVGRPEEEEAEAAAGLELCSGSGPFTFLHFDKNFVQLCLSAEPSEAPRLLAPAALAFRFVEVLLINNNNSSQFTCGVLCRWSEECGRAAGRACGFAQPGCSCPGEAGAGSTTTTSPGPPAAHTLSNALVPGGPAPPAEADLHSGSSNDLFTTEMRYGEEPEEEPKVKTQWPRSADEPGLYMAQTVHGVWEEWGSWSLCSRSCGRGSRSRMRTCVPPQHGGKACEGPELQTKLCSMAACPVEGQWLEWGPWGPCSTSCANGTQQRSRKCSVAGPAWATCTGALTDTRECSNLECPATDSKWGPWNAWSLCSKTCDTGWQRRFRMCQATGTQGYPCEGTGEEVKPCSEKRCPAFHEMCRDEYVMLMTWKKAAAGEIIYNKCPPNASGSASRRCLLSAQGVAYWGLPSFARCISHEYRYLYLSLREHLAKGQRMLAGEGMSQVVRSLQELLARRTYYSGDLLFSVDILRNVTDTFKRATYVPSADDVQRFFQVVSFMVDAENKEKWDDAQQVSPGSVHLLRVVEDFIHLVGDALKAFQSSLIVTDNLVISIQREPVSAVSSDITFPMRGRRGMKDWVRHSEDRLFLPKEVLSLSSPGKPATSGAAGSPGRGRGPGTVPPGPGHSHQRLLPADPDESSYFVIGAVLYRTLGLILPPPRPPLAVTSRVMTVTVRPPTQPPAEPLITVELSYIINGTTDPHCASWDYSRADASSGDWDTENCQTLETQAAHTRCQCQHLSTFAVLAQPPKDLTLELAGSPSVPLVIGCAVSCMALLTLLAIYAAFWRFIKSERSIILLNFCLSILASNILILVGQSRVLSKGVCTMTAAFLHFFFLSSFCWVLTEAWQSYLAVIGRMRTRLVRKRFLCLGWGLPALVVAVSVGFTRTKGYGTSSYCWLSLEGGLLYAFVGPAAVIVLVNMLIGIIVFNKLMARDGISDKSKKQRAGSERCPWASLLLPCSACGAVPSPLLSSASARNAMASLWSSCVVLPLLALTWMSAVLAMTDRRSVLFQALFAVFNSAQGFVITAVHCFLRREVQDVVKCQMGVCRADESEDSPDSCKNGQLQILSDFEKDVDLACQTVLFKEVNTCNPSTITGTLSRLSLDEDEEPKSCLVGPEGSLSFSPLPGNILVPMAASPGLGEPPPPQEANPVYMCGEGGLRQLDLTWLRPTEPGSEGDYMVLPRRTLSLQPGGGGGGGEDAPRARPEGTPRRAAKTVAHTEGYPSFLSVDHSGLGLGPAYGSLQNPYGMTFQPPPPTPSARQVPEPGERSRTMPRTVPGSTMKMGSLERKKLRYSDLDFEKVMHTRKRHSELYHELNQKFHTFDRYRSQSTAKDKPSPGERPSLSQHRRHQSWSTFKSMTLGSLPPKPRERLTLHRAAAWEPTEPPDGDFQTEV

SEQ ID NO: 425 - protein, 1466 aa, Homo sapiens
MTPACPLLLSVILSLRLATAFDPAPSACSALASGVLYGAFSLQDLFPTIASGCSWTLENPDPTKYSLYLRFNRQEQVCAHFAPRLLPLDHYLVNFTCLRPSPEEAVAQAESEVGRPEEEEAEAAAGLELCSGSGPFTFLHFDKNFVQLCLSAEPSEAPRLLAPAALAFRFVEVLLINNNNSSQFTCGVLCRWSEECGRAAGRACGFAQPGCSCPGEAGAGSTTTTSPGPPAAHTLSNALVPGGPAPPAEADLHSGSSNDLFTTEMRYGEEPEEEPKVKTQWPRSADEPGLYMAQTGDPAAEEWSPWSVCSLTCGQGLQVRTRSCVSSPYGTLCSGPLRETRPCNNSATCPVEGQWLEWGPWGPCSTSCANGTQQRSRKCSVAGPAWATCTGALTDTRECSNLECPATDSKWGPWNAWSLCSKTCDTGWQRRFRMCQATGTQGYPCEGTGEEVKPCSEKRCPAFHEMCRDEYVMLMTWKKAAAGEIIYNKCPPNASGSASRRCLLSAQGVAYWGLPSFARCISHEYRYLYLSLREHLAKGQRMLAGEGMSQVVRSLQELLARRTYYSGDLLFSVDILRNVTDTFKRATYVPSADDVQRFFQVVSFMVDAENKEKWDDAQQVSPGSVHLLRVVEDFIHLVGDALKAFQSSLIVTDNLVISIQREPVSAVSSDITFPMRGRRGMKDWVRHSEDRLFLPKEVLSLSSPGKPATSGAAGSPGRGRGPGTVPPGPGHSHQRLLPADPDESSYFVIGAVLYRTLGLILPPPRPPLAVTSRVMTVTVRPPTQPPAEPLITVELSYIINGTTDPHCASWDYSRADASSGDWDTENCQTLETQAAHTRCQCQHLSTFAVLAQPPKDLTLELAGSPSVPLVIGCAVSCMALLTLLAIYAAFWRFIKSERSIILLNFCLSILASNILILVGQSRVLSKGVCTMTAAFLHFFFLSSFCWVLTEAWQSYLAVIGRMRTRLVRKRFLCLGWGLPALVVAVSVGFTRTKGYGTSSYCWLSLEGGLLYAFVGPAAVIVLVNMLIGIIVFNKLMARDGISDKSKKQRAGASLWSSCVVLPLLALTWMSAVLAMTDRRSVLFQALFAVFNSAQGFVITAVHCFLRREVQDVVKCQMGVCRADESEDSPDSCKNGQLQILSDFEKDVDLACQTVLFKEVNTCNPSTITGTLSRLSLDEDEEPKSCLVGPEGSLSFSPLPGNILVPMAASPGLGEPPPPQEANPVYMCGEGGLRQLDLTWLRPTEPGSEGDYMVLPRRTLSLQPGGGGGGGEDAPRARPEGTPRRAAKTVAHTEGYPSFLSVDHSGLGLGPAYGSLQNPYGMTFQPPPPTPSARQVPEPGERSRTMPRTVPGSTMKMGSLERKKLRYSDLDFEKVMHTRKRHSELYHELNQKFHTFDRYRSQSTAKDKPSPGERPSLSQHRRHQSWSTFKSMTLGSLPPKPRERLTLHRAAAWEPTEPPDGDFQTEV

SEQ ID NO: 426 - protein, 906 aa, Homo sapiens
MEKLLRLCCWYSWLLLFYYNFQVRGVYSRSQDHPGFQVLASASHYWPLENVDGIHELQDTTGASRTHKLTVLPSRNATFVYSNDSAYSNLSATVDIVEGKVNKGIYLKEEKGVTLLYYGRYNSSCISKPEQCGPEGVTFSFFWKTQGEQSRPIPSAYGGQVISNGFKVCSSGGRGSVELYTRDNSMTWEASFSPPGPYWTHVLFTWKSKEGLKVYVNGTLSTSDPSGKVSRDYGESNVNLVIGSEQDQAKCYENGAFDEFIIWERALTPDEIAMYFTAAIGKHALLSSTLPSLFMTSTASPVMPTDAYHPIITNLTEERKTFQSPGVILSYLQNVSLSLPSKSLSEQTALNLTKTFLKAVGEILLLPGWIALSEDSAVVLSLIDTIDTVMGHVSSNLHGSTPQVTVEGSSAMAEFSVAKILPKTVNSSHYRFPAHGQSFIQIPHEAFHRHAWSTVVGLLYHSMHYYLNNIWPAHTKIAEAMHHQDCLLFATSHLISLEVSPPPTLSQNLSGSPLITVHLKHRLTRKQHSEATNSSNRVFVYCAFLDFSSGEGVWSNHGCALTRGNLTYSVCRCTHLTNFAILMQVVPLELARGHQVALSSISYVGCSLSVLCLVATLVTFAVLSSVSTIRNQRYHIHANLSFAVLVAQVLLLISFRLEPGTTPCQVMAVLLHYFFLSAFAWMLVEGLHLYSMVIKVFGSEDSKHRYYYGMGWGFPLLICIISLSFAMDSYGTSNNCWLSLASGAIWAFVAPALFVIVVNIGILIAVTRVISQISADNYKIHGDPSAFKLTAKAVAVLLPILGTSWVFGVLAVNGCAVVFQYMFATLNSLQGLFIFLFHCLLNSEVRAAFKHKTKVWSLTSSSARTSNAKPFHSDLMNGTRPGMASTKLSPWDKSSHSAHRVDLSAV

SEQ ID NO: 427 - protein, 221 aa, Homo sapiens
MEKLLRLCCWYSWLLLFYYNFQVRGVYSRSQDHPGFQVLASASHYWPLENVDGIHELQDTTGDIVEGKVNKGIYLKEEKGVTLLYYGRYNSSCISKPEQCGPEGPYWTHVLFTWKSKEGLKVYVNGTLSTSDPSGKVSRDYGESNVNLVIGSEQDQAKCYENGAFDEFIIWERALTPDEIAMYFTAAIGKHALLSSTLPSLFMTSTASPVMPTDAYHPIIT

SEQ ID NO: 428 - protein, 874 aa, Homo sapiens
MEKLLRLCCWYSWLLLFYYNFQVRGVYSRSQDHPGFQVLASASHYWPLENVDGIHELQDTTGDIVEGKVNKGIYLKEEKGVTLLYYGRYNSSCISKPEQCGPEGVTFSFFWKTQGEQSRPIPSAYGGQVISNGFKVCSSGGRGSVELYTRDNSMTWEASFSPPGPYWTHVLFTWKSKEGLKVYVNGTLSTSDPSGKVSRDYGESNVNLVIGSEQDQAKCYENGAFDEFIIWERALTPDEIAMYFTAAIGKHALLSSTLPSLFMTSTASPVMPTDAYHPIITNLTEERKTFQSPGVILSYLQNVSLSLPSKSLSEQTALNLTKTFLKAVGEILLLPGWIALSEDSAVVLSLIDTIDTVMGHVSSNLHGSTPQVTVEGSSAMAEFSVAKILPKTVNSSHYRFPAHGQSFIQIPHEAFHRHAWSTVVGLLYHSMHYYLNNIWPAHTKIAEAMHHQDCLLFATSHLISLEVSPPPTLSQNLSGSPLITVHLKHRLTRKQHSEATNSSNRVFVYCAFLDFSSGEGVWSNHGCALTRGNLTYSVCRCTHLTNFAILMQVVPLELARGHQVALSSISYVGCSLSVLCLVATLVTFAVLSSVSTIRNQRYHIHANLSFAVLVAQVLLLISFRLEPGTTPCQVMAVLLHYFFLSAFAWMLVEGLHLYSMVIKVFGSEDSKHRYYYGMGWGFPLLICIISLSFAMDSYGTSNNCWLSLASGAIWAFVAPALFVIVVNIGILIAVTRVISQISADNYKIHGDPSAFKLTAKAVAVLLPILGTSWVFGVLAVNGCAVVFQYMFATLNSLQGLFIFLFHCLLNSEVRAAFKHKTKVWSLTSSSARTSNAKPFHSDLMNGTRPGMASTKLSPWDKSSHSAHRVDLSAV

SEQ ID NO: 429 - protein, 393 aa, Homo sapiens
MHRVCFLSFQTRKQHSEATNSSNRVFVYCAFLDFSSGEGVWSNHGCALTRGNLTYSVCRCTHLTNFAILMQVVPLELARGHQVALSSISYVGCSLSVLCLVATLVTFAVLSSVSTIRNQRYHIHANLSFAVLVAQVLLLISFRLEPGTTPCQVMAVLLHYFFLSAFAWMLVEGLHLYSMVIKVFGSEDSKHRYYYGMGWGFPLLICIISLSFAMDSYGTSNNCWLSLASGAIWAFVAPALFVIVVNIGILIAVTRVISQISADNYKIHGDPSAFKLTAKAVAVLLPILGTSWVFGVLAVNGCAVVFQYMFATLNSLQGLFIFLFHCLLNSEVRAAFKHKTKVWSLTSSSARTSNAKPFHSDLMNGTRPGMASTKLSPWDKSSHSAHRVDLSAV

SEQ ID NO: 430 - protein, 345 aa, Homo sapiens
MQVVPLELARGHQVALSSISYVGCSLSVLCLVATLVTFAVLSSVSTIRNQRYHIHANLSFAVLVAQVLLLISFRLEPGTTPCQVMAVLLHYFFLSAFAWMLVEGLHLYSMVIKVFGSEDSKHRYYYGMGWGFPLLICIISLSFAMDSYGTSNNCWLSLASGAIWAFVAPALFVIVVNIGILIAVTRVISQISADNYKIHGDPSAFKLTAKAVAVLLPILGTSWVFGVLAVNGCAVVFQYMFATLNSLQGLFIFLFHCLLNSEARWAKEGRAESLSRMVAGQKGCMITKPSDPLIATPSDPLQGLRWIPVAGRQCSHGSPPAHPPACPPRICLFASLSHSPRDIHC

SEQ ID NO: 431 - protein, 156 aa, Homo sapiens
MQVVPLEVNIGILIAVTRVISQISADNYKIHGDPSAFKLTAKAVAVLLPILGTSWVFGVLAVNGCAVVFQYMFATLNSLQGLFIFLFHCLLNSEVRAAFKHKTKVWSLTSSSARTSNAKPFHSDLMNGTRPGMASTKLSPWDKSSHSAHRVDLSAV

SEQ ID NO: 432 - protein, 437 aa, Homo sapiens
MNSMDIRCSDIIQGDTQGPSAIAFISYSSLGNIINATFFEEMDKKDQVYLNSQVVSAAIGPKRNVSLSKSVTLTFQHVKMTPSTKKVFCVYWKSTGQGSQWSRDGCFLIHVNKSHTMCNCSHLSSFAVLMALTSQEEDPVLTVITYVGLSVSLLCLLLAALTFLLCKAIRNTSTSLHLQLSLCLFLAHLLFLVGIDRTEPKVLCSIIAGALHYLYLAAFTWMLLEGVHLFLTARNLTVVNYSSINRLMKWIMFPVGYGVPAVTVAISAASWPHLYGTADRCWLHLDQGFMWSFLGPVCAIFSANLVLFILVFWILKRKLSSLNSEVSTIQNTRMLAFKATAQLFILGCTWCLGLLQVGPAAQVMAYLFTIINSLQGFFIFLVYCLLSQQVQKQYQKWFREIVKSKSESETYTLSSKMGPDSKPSEGDVFPGQVKRKY

SEQ ID NO: 433 - protein, 57 aa, Homo sapiens
MQGPLLLPGLCFLLSLFGAVTQKTKSECSEPEQRTCGPRAGPGATHGLQWAGEKCLF

SEQ ID NO: 434 - protein, 526 aa, Homo sapiens
MQGPLLLPGLCFLLSLFGAVTQKTKTSCAKCPPNASCVNNTHCTCNHGYTSGSGQKLFTFPLETCNAIETQAITDNCSEERKTFNLNVQMNSMDIRCSDIIQGDTQGPSAIAFISYSSLGNIINATFFEEMDKKDQVYLNSQVVSAAIGPKRNVSLSKSVTLTFQHVKMTPSTKKVFCVYWKSTGQGSQWSRDGCFLIHVNKSHTMCNCSHLSSFAVLMALTSQEEDPVLTVITYVGLSVSLLCLLLAALTFLLCKAIRNTSTSLHLQLSLCLFLAHLLFLVGIDRTEPKVLCSIIAGALHYLYLAAFTWMLLEGVHLFLTARNLTVVNYSSINRLMKWIMFPVGYGVPAVTVAISAASWPHLYGTADRCWLHLDQGFMWSFLGPVCAIFSANLVLFILVFWILKRKLSSLNSEVSTIQNTRMLAFKATAQLFILGCTWCLGLLQVGPAAQVMAYLFTIINSLQGFFIFLVYCLLSQQVQKQYQKWFREIVKSKSESETYTLSSKMGPDSKPSEGDVFPGQVKRKY

SEQ ID NO: 435 - protein, 652 aa, Homo sapiens
MQGPLLLPGLCFLLSLFGAVTQKTKTSCAKCPPNASCVNNTHCTCNHGYTSGSGQKLFTFPLETCNDINECTPPYSVYCGFNAVCYNVEGSFYCQCVPGYRLHSGNEQFSNSNENTCQDTTSSKTTEGRKELQKIVDKFESLLTNQTLWRTEGRQEISSTATTILRDVESKVLETALKDPEQKVLKIQNDSVAIETQAITDNCSEERKTFNLNVQMNSMDIRCSDIIQGDTQGPSAIAFISYSSLGNIINATFFEEMDKKDQVYLNSQVVSAAIGPKRNVSLSKSVTLTFQHVKMTPSTKKVFCVYWKSTGQGSQWSRDGCFLIHVNKSHTMCNCSHLSSFAVLMALTSQEEDPVLTVITYVGLSVSLLCLLLAALTFLLCKAIRNTSTSLHLQLSLCLFLAHLLFLVGIDRTEPKVLCSIIAGALHYLYLAAFTWMLLEGVHLFLTARNLTVVNYSSINRLMKWIMFPVGYGVPAVTVAISAASWPHLYGTADRCWLHLDQGFMWSFLGPVCAIFSANLVLFILVFWILKRKLSSLNSEVSTIQNTRMLAFKATAQLFILGCTWCLGLLQVGPAAQVMAYLFTIINSLQGFFIFLVYCLLSQQVQKQYQKWFREIVKSKSESETYTLSSKMGPDSKPSEGDVFPGQVKRKY

SEQ ID NO: 436 - protein, 600 aa, Homo sapiens
MQGPLLLPGLCFLLSLFGAVTQKTKTSCAKCPPNASCVNNTHCTCNHGYTSGSGQKLFTFPLETCNDTTSSKTTEGRKELQKIVDKFESLLTNQTLWRTEGRQEISSTATTILRDVESKVLETALKDPEQKVLKIQNDSVAIETQAITDNCSEERKTFNLNVQMNSMDIRCSDIIQGDTQGPSAIAFISYSSLGNIINATFFEEMDKKDQVYLNSQVVSAAIGPKRNVSLSKSVTLTFQHVKMTPSTKKVFCVYWKSTGQGSQWSRDGCFLIHVNKSHTMCNCSHLSSFAVLMALTSQEEDPVLTVITYVGLSVSLLCLLLAALTFLLCKAIRNTSTSLHLQLSLCLFLAHLLFLVGIDRTEPKVLCSIIAGALHYLYLAAFTWMLLEGVHLFLTARNLTVVNYSSINRLMKWIMFPVGYGVPAVTVAISAASWPHLYGTADRCWLHLDQGFMWSFLGPVCAIFSANLVLFILVFWILKRKLSSLNSEVSTIQNTRMLAFKATAQLFILGCTWCLGLLQVGPAAQVMAYLFTIINSLQGFFIFLVYCLLSQQVQKQYQKWFREIVKSKSESETYTLSSKMGPDSKPSEGDVFPGQVKRKY

SEQ ID NO: 437 - protein, 786 aa, Homo sapiens
MGGRVFLAFCVWLTLPGAETQDSRGCARWCPQNSSCVNATACRCNPGFSSFSEIITTPTETCDDINECATPSKVSCGKFSDCWNTEGSYDCVCSPGYEPVSGAKTFKNESENTCQDVDECQQNPRLCKSYGTCVNTLGSYTCQCLPGFKFIPEDPKVCTDVDECSSGQHQCDSSTVCFNTVGSYSCRCRPGWKPRHGIPNNQKDTVCEDMTFSTWTPPPGVHSQTLSRFFDKVQDLGRDSKTSSAEVTIQNVIKLVDELMEAPGDVEALAPPVRHLIATQLLSNLEDIMRILAKSLPKGPFTYISPSNTELTLMIQERGDKNVTMGQSSARMKLNWAVAAGAEDPGPAVAGILSIQNMTTLLANASLNLHSKKQAELEEIYESSIRGVQLRRLSAVNSIFLSHNNTKELNSPILFAFSHLESSDGEAGRDPPAKDVMPGPRQELLCAFWKSDSDRGGHWATEGCQVLGSKNGSTTCQCSHLSSFAILMAHYDVEDWKLTLITRVGLALSLFCLLLCILTFLLVRPIQGSRTTIHLHLCICLFVGSTIFLAGIENEGGQVGLRCRLVAGLLHYCFLAAFCWMSLEGLELYFLVVRVFQGQGLSTRWLCLIGYGVPLLIVGVSAAIYSKGYGRPRYCWLDFEQGFLWSFLGPVTFIILCNAVIFVTTVWKLTQKFSEINPDMKKLKKARALTITAIAQLFLLGCTWVFGLFIFDDRSLVLTYVFTILNCLQGAFLYLLHCLLNKKVREEYRKWACLVAGGSKYSEFTSTTSGTGHNQTRALRASESGI

SEQ ID NO: 438 - protein, 835 aa, Homo sapiens
MGGRVFLAFCVWLTLPGAETQDSRGCARWCPQNSSCVNATACRCNPGFSSFSEIITTPTETCDDINECATPSKVSCGKFSDCWNTEGSYDCVCSPGYEPVSGAKTFKNESENTCQDVDECQQNPRLCKSYGTCVNTLGSYTCQCLPGFKFIPEDPKVCTDVNECTSGQNPCHSSTHCLNNVGSYQCRCRPGWQPIPGSPNGPNNTVCEDVDECSSGQHQCDSSTVCFNTVGSYSCRCRPGWKPRHGIPNNQKDTVCEDMTFSTWTPPPGVHSQTLSRFFDKVQDLGRDSKTSSAEVTIQNVIKLVDELMEAPGDVEALAPPVRHLIATQLLSNLEDIMRILAKSLPKGPFTYISPSNTELTLMIQERGDKNVTMGQSSARMKLNWAVAAGAEDPGPAVAGILSIQNMTTLLANASLNLHSKKQAELEEIYESSIRGVQLRRLSAVNSIFLSHNNTKELNSPILFAFSHLESSDGEAGRDPPAKDVMPGPRQELLCAFWKSDSDRGGHWATEGCQVLGSKNGSTTCQCSHLSSFAILMAHYDVEDWKLTLITRVGLALSLFCLLLCILTFLLVRPIQGSRTTIHLHLCICLFVGSTIFLAGIENEGGQVGLRCRLVAGLLHYCFLAAFCWMSLEGLELYFLVVRVFQGQGLSTRWLCLIGYGVPLLIVGVSAAIYSKGYGRPRYCWLDFEQGFLWSFLGPVTFIILCNAVIFVTTVWKLTQKFSEINPDMKKLKKARALTITAIAQLFLLGCTWVFGLFIFDDRSLVLTYVFTILNCLQGAFLYLLHCLLNKKVREEYRKWACLVAGGSKYSEFTSTTSGTGHNQTRALRASESGI

SEQ ID NO: 439 - protein, 742 aa, Homo sapiens
MGGRVFLAFCVWLTLPGAETQDSRGCARWCPQNSSCVNATACRCNPGFSSFSEIITTPTETCDDINECATPSKVSCGKFSDCWNTEGSYDCVCSPGYEPVSGAKTFKNESENTCQDVDECSSGQHQCDSSTVCFNTVGSYSCRCRPGWKPRHGIPNNQKDTVCEDMTFSTWTPPPGVHSQTLSRFFDKVQDLGRDSKTSSAEVTIQNVIKLVDELMEAPGDVEALAPPVRHLIATQLLSNLEDIMRILAKSLPKGPFTYISPSNTELTLMIQERGDKNVTMGQSSARMKLNWAVAAGAEDPGPAVAGILSIQNMTTLLANASLNLHSKKQAELEEIYESSIRGVQLRRLSAVNSIFLSHNNTKELNSPILFAFSHLESSDGEAGRDPPAKDVMPGPRQELLCAFWKSDSDRGGHWATEGCQVLGSKNGSTTCQCSHLSSFAILMAHYDVEDWKLTLITRVGLALSLFCLLLCILTFLLVRPIQGSRTTIHLHLCICLFVGSTIFLAGIENEGGQVGLRCRLVAGLLHYCFLAAFCWMSLEGLELYFLVVRVFQGQGLSTRWLCLIGYGVPLLIVGVSAAIYSKGYGRPRYCWLDFEQGFLWSFLGPVTFIILCNAVIFVTTVWKLTQKFSEINPDMKKLKKARALTITAIAQLFLLGCTWVFGLFIFDDRSLVLTYVFTILNCLQGAFLYLLHCLLNKKVREEYRKWACLVAGGSKYSEFTSTTSGTGHNQTRALRASESGI

SEQ ID NO: 440 - protein, 164 aa, Homo sapiens
MGGRVFLAFCVWLTLPGAETQDSRGCARWCPQNSSCVNATACRCNPGFSSFSEIITTPTETCDDINECATPSKVSCGKFSDCWNTEGSYDCVCSPGYEPVSGAKTFKNESENTCQDVNECTSGQNPCHSSTHCLNNVGSYQCRCRPGWQPIPGSPNGPNNTVCE

SEQ ID NO: 441 - protein, 154 aa, Homo sapiens
MGGRVFLAFCVWLTLPGAETQDSRGCARWCPQNSSCVNATACRCNPGFSSFSEIITTPTETCDDINECATPSKVSCGKFSDCWNTEGSYDCVCSPGYEPVSGAKTFKNESENTCQGKNHPTSSDFPSMRFGVTRAILAASREQGLGCRVSAWRL

SEQ ID NO: 442 - protein, 157 aa, Homo sapiens [sequence omitted]

SEQ ID NO: 443 - protein, 160 aa, Homo sapiens
EYQLLLQVTYRDSKEKRDLRNFLKLLKPPLLWSHGLIRIIRAKATTDCNSLNGVLQCTCEDSYTWFPPSCLDPQNCYLHTAGALPSCECHLNNLSQSVNFCERTKIWGTFKINERFTNDLLNSSSAIYSKYANGIEIQLKKAYERIQGFESVQVTQFRPV

SEQ ID NO: 444 - protein, 713 aa, Homo sapiens
MDISIQRNGSIVAGYEVVGSSSASELLSAIEHVAEKAKTALHKLFPLEDGSFRVFGKAQCNDIVFGFGSKDDEYTLPCSSGYRGNITAKCESSGWQVIRETCVLSLLEELNKNFSMIVGNATEAAVSSFVQNLSVIIRQNPSTTVGNLASVVSILSNISSLSLASHFRVSNSTMEDVISIADNILNSASVTNWTVLLREEKYASSRLLETLENISTLVPPTALPLNFSRKFIDWKGIPVNKSQLKRGYSYQIKMCPQNTSIPIRGRVLIGSDQFQRSLPETIISMASLTLGNILPVSKNGNAQVNGPVISTVIQNYSINEVFLFFSKIESNLSQPHCVFWDFSHLQWNDAGCHLVNETQDIVTCQCTHLTSFSILMSPFVPSTIFPVVKWITYVGLGISIGSLILCLIIEALFWKQIKKSQTSHTRRICMVNIALSLLIADVWFIVGATVDTTVNPSGVCTAAVFFTHFFYLSLFFWMLMLGILLAYRIILVFHHMAQHLMMAVGFCLGYGCPLIISVITIAVTQPSNTYKRKDVCWLNWSNGSKPLLAFVVPALAIVAVNFVVVLLVLTKLWRPTVGERLSRDDKATIIRVGKSLLILTPLLGLTWGFGIGTIVDSQNLAWHVIFALLNAFQGFFILCFGILLDSKLRQLLFNKLSALSSWKQTEKQNSSDLSAKPKFSKPFNPLQNKGHYAFSHTGDSSDNIMLTQFVSNE

SEQ ID NO: 445 - protein, 218 aa, Homo sapiens
MKVGVLWLISFFTFTDGHGGFLGKNDGIKTKKELIVNKKKHLGPVEEYQLLLQVTYRDSKEKRDLRNFLKLLKPPLLWSHGLIRIIRAKATTDCNSLNGVLQCTCEDSYTWFPPSCLDPQNCYLHTAGALPSCECHLNNLSQSVNFCERTKIWGTFKINERFTNDLLNSSSAIYSKYANGIEIQLKKAYERIQGFESVQVTQFRMSLLSPKLECNGTI

SEQ ID NO: 446 - protein, 910 aa, Homo sapiens
MKVGVLWLISFFTFTDGHGGFLGKNDGIKTKKELIVNKKKHLGPVEEYQLLLQVTYRDSKEKRDLRNFLKLLKPPLLWSHGLIRIIRAKATTDCNSLNGVLQCTCEDSYTWFPPSCLDPQNCYLHTAGALPSCECHLNNLSQSVNFCERTKIWGTFKINERFTNDLLNSSSAIYSKYANGIEIQLKKAYERIQGFESVQVTQFRNGSIVAGYEVVGSSSASELLSAIEHVAEKAKTALHKLFPLEDGSFRVFGKAQCNDIVFGFGSKDDEYTLPCSSGYRGNITAKCESSGWQVIRETCVLSLLEELNKNFSMIVGNATEAAVSSFVQNLSVIIRQNPSTTVGNLASVVSILSNISSLSLASHFRVSNSTMEDVISIADNILNSASVTNWTVLLREEKYASSRLLETLENISTLVPPTALPLNFSRKFIDWKGIPVNKSQLKRGYSYQIKMCPQNTSIPIRGRVLIGSDQFQRSLPETIISMASLTLGNILPVSKNGNAQVNGPVISTVIQNYSINEVFLFFSKIESNLSQPHCVFWDFSHLQWNDAGCHLVNETQDIVTCQCTHLTSFSILMSPFVPSTIFPVVKWITYVGLGISIGSLILCLIIEALFWKQIKKSQTSHTRRICMVNIALSLLIADVWFIVGATVDTTVNPSGVCTAAVFFTHFFYLSLFFWMLMLGILLAYRIILVFHHMAQHLMMAVGFCLGYGCPLIISVITIAVTQPSNTYKRKDVCWLNWSNGSKPLLAFVVPALAIVAVNFVVVLLVLTKLWRPTVGERLSRDDKATIIRVGKSLLILTPLLGLTWGFGIGTIVDSQNLAWHVIFALLNAFQGFFILCFGILLDSKLRQLLFNKLSALSSWKQTEKQNSSDLSAKPKFSKPFNPLQNKGHYAFSHTGDSSDNIMLTQFVSNE

SEQ ID NO: 447 - protein, 137 aa, Homo sapiens
  SITE 1: note = misc_feature - Xaa can be any naturally occurring amino acid
XWSHGLIRIIRAKATTDCNSLNGVLQCTCEDSYTWFPPSCLDPQNCYLHTAGALPSCECHLNNLSQSVNFCERTKIWGTFKINERFTNDLLNSSSAIYSKYANGIEIQLKKAYERIQGFESVQVTQFRTVIHLWNLV

SEQ ID NO: 448 - protein, 6 aa, Homo sapiens
MTPQSL

SEQ ID NO: 449 - protein, 95 aa, Homo sapiens
MTPQSLLQTTLFLLSLLFLVQAHPASRSFPDPRGLYHFCLYWNRHAGRLHLLYGKRDFLLSDKASSLLCFQHQEESLAQGPPLLATSVTSWWSPQ

SEQ ID NO: 450 - protein, 125 aa, Homo sapiens
MTPQSLLQTTLFLLSLLFLVQAHPASRSFPDPRGLYHFCLYWNRHAGRLHLLYGKRDFLLSDKASSLLCFQHQEESLAQGPPLLATSVTSWWSPQNISLPSAASFTFSFHSPPHTAAHNASVDMC

SEQ ID NO: 451 - protein, 90 aa, Homo sapiens
MTPQSLLQTTLFLLSLLFLVQAPATGSHLQPLPPQVPTAGATGKTFASAASGTRHTGAASTTNPHQTCASPSRTPKRPSQSMPLSLQPTL

SEQ ID NO: 452 - protein, 118 aa, Homo sapiens
MTPQSLLQTTLFLLSLLFLVQAPATGSHLQPLPPQVPTAGATGKTFASAASGTRHTGAASTTNPHQTCASPSRTPKRPSQSMPLSLQPTLLPDPSLTPGASTTSASTGTDMLGDYIFS

SEQ ID NO: 453 - protein, 91 aa, Homo sapiens
MTPQSLLQTTLFLLSLLFLVQASASSGAHGRGHREDFRFCSQRNQTHRSSLHYKPTPDLRISIENSEEALTVHAPFPAAHPASRSFPDPRG

SEQ ID NO: 454 - protein, 98 aa, Homo sapiens
MTPQSLLQTTLFLLSLLFLVQASASSGAHGRGHREDFRFCSQRNQTHRSSLHYKPTPDLRISIENSEEALTVHAPFPAAHPASRSFPDPRGLYHFCLY

SEQ ID NO: 455 - protein, 103 aa, Homo sapiens
MTPQSLLQTTLFLLSLLFLVQASASSGAHGRGHREDFRFCSQRNQTHRSSLHYKPTPDLRISIENSEEALTVHAPFPAAHPASRSFPDPRGLYHFCLYWNRHA

SEQ ID NO: 456 - protein, 114 aa, Homo sapiens
MTPQSLLQTTLFLLSLLFLVQASASSGAHGRGHREDFRFCSQRNQTHRSSLHYKPTPDLRISIENSEEALTVHAPFPAAHPASRSFPDPRGLYHFCLYWNRHAGRLHLLYGKRD

SEQ ID NO: 457 - protein, 118 aa, Homo sapiens
MTPQSLLQTTLFLLSLLFLVQASASSGAHGRGHREDFRFCSQRNQTHRSSLHYKPTPDLRISIENSEEALTVHAPFPAAHPASRSFPDPRGLYHFCLYWNRHAGRLHLLYGKRDFLLS

SEQ ID NO: 458 - protein, 118 aa, Homo sapiens; identical to SEQ ID NO: 457

SEQ ID NO: 459 - protein, 125 aa, Homo sapiens
MTPQSLLQTTLFLLSLLFLVQASASSGAHGRGHREDFRFCSQRNQTHRSSLHYKPTPDLRISIENSEEALTVHAPFPAAHPASRSFPDPRGLYHFCLYWNRHAGRLHLLYGKRDFLLSDKASSLL

SEQ ID NO: 460 - protein, 145 aa, Homo sapiens
MTPQSLLQTTLFLLSLLFLVQASASSGAHGRGHREDFRFCSQRNQTHRSSLHYKPTPDLRISIENSEEALTVHAPFPAAHPASRSFPDPRGLYHFCLYWNRHAGRLHLLYGKRDFLLSDKASSLLCFQHQEESLAQGPPLLATSV

SEQ ID NO: 461 - protein, 146 aa, Homo sapiens
MTPQSLLQTTLFLLSLLFLVQASASSGAHGRGHREDFRFCSQRNQTHRSSLHYKPTPDLRISIENSEEALTVHAPFPAAHPASRSFPDPRGLYHFCLYWNRHAGRLHLLYGKRDFLLSDKASSLLCFQHQEESLAQGPPLLATSVT

SEQ ID NO: 462 - protein, 164 aa, Homo sapiens
MTPQSLLQTTLFLLSLLFLVQASASSGAHGRGHREDFRFCSQRNQTHRSSLHYKPTPDLRISIENSEEALTVHAPFPAAHPASRSFPDPRGLYHFCLYWNRHAGRLHLLYGKRDFLLSDKASSLLCFQHQEESLAQGPPLLATSVTSWWSPQNISLPSAASFTF

SEQ ID NO: 463 - protein, 168 aa, Homo sapiens
MTPQSLLQTTLFLLSLLFLVQASASSGAHGRGHREDFRFCSQRNQTHRSSLHYKPTPDLRISIENSEEALTVHAPFPAAHPASRSFPDPRGLYHFCLYWNRHAGRLHLLYGKRDFLLSDKASSLLCFQHQEESLAQGPPLLATSVTSWWSPQNISLPSAASFTFSFHS

SEQ ID NO: 464 - protein, 198 aa, Homo sapiens
MTPQSLLQTTLFLLSLLFLVQASASSGAHGRGHREDFRFCSQRNQTHRSSLHYKPTPDLRISIENSEEALTVHAPFPAAHPASRSFPDPRGLYHFCLYWNRHAGRLHLLYGKRDFLLSDKASSLLCFQHQEESLAQGPPLLATSVTSWWSPQNISLPSAASFTFSFHSPPHTAAHNASVDMCELKRDLQLLSQFLKHP

SEQ ID NO: 465 - protein, 692 aa, Homo sapiens
MTPQSLLQTTLFLLSLLFLVQASASSGAHGRGHREDFRFCSQRNQTHRSSLHYKPTPDLRISIENSEEALTVHAPFPAAHPASRSFPDPRGLYHFCLYWNRHAGRLHLLYGKRDFLLSDKASSLLCFQHQEESLAQGPPLLATSVTSWWSPQNISLPSAASFTFSFHSPPHTAAHNASVDMCELKRDLQLLSQFLKHPQKASRRPSAAPASQQLQSLESKLTSVRFMGDMVSFEEDRINATVWKLQPTAGLQDLHIHSRQEEEQSEIMEYSVLLPRTLFQRTKGRSGEAEKRLLLVDFSSQALFQDKNSSQVLGEKVLGIVVQNTKVANLTEPVVLTFQHQLQPKNVTLQCVFWVEDPTLSSPGHWSSAGCETVRRETQTSCFCNHLTYFAVLMVSSVEVDAVHKHYLSLLSYVGCVVSALACLVTIAAYLCSRRKPRDYTIKVHMNLLLAVFLLDTSFLLSEPVALTGSEAGCRASAIFLHFSLLTCLSWMGLEGYNLYRLVVEVFGTYVPGYLLKLSAMGWGFPIFLVTLVALVDVDNYGPIILAVHRTPEGVIYPSMCWIRDSLVSYITNLGLFSLVFLFNMAMLATMVVQILRLRPHTQKWSHVLTLLGLSLVLGLPWALIFFSFASGTFQLVVLYLFSIITSFQGFLIFIWYWSMRLQARGGPSPLKSNSDSARLPISSGSTSSSRI

SEQ ID NO: 466 - protein, 97 aa, Homo sapiens
MTPQSLLQTTLFLLSLLFLVQASGTRHTGAASTTNPHQTCASPSRTPKRPSQSMPLSLQPTLLPDPSLTPGASTTSASTGTDMLGDYIFSMASVTSC

SEQ ID NO: 467 - protein, 97 aa, Homo sapiens; identical to SEQ ID NO: 466

SEQ ID NO: 468 - protein, 97 aa, Homo sapiens; identical to SEQ ID NO: 466

SEQ ID NO: 469 - protein, 68 aa, Homo sapiens
MTPQSLLQTTLFLLSLLFLVQASSLLCFQHQEESLAQGPPLLATSVTSWWSPQNISLPSAASFTFSFH

SEQ ID NO: 470 - protein, 42 aa, Homo sapiens
MTPQSLLQTTLFLLSLLFLVQGAHGRGHREDFRFCSQRNQTH

SEQ ID NO: 471 - protein, 50 aa, Homo sapiens
MTPQSLLQTTLFLLSLLFLVQGAHGRGHREDFRFCSQRNQTHRSSLHYKP

SEQ ID NO: 472 - protein, 55 aa, Homo sapiens
MTPQSLLQTTLFLLSLLFLVQGAHGRGHREDFRFCSQRNQTHRSSLHYKPTPDLR

SEQ ID NO: 473 - protein, 56 aa, Homo sapiens
MTPQSLLQTTLFLLSLLFLVQGAHGRGHREDFRFCSQRNQTHRSSLHYKPTPDLRI

SEQ ID NO: 474 - protein, 70 aa, Homo sapiens
MTPQSLLQTTLFLLSLLFLVQGAHGRGHREDFRFCSQRNQTHRSSLHYKPTPDLRISIENSEEALTVHAP

SEQ ID NO: 475 - protein, 77 aa, Homo sapiens
MTPQSLLQTTLFLLSLLFLVQGAHGRGHREDFRFCSQRNQTHRSSLHYKPTPDLRISIENSEEALTVHAPFPAAHPA

SEQ ID NO: 476 - protein, 84 aa, Homo sapiens
MTPQSLLQTTLFLLSLLFLVQGAHGRGHREDFRFCSQRNQTHRSSLHYKPTPDLRISIENSEEALTVHAPFPAAHPASRSFPDP

SEQ ID NO: 477 - protein, 84 aa, Homo sapiens; identical to SEQ ID NO: 476

SEQ ID NO: 478 - protein, 94 aa, Homo sapiens
MTPQSLLQTTLFLLSLLFLVQGAHGRGHREDFRFCSQRNQTHRSSLHYKPTPDLRISIENSEEALTVHAPFPAAHPASRSFPDPRGLYHFCLYW

SEQ ID NO: 479 - protein, 94 aa, Homo sapiens; identical to SEQ ID NO: 478

SEQ ID NO: 480 - protein, 100 aa, Homo sapiens
MTPQSLLQTTLFLLSLLFLVQGAHGRGHREDFRFCSQRNQTHRSSLHYKPTPDLRISIENSEEALTVHAPFPAAHPASRSFPDPRGLYHFCLYWNRHAGR

SEQ ID NO: 481 - protein, 107 aa, Homo sapiens
MTPQSLLQTTLFLLSLLFLVQGAHGRGHREDFRFCSQRNQTHRSSLHYKPTPDLRISIENSEEALTVHAPFPAAHPASRSFPDPRGLYHFCLYWNRHAGRLHLLYGK

SEQ ID NO: 482 - protein, 110 aa, Homo sapiens
MTPQSLLQTTLFLLSLLFLVQGAHGRGHREDFRFCSQRNQTHRSSLHYKPTPDLRISIENSEEALTVHAPFPAAHPASRSFPDPRGLYHFCLYWNRHAGRLHLLYGKRDF

SEQ ID NO: 483 - protein, 111 aa, Homo sapiens
MTPQSLLQTTLFLLSLLFLVQGAHGRGHREDFRFCSQRNQTHRSSLHYKPTPDLRISIENSEEALTVHAPFPAAHPASRSFPDPRGLYHFCLYWNRHAGRLHLLYGKRDFL

SEQ ID NO: 484 - protein, 113 aa, Homo sapiens
MTPQSLLQTTLFLLSLLFLVQGAHGRGHREDFRFCSQRNQTHRSSLHYKPTPDLRISIENSEEALTVHAPFPAAHPASRSFPDPRGLYHFCLYWNRHAGRLHLLYGKRDFLLS

SEQ ID NO: 485 - protein, 116 aa, Homo sapiens
MTPQSLLQTTLFLLSLLFLVQGAHGRGHREDFRFCSQRNQTHRSSLHYKPTPDLRISIENSEEALTVHAPFPAAHPASRSFPDPRGLYHFCLYWNRHAGRLHLLYGKRDFLLSDKA

SEQ ID NO: 486 - protein, 116 aa, Homo sapiens; identical to SEQ ID NO: 485

SEQ ID NO: 487 - protein, 119 aa, Homo sapiens
MTPQSLLQTTLFLLSLLFLVQGAHGRGHREDFRFCSQRNQTHRSSLHYKPTPDLRISIENSEEALTVHAPFPAAHPASRSFPDPRGLYHFCLYWNRHAGRLHLLYGKRDFLLSDKASSL

SEQ ID NO: 488 - protein, 119 aa, Homo sapiens; identical to SEQ ID NO: 487

SEQ ID NO: 489 - protein, 122 aa, Homo sapiens
MTPQSLLQTTLFLLSLLFLVQGAHGRGHREDFRFCSQRNQTHRSSLHYKPTPDLRISIENSEEALTVHAPFPAAHPASRSFPDPRGLYHFCLYWNRHAGRLHLLYGKRDFLLSDKASSLLCF

SEQ ID NO: 490 - protein, 131 aa, Homo sapiens
MTPQSLLQTTLFLLSLLFLVQGAHGRGHREDFRFCSQRNQTHRSSLHYKPTPDLRISIENSEEALTVHAPFPAAHPASRSFPDPRGLYHFCLYWNRHAGRLHLLYGKRDFLLSDKASSLLCFQHQEESLAQ

SEQ ID NO: 491 - protein, 131 aa, Homo sapiens; identical to SEQ ID NO: 490

SEQ ID NO: 492 - protein, 141 aa, Homo sapiens
MTPQSLLQTTLFLLSLLFLVQGAHGRGHREDFRFCSQRNQTHRSSLHYKPTPDLRISIENSEEALTVHAPFPAAHPASRSFPDPRGLYHFCLYWNRHAGRLHLLYGKRDFLLSDKASSLLCFQHQEESLAQGPPLLATSVT

SEQ ID NO: 493 - protein, 153 aa, Homo sapiens
MTPQSLLQTTLFLLSLLFLVQGAHGRGHREDFRFCSQRNQTHRSSLHYKPTPDLRISIENSEEALTVHAPFPAAHPASRSFPDPRGLYHFCLYWNRHAGRLHLLYGKRDFLLSDKASSLLCFQHQEESLAQGPPLLATSVTSWWSPQNISLPS

SEQ ID NO: 494 - protein, 154 aa, Homo sapiens
MTPQSLLQTTLFLLSLLFLVQGAHGRGHREDFRFCSQRNQTHRSSLHYKPTPDLRISIENSEEALTVHAPFPAAHPASRSFPDPRGLYHFCLYWNRHAGRLHLLYGKRDFLLSDKASSLLCFQHQEESLAQGPPLLATSVTSWWSPQNISLPSA

SEQ ID NO: 495 - protein, 160 aa, Homo sapiens
MTPQSLLQTTLFLLSLLFLVQGAHGRGHREDFRFCSQRNQTHRSSLHYKPTPDLRISIENSEEALTVHAPFPAAHPASRSFPDPRGLYHFCLYWNRHAGRLHLLYGKRDFLLSDKASSLLCFQHQEESLAQGPPLLATSVTSWWSPQNISLPSAASFTFS

SEQ ID NO: 496 - protein, 162 aa, Homo sapiens
MTPQSLLQTTLFLLSLLFLVQGAHGRGHREDFRFCSQRNQTHRSSLHYKPTPDLRISIENSEEALTVHAPFPAAHPASRSFPDPRGLYHFCLYWNRHAGRLHLLYGKRDFLLSDKASSLLCFQHQEESLAQGPPLLATSVTSWWSPQNISLPSAASFTFSFH

SEQ ID NO: 497 - protein, 167 aa, Homo sapiens
MTPQSLLQTTLFLLSLLFLVQGAHGRGHREDFRFCSQRNQTHRSSLHYKPTPDLRISIENSEEALTVHAPFPAAHPASRSFPDPRGLYHFCLYWNRHAGRLHLLYGKRDFLLSDKASSLLCFQHQEESLAQGPPLLATSVTSWWSPQNISLPSAASFTFSFHSPPHT

SEQ ID NO: 498 - protein, 167 aa, Homo sapiens; identical to SEQ ID NO: 497

SEQ ID NO: 499 - protein, 199 aa, Homo sapiens
MTPQSLLQTTLFLLSLLFLVQGAHGRGHREDFRFCSQRNQTHRSSLHYKPTPDLRISIENSEEALTVHAPFPAAHPASRSFPDPRGLYHFCLYWNRHAGRLHLLYGKRDFLLSDKASSLLCFQHQEESLAQGPPLLATSVTSWWSPQNISLPSAASFTFSFHSPPHTAAHNASVDMCELKRDLQLLSQFLKHPQKASRR

SEQ ID NO: 500 - protein, 687 aa, Homo sapiens
MTPQSLLQTTLFLLSLLFLVQGAHGRGHREDFRFCSQRNQTHRSSLHYKPTPDLRISIENSEEALTVHAPFPAAHPASRSFPDPRGLYHFCLYWNRHAGRLHLLYGKRDFLLSDKASSLLCFQHQEESLAQGPPLLATSVTSWWSPQNISLPSAASFTFSFHSPPHTAAHNASVDMCELKRDLQLLSQFLKHPQKASRRPSAAPASQQLQSLESKLTSVRFMGDMVSFEEDRINATVWKLQPTAGLQDLHIHSRQEEEQSEIMEYSVLLPRTLFQRTKGRSGEAEKRLLLVDFSSQALFQDKNSSQVLGEKVLGIVVQNTKVANLTEPVVLTFQHQLQPKNVTLQCVFWVEDPTLSSPGHWSSAGCETVRRETQTSCFCNHLTYFAVLMVSSVEVDAVHKHYLSLLSYVGCVVSALACLVTIAAYLCSRRKPRDYTIKVHMNLLLAVFLLDTSFLLSEPVALTGSEAGCRASAIFLHFSLLTCLSWMGLEGYNLYRLVVEVFGTYVPGYLLKLSAMGWGFPIFLVTLVALVDVDNYGPIILAVHRTPEGVIYPSMCWIRDSLVSYITNLGLFSLVFLFNMAMLATMVVQILRLRPHTQKWSHVLTLLGLSLVLGLPWALIFFSFASGTFQLVVLYLFSIITSFQGFLIFIWYWSMRLQARGGPSPLKSNSDSARLPISSGSTSSSRI

SEQ ID NO: 501 - protein, 687 aa, Homo sapiens; identical to SEQ ID NO: 500

SEQ ID NO: 502 - protein, 687 aa, Homo sapiens; identical to SEQ ID NO: 500

SEQ ID NO: 503 - protein, 687 aa, Homo sapiens; identical to SEQ ID NO: 500

SEQ ID NO: 504 - protein, 693 aa, Homo sapiens
MTPQSLLQTTLFLLSLLFLVQGAHGRGHREDFRFCSQRNQTHRSSLHYKPTPDLRISIENSEEALTVHAPFPAAHPASRSFPDPRGLYHFCLYWNRHAGRLHLLYGKRDFLLSDKASSLLCFQHQEESLAQGPPLLATSVTSWWSPQNISLPSAASFTFSFHSPPHTAAHNASVDMCELKRDLQLLSQFLKHPQKASRRPSAAPASQQLQSLESKLTSVRFMGDMVSFEEDRINATVWKLQPTAGLQDLHIHSRQEEEQSEIMEYSVLLPRTLFQRTKGRSGEAEKRLLLVDFSSQALFQDKNSSQVLGEKVLGIVVQNTKVANLTEPVVLTFQHQLQPKNVTLQCVFWVEDPTLSSPGHWSSAGCETVRRETQTSCFCNHLTYFAVLMVSSVEVDAVHKHYLSLLSYVGCVVSALACLVTIAAYLCSRVPLPCRRKPRDYTIKVHMNLLLAVFLLDTSFLLSEPVALTGSEAGCRASAIFLHFSLLTCLSWMGLEGYNLYRLVVEVFGTYVPGYLLKLSAMGWGFPIFLVTLVALVDVDNYGPIILAVHRTPEGVIYPSMCWIRDSLVSYITNLGLFSLVFLFNMAMLATMVVQILRLRPHTQKWSHVLTLLGLSLVLGLPWALIFFSFASGTFQLVVLYLFSIITSFQGFLIFIWYWSMRLQARGGPSPLKSNSDSARLPISSGSTSSSRI

SEQ ID NO: 505 - protein, 693 aa, Homo sapiens; identical to SEQ ID NO: 504

SEQ ID NO: 506 - protein, 687 aa, Homo sapiens; identical to SEQ ID NO: 500

SEQ ID NO: 507 - protein, 256 aa, Homo sapiens
MTPQSLLQTTLFLLSLLFLVQGAHGRGHREDFRFCSQRNQTHRSSLHYKPTPDLRISIENSEEALTVHAPFPAAHPASRSFPDPRGLYHFCLYWNRHAGRLHLLYGKRDFLLSDKASSLLCFQHQEESLAQGPPLLATSVTSWWSPQNISLPSAASFTFSFHSPPHTAAHNASVDMCELKRDLQLLSQFLKHPQKASRRPSAAPASQQLQSLESKLTSVRFMGDMVSFEEDRINATVWKLQPTAGLQDLHIHSRQE

SEQ ID NO: 508 - protein, 78 aa, Homo sapiens
MTPQSLLQTTLFLLSLLFLVQGRCPRQGPQGRLSLLQPAEPDTQEQPPLQTHTRPAHLHRELRRGPHSPCPFPCSPPC

SEQ ID NO: 509 - protein, 81 aa, Homo sapiens
MTPQSLLQTTLFLLSLLFLVQGRCPRQGPQGRLSLLQPAEPDTQEQPPLQTHTRPAHLHRELRRGPHSPCPFPCSPPCFPI

SEQ ID NO: 510 - protein, 97 aa, Homo sapiens
MTPQSLLQTTLFLLSLLFLVQGSGTRHTGAASTTNPHQTCASPSRTPKRPSQSMPLSLQPTLLPDPSLTPGASTTSASTGTDMLGDYIFSMASVTSC

SEQ ID NO: 511 - protein, 97 aa, Homo sapiens; identical to SEQ ID NO: 510

SEQ ID NO: 512 - protein, 187 aa, Homo sapiens
  SITE 1: note = misc_feature - Xaa can be any naturally occurring amino acid
XSVDMCELKRDLQLLSQFLKHPQKASRRPSAAPASQQLQSLESKLTSVRFMGDMVSFEEDRINATVWKLQPTAGLQDLHIHSRQEEEQSEIMEYSVLLPRTLFQRTKGRSGEAEKRLLLVDFSSQALFQDKNSSQVLGEKVFGTYVPGYLLKLSAMGWGFPIFLVTLVALVDVDNYGPIILAVHRTP

SEQ ID NO: 513 - protein, 528 aa, Homo sapiens
MDHCGALFLCLCLLTLQNATTETWEELLSYMENMQVSRGRSSVFSSRQLHQLEQMLLNTSFPGYNLTLQTPTIQSLAFKLSCDFSGLSLTSATLKRVPQAGGQHARGQHAMQFPAELTRDACKTRPRELRLICIYFSNTHFFKDENNSSLLNNYVLGAQLSHGHVNNLRDPVNISFWHNQSLEGYTLTCVFWKEGARKQPWGGWSPEGCRTEQPSHSQVLCRCNHLTYFAVLMQLSPALVPAELLAPLTYISLVGCSISIVASLITVLLHFHFRKQSDSLTRIHMNLHASVLLLNIAFLLSPAFAMSPVPGSACTALAAALHYALLSCLTWMAIEGFNLYLLLGRVYNIYIRRYVFKLGVLGWGAPALLVLLSLSVKSSVYGPCTIPVFDSWENGTGFQNMSICWVRSPVVHSVLVMGYGGLTSLFNLVVLAWALWTLRRLRERADAPSVRACHDTVTVLGLTVLLGTTWALAFFSFGVFLLPQLFLFTILNSLYGFFLFLWFCSQRCRSEAEAKAQIEAFSSSQTTQ

SEQ ID NO: 514 - protein, 528 aa, Homo sapiens; identical to SEQ ID NO: 513

SEQ ID NO: 515 - protein, 221 aa, Homo sapiens
MDHCGALFLCLCLLTLQNATTETWEELLSYMENMQVSRGRSSVFSSRQLHQLEQMLLNTSFPGYNLTLQTPTIQSLAFKLSCDFSGLSLTSATLKRVPQAGGQHARGQHAMQFPAELTRDACKTRPRELRLICIYFSNTHFFKDENNSSLLNNYVLGAQLSHGHVNNLRDPVNISFWHNQSLVLLGAPPFPLHPCPSVTLLLNTGLTRPKPVEPSWKSITL

SEQ ID NO: 516 - protein, 141 aa, Homo sapiens
MFRSDRMWSCHWKWKPSPLLFLFALYIMCVPHSAVWGCANCRVVLSNPSGTFTSPCYPNDYPNSQACMWTLRAPTGYIIQITFNDFDIEEAPNCIYDSLSLDNGESQTKFCGATAKGLSFNSSANEMHVSFSSDFSIQKKG

SEQ ID NO: 517 - protein, 241 aa, Homo sapiens
MFRSDRMWSCHWKWKPSPLLFLFALYIMCVPHSVWGCANCRVVLSNPSGTFTSPCYPNDYPNSQACMWTLRAPTGYIIQITFNDFDIEEAPNCIYDSLSLDNGESQTKFCGATAKGLSFNSSANEMHVSFSSDFSIQKKGFNASYIRVAVSLRNQKVILPQTSDAYQVSVAKSISIPELSAFTLCFEATKVGHEDSDWTAFSYSNASFTQLLSFGKAKSGYFLSISDSKCLLNNALPVKEK

SEQ ID NO: 518 - protein, 1221 aa, Homo sapiens
MMFRSDRMWSCHWKWKPSPLLFLFALYIMCVPHSVWGCANCRVVLSNPSGTFTSPCYPNDYPNSQACMWTLRAPTGYIIQITFNDFDIEEAPNCIYDSLSLDNGESQTKFCGATAKGLSFNSSANEMHVSFSSDFSIQKKGFNASYIRVAVSLRNQKVILPQTSDAYQVSVAKSISIPELSAFTLCFEATKVGHEDSDWTAFSYSNASFTQLLSFGKAKSGYFLSISDSKCLLNNALPVKEKEDIFAESFEQLCLVWNNSLGSIGVNFKRNYETVPCDSTISKVIPGNGKLLLGSNQNEIVSLKGDIYNFRLWNFTMNAKILSNLSCNVKGNVVDWQNDFWNIPNLALKAESNLSCGSYLIPLPAAELASCADLGTLCQATVNSPSTTPPTVTTNMPVTNRIDKQRNDGIIYRISVVIQNILRHPEVKVQSKVAEWLNSTFQNWNYTVYVVNISFHLSAGEDKIKVKRSLEDEPRLVLWALLVYNATNNTNLEGKIIQQKLLKNNESLDEGLRLHTVNVRQLGHCLAMEEPKGYYWPSIQPSEYVLPCPDKPGFSASRICFYNATNPLVTYWGPVDISNCLKEANEVANQILNLTADGQNLTSANITNIVEQVKRIVNKEENIDITLGSTLMNIFSNILSSSDSDLLESSSEALKTIDELAFKIDLNSTSHVNITTRNLALSVSSLLPGTNAISNFSIGLPSNNESYFQMDFESGQVDPLASVILPPNLLENLSPEDSVLVRRAQFTFFNKTGLFQDVGPQRKTLVSYVMACSIGNITIQNLKDPVQIKIKHTRTQEVHHPICAFWDLNKNKSFGGWNTSGCVAHRDSDASETVCLCNHFTHFGVLMDLPRSASQLDARNTKVLTFISYIGCGISAIFSAATLLTYVAFEKLRRDYPSKILMNLSTALLFLNLLFLLDGWITSFNVDGLCIAVAVLLHFFLLATFTWMGLEAIHMYIALVKVFNTYIRRYILKFCIIGWGLPALVVSVVLASRNNNEVYGKESYGKEKGDEFCWIQDPVIFYVTCAGYFGVMFFLNIAMFIVVMVQICGRNGKRSNRTLREEVLRNLRSVVSLTFLLGMTWGFAFFAWGPLNIPFMYLFSIFNSLQGLFIFIFHCAMKENVQKQWRQHLCCGRFRLADNSDWSKTATNIIKKSSDNLGKSLSSSSIGSNSTYLTSKSKSSSTTYFKRNSHTDNVSYEHSFNKSGSLRQCFHGQVLVKTGPC

SEQ ID NO: 519 - protein, 1193 aa, Homo sapiens
MMFRSDRMWSCHWKWKPSPLLFLFALYIMCVPHSVWGCANCRVVLSNPSGTFTSPCYPNDYPNSQACMWTLRAPTGYIIQITFNDFDIEEAPNCIYDSLSLDNGESQTKFCGATAKGLSFNSSANEMHVSFSSDFSIQKKGFNASYIRVAVSLRNQKVILPQTSDAYQVSVAKSISIPELSAFTLCFEATKVGHEDSDWTAFSYSNASFTQLLSFGKAKSGYFLSISDSKCLLNNALPVKEKEDIFAESFEQLCLVWNNSLGSIGVNFKRNYETVPCDSTISKVIPGNGKLLLGSNQNEIVSLKGDIYNFRLWNFTMNAKILSNLSCNVKGNVVDWQNDFWNIPNLALKAESNLSCGSYLIPLPAAELASCADLGTLCQDGIIYRISVVIQNILRHPEVKVQSKVAEWLNSTFQNWNYTVYVVNISFHLSAGEDKIKVKRSLEDEPRLVLWALLVYNATNNTNLEGKIIQQKLLKNNESLDEGLRLHTVNVRQLGHCLAMEEPKGYYWPSIQPSEYVLPCPDKPGFSASRICFYNATNPLVTYWGPVDISNCLKEANEVANQILNLTADGQNLTSANITNIVEQVKRIVNKEENIDITLGSTLMNIFSNILSSSDSDLLESSSEALKTIDELAFKIDLNSTSHVNITTRNLALSVSSLLPGTNAISNFSIGLPSNNESYFQMDFESGQVDPLASVILPPNLLENLSPEDSVLVRRAQFTFFNKTGLFQDVGPQRKTLVSYVMACSIGNITIQNLKDPVQIKIKHTRTQEVHHPICAFWDLNKNKSFGGWNTSGCVAHRDSDASETVCLCNHFTHFGVLMDLPRSASQLDARNTKVLTFISYIGCGISAIFSAATLLTYVAFEKLRRDYPSKILMNLSTALLFLNLLFLLDGWITSFNVDGLCIAVAVLLHFFLLATFTWMGLEAIHMYIALVKVFNTYIRRYILKFCIIGWGLPALVVSVVLASRNNNEVYGKESYGKEKGDEFCWIQDPVIFYVTCAGYFGVMFFLNIAMFIVVMVQICGRNGKRSNRTLREEVLRNLRSVVSLTFLLGMTWGFAFFAWGPLNIPFMYLFSIFNSLQGLFIFIFHCAMKENVQKQWRQHLCCGRFRLADNSDWSKTATNIIKKSSDNLGKSLSSSSIGSNSTYLTSKSKSSSTTYFKRNSHTDNVSYEHSFNKSGSLRQCFHGQVLVKTGPC

SEQ ID NO: 520 - protein, 1250 aa, Homo sapiens
MMFRSDRMWSCHWKWKPSPLLFLFALYIMCVPHSVWGCANCRVVLSNPSGTFTSPCYPNDYPNSQACMWTLRAPTGYIIQITFNDFDIEEAPNCIYDSLSLDNGESQTKFCGATAKGLSFNSSANEMHVSFSSDFSIQKKGFNASYIRVAVSLRNQKVILPQTSDAYQVSVAKSISIPELSAFTLCFEATKVGHEDSDWTAFSYSNASFTQLLSFGKAKSGYFLSISDSKCLLNNALPVKEKEDIFAESFEQLCLVWNNSLGSIGVNFKRNYETVPCDSTISKVIPGNGKLLLGSNQNEIVSLKGDIYNFRLWNFTMNAKILSNLSCNVKGNVVDWQNDFWNIPNLALKAESNLSCGSYLIPLPAAELASCADLGTLCQATVNSPSTTPPTVTTNMPVTNRIDKQRNDGIIYRISVVIQNILRHPEVKVQSKVAEWLNSTFQNWNYTVYVVNISFHLSAGEDKIKVKRSLEDEPRLVLWALLVYNATNNTNLEGKIIQQKLLKNNESLDEGLRLHTVNVRQLGHCLAMEEPKGYYWPSIQPSEYVLPCPDKPGFSASRICFYNATNPLVTYWGPVDISNCLKEANEVANQILNLTADGQNLTSANITNIVEQVKRIVNKEENIDITLGSTLMNIFSNILSSSDSDLLESSSEALKTIDELAFKIDLNSTSHVNITTRNLALSVSSLLPGTNAISNFSIGLPSNNESYFQMDFESGQVDPLASVILPPNLLENLSPEDSVLVRRAQFTFFNKTGLFQDVGPQRKTLVSYVMACSIGNITIQNLKDPVQIKIKHTRTQEVHHPICAFWDLNKNKSFGGWNTSGCVAHRDSDASETVCLCNHFTHFGVLMDLPRSASQLDARNTKVLTFISYIGCGISAIFSAATLLTYVAFEKLRRDYPSKILMNLSTALLFLNLLFLLDGWITSFNVDGLCIAVAVLLHFFLLATFTWMGLEAIHMYIALVKVFNTYIRRYILKFCIIGWGLPALVVSVVLASRNNNEVYGKESYGKEKGDEFCWIQDPVIFYVTCAGYFGVMFFLNIAMFIVVMVQICGRNGKRSNRTLREEVLRNLRSVVSLTFLLGMTWGFAFFAWGPLNIPFMYLFSIFNSLQGLFIFIFHCAMKENVQKQWRQHLCCGRFRLADNSDWSKTATNIIKKSSDNLGKSLSSSSIGSNSTYLTSKSKSSSTTYFKRNSHTDSASMDKSLSKLAHADGDQTSIIPVHQVIDKVKGYCNAHSDNFYKNIIMSDTFSHSTKF

SEQ ID NO: 521 - protein, 1222 aa, Homo sapiens
MMFRSDRMWSCHWKWKPSPLLFLFALYIMCVPHSVWGCANCRVVLSNPSGTFTSPCYPNDYPNSQACMWTLRAPTGYIIQITFNDFDIEEAPNCIYDSLSLDNGESQTKFCGATAKGLSFNSSANEMHVSFSSDFSIQKKGFNASYIRVAVSLRNQKVILPQTSDAYQVSVAKSISIPELSAFTLCFEATKVGHEDSDWTAFSYSNASFTQLLSFGKAKSGYFLSISDSKCLLNNALPVKEKEDIFAESFEQLCLVWNNSLGSIGVNFKRNYETVPCDSTISKVIPGNGKLLLGSNQNEIVSLKGDIYNFRLWNFTMNAKILSNLSCNVKGNVVDWQNDFWNIPNLALKAESNLSCGSYLIPLPAAELASCADLGTLCQDGIIYRISVVIQNILRHPEVKVQSKVAEWLNSTFQNWNYTVYVVNISFHLSAGEDKIKVKRSLEDEPRLVLWALLVYNATNNTNLEGKIIQQKLLKNNESLDEGLRLHTVNVRQLGHCLAMEEPKGYYWPSIQPSEYVLPCPDKPGFSASRICFYNATNPLVTYWGPVDISNCLKEANEVANQILNLTADGQNLTSANITNIVEQVKRIVNKEENIDITLGSTLMNIFSNILSSSDSDLLESSSEALKTIDELAFKIDLNSTSHVNITTRNLALSVSSLLPGTNAISNFSIGLPSNNESYFQMDFESGQVDPLASVILPPNLLENLSPEDSVLVRRAQFTFFNKTGLFQDVGPQRKTLVSYVMACSIGNITIQNLKDPVQIKIKHTRTQEVHHPICAFWDLNKNKSFGGWNTSGCVAHRDSDASETVCLCNHFTHFGVLMDLPRSASQLDARNTKVLTFISYIGCGISAIFSAATLLTYVAFEKLRRDYPSKILMNLSTALLFLNLLFLLDGWITSFNVDGLCIAVAVLLHFFLLATFTWMGLEAIHMYIALVKVFNTYIRRYILKFCIIGWGLPALVVSVVLASRNNNEVYGKESYGKEKGDEFCWIQDPVIFYVTCAGYFGVMFFLNIAMFIVVMVQICGRNGKRSNRTLREEVLRNLRSVVSLTFLLGMTWGFAFFAWGPLNIPFMYLFSIFNSLQGLFIFIFHCAMKENVQKQWRQHLCCGRFRLADNSDWSKTATNIIKKSSDNLGKSLSSSSIGSNSTYLTSKSKSSSTTYFKRNSHTDSASMDKSLSKLAHADGDQTSIIPVHQVIDKVKGYCNAHSDNFYKNIIMSDTFSHSTKF

SEQ ID NO: 522 - protein, 103 aa, Homo sapiens
  SITE 1: note = misc_feature - Xaa can be any naturally occurring amino acid
XLGSTLMNIFSNILSSSDSDLLESSSEALKTIDELAFKIDLNSTSHVNITTRNLALSVSSLLPGTNAISNFSIGLPSNNESYFQLLSFTTCFEKTSKSAADGF

SEQ ID NO: 523 - protein, 135 aa, Homo sapiens
  SITE 1: note = misc_feature - Xaa can be any naturally occurring amino acid
XVKVQSKVAEWLNSTFQNWNYTVYVVNISFHLSAGEDKIKVKRSLEDEPRLVLWALLVYNATNNTNLEGKIIQQKLLKNNESLDEGLRLHTVNVRQLGHCLAMEEPKGYYWPSIQPSEYVLPCPDKPGFSASRIW

SEQ ID NO: 524 - protein, 73 aa, Homo sapiens
GQNLIRSIQINITRLAGTFGDVAVGLRISSDHKEQPIVTENAERQLVVKDGATYKVDVVPIKNQVVGCQSLPW

SEQ ID NO: 525 - protein, 123 aa, Homo sapiens
MAAVTHYLYLCQFSWMLIQSVNFWYVLVMNDEHTERRYLLFFLLSWGLPAFVVILLIVILKGIYHQSMSQIYGLIHGDLCFIPNVYAALFTAALVPLTCLVVVFVVFIHAYQVKPQWKAYDDV

SEQ ID NO: 526 - protein, 123 aa, Homo sapiens; identical to SEQ ID NO: 525

SEQ ID NO: 527 - protein, 334 aa, Homo sapiens
MAAVTHYLYLCQFSWMLIQSVNFWYVLVMNDEHTERRYLLFFLLSWGLPAFVVILLIVILKGIYHQSMSQIYGLIHGDLCFIPNVYAALFTAALVPLTCLVVVFVVFIHAYQVKPQWKAYDDVFRGRTNAAEIPLILYLFALISVTWLWGGLHMAYRHFWMLVLFVIFNSLQGLYVFMVYFILHNQMCCPMKASYTVEMNGHPGPSTAFFTPGSGMPPAGGEISKSTQNLIGAMEEVPPDWERASFQQGSQASPDLKPSPQNGATFPSSGGYGQGSLIADEESQEFDDLIFALKTGAGLSVSDNESGQGSQEGGTLTDSQIVELRRIPIADTHL

SEQ ID NO: 528 - protein, 192 aa, Homo sapiens
MAAVTHYLYLCQFSWMLIQSVNFWYVLVMNDEHTERRYLLFFLLSWGLPAFVVILLIVILKGIYHQSMSQIYGLIHGDLCFIPNVYAALFTAALVPLTCLVVVFVVFIHAYQVKPQWKAYDDVFRGRTNAAEIPLILYLFALISVTWLWGGLHMAYRHFWMLVLFVIFNSLQVLVSVSVIMNLVKAARRGAP

SEQ ID NO: 529 - protein, 148 aa, Homo sapiens
MAKRSAAAAVPGMPSASLLVNLLSALLILFVFGETEIRFTGQTEFVVNETSTTVIRLIIERIGEPANVTAIVSLYGEDAGDFFDTYAAAFIPAGETNRTVYIAVCDDDLPEPDETFIFHLTLQLPSIAVSEPKGRNESMPLTLIREKG

SEQ ID NO: 530 - protein, 2038 aa, Homo sapiens
MINESKGDAIYSAVYDVVRNRGNFGDVSVSWVVSPDFTQDVFPVQGTVVFGDQEFSKNITIYSLPDEIPEEMEEFTVILLNGTGGAKVGNRTTATLRIRRNDDPIYFAEPRVVRVQEGETANFTVLRNGSVDVTCMVQYATKDGKATARERDFIPVEKGETLIFEVGSRQQSISIFVNEDGIPETDEPFYIILLNSTGDTVVYQYGVATVIIEANDDPNGIFSLEPIDKAVEEGKTNAFWILRHRGYFGSVSVSWQLFQNDSALQPGQEFYETSGTVNFMDGEEAKPIILHAFPDKIPEFNEFYFLKLVNISGPGGQLAETNLQVTVMVPFNDDPFGVFILDPECLEREVAEDVLSEDDMSYITNFTILRQQGVFGDVQLGWEILSSEFPAGLPPMIDFLLVGIFPTTVHLQQHMRRHHSGTDALYFTGLEGAFGTVNPKYHPSRNNTIANFTFSAWVMPNANTNGFIIAKDDGNGSIYYGVKIQTNESHVTLSLHYKTLGSNATYIAKTTVMKYLEESVWLHLLIILEDGIIEFYLDGNAMPRGIKSLKGEAITDGPGILRIGAGINGNDRFTGLMQDVRSYERKLTLEEIYELHAMPAKSDLHPISGYLEFRQGETNKSFIISARDDNDEEGEELFILKLVSVYGGARISEENTTARLTIQKSDNANGLFGFTGACIPEIAEEGSTISCVVERTRGALDYVHVFYTISQIETDGINYLVDDFANASGTITFLPWQRSEVLNIYVLDDDIPELNEYFRVTLVSAIPGDGKLGSTPTSGASIDPEKETTDITIKASDHPYGLLQFSTGLPPQPKDAMTLPASSVPHITVEEEDGEIRLLVIRAQGLLGRVTAEFRTVSLTAFSPEDYQNVAGTLEFQPGERYKYIFINITDNSIPELEKSFKVELLNLEGGVAELFRVDGSGSGDGDMEFFLPTIHKRASLGVASQILVTIAASDHAHGVFEFSPESLFVSGTEPEDGYSTVTLNVIRHHGTLSPVTLHWNIDSDPDGDLAFTSGNITFEIGQTSANITVEILPDEDPELDKAFSVSVLSVSSGSLGAHINATLTVLASDDPYGIFIFSEKNRPVKVEEATQNITLSIIRLKGLMGKVLVSYATLDDMEKPPYFPPNLARATQGRDYIPASGFALFGANQSEATIAISILDDDEPERSESVFIELLNSTLVAKVQSRSIPNSPRLGPKVETIAQLIIIANDDAFGTLQLSAPIVRVAENHVGPIINVTRTGGAFADVSVKFKAVPITAIAGEDYSIASSDVVLLEGETSKAVPIYVINDIYPELEESFLVQLMNETTGGARLGALTEAVIIIEASDDPYGLFGFQITKLIVEEPEFNSVKVNLPIIRNSGTLGNVTVQWVATINGQLATGDLRVVSGNVTFAPGETIQTLLLEVLADDVPEIEEVIQVQLTDASGGGTIGLDRIANIIIPANDDPYGTVAFAQMVYRVQEPLERSSCANITVRRSGGHFGRLLLFYSTSDIDVVALAMEEGQDLLSYYESPIQGVPDPLWRTWMNVSAVGEPLYTCATLCLKEQACSAFSFFSASEGPQCFWMTSWISPAVNNSDFWTYRKNMTRVASLFSGQAVAGSDYEPVTRQWAIMQEGDEFANLTVSILPDDFPEMDESFLISLLEVHLMNISASLKNQPTIGQPNISTVVIALNGDAFGVFVIYNISPNTSEDGLFVEVQEQPQTLVELMIHRTGGSLGQVAVEWRVVGGTATEGLDFIGAGEILTFAEGETKKTVILTILDDSEPEDDESIIVSLVYTEGGSRILPSSDTVRVNILANDNVAGIVSFQTASRSVIGHEGEILQFHVIRTFPGRGNVTVNWKIIGQNLELNFANFSGQLFFPEGSLNTTLFVHLLDDNIPEEKEVYQVILYDVRTQGVPPAGIALLDAQGYAAVLTVEASDEPHGVLNFALSSRFVLLQEANITIQLFINREFGSLGAINVTYTTVPGMLSLKNQTVGNLAEPEVDFVPIIGFLILEEGETAAAINITILEDDVPELEEYFLVNLTYVGLTMAASTSFPPRL

SEQ ID NO: 531 - protein, 6306 aa, Homo sapiens
MSVFLGPGMPSASLLVNLLSALLILFVFGETEIRFTGQTEFVVNETSTTVIRLIIERIGEPANVTAIVSLYGEDAGDFFDTYAAAFIPAGETNRTVYIAVCDDDLPEPDETFIFHLTLQKPSANVKLGWPRTVTVTILSNDNAFGIISFNMLPSIAVSEPKGRNESMPLTLIREKGTYGMVMVTFEVEGGPNPPDEDLSPVKGNITFPPGRATVIYNLTVLDDEVPENDEIFLIQLKSVEGGAEINTSRNSIEIIIKKNDSPVRFLQSIYLVPEEDHILIIPVVRGKDNNGNLIGSDEYEVSISYAVTTGNSTAHAQQNLDFIDLQPNTTVVFPPFIHESHLKFQIVDDTIPEIAESFHIMLLKDTLQGDAVLISPSVVQVTIKPNDKPYGVLSFNSVLFERTVIIDEDRISRYEEITVVRNGGTHGNVSANWVLTRNSTDPSPVTADIRPSSGVLHFAQGQMLATIPLTVVDDDLPEEAEAYLLQILPHTIRGGAEVSEPAELLFYIQDSDDVYGLITFFPMENQKIESSPGERYLSLSFTRLGGTKGDVRLLYSVLYIPAGAVDPLQAKEGILNISRRNDLIFPEQKTQVTTKLPIRNDAFLQNGAHFLVQLETVELLNIIPLIPPISPRFGEICNISLLVTPAIANGEIGFLSNLPIILHEPEDFAAEVVYIPLHRDGTDGQATVYWSLKPSGFNSKAVTPDDIGPFNGSVLFLSGQSDTTINITIKGDDIPEMNETVTLSLDRVNVENQVLKSGYTSRDLIILENDDPGGVFEFSPASRGPYVIKEGESVELHIIRSRGSLVKQFLHYRVEPRDSNEFYGNTGVLEFKPGEREIVITLLARLDGIPELDEHYWVVLSSHGERESKLGSATIVNITILKNDDPHGIIEFVSDGLIVMINESKGDAIYSAVYDVVRNRGNFGDVSVSWVVSPDFTQDVFPVQGTVVFGDQEFSKNITIYSLPDEIPEEMEEFTVILLNGTGGAKVGNRTTATLRIRRNDDPIYFAEPRVVRVQEGETANFTVLRNGSVDVTCMVQYATKDGKATARERDFIPVEKGETLIFEVGSRQQSISIFVNEDGIPETDEPFYIILLNSTGDTVVYQYGVATVIIEANDDPNGIFSLEPIDKAVEEGKTNAFWILRHRGYFGSVSVSWQLFQNDSALQPGQEFYETSGTVNFMDGEEAKPIILHAFPDKIPEFNEFYFLKLVNISGGSPGPGGQLAETNLQVTVMVPFNDDPFGVFILDPECLEREVAEDVLSEDDMSYITNFTILRQQGVFGDVQLGWEILSSEFPAGLPPMIDFLLVGIFPTTVHLQQHMRRHHSGTDALYFTGLEGAFGTVNPKYHPSRNNTIANFTFSAWVMPNANTNGFIIAKDDGNGSIYYGVKIQTNESHVTLSLHYKTLGSNATYIAKTTVMKYLEESVWLHLLIILEDGIIEFYLDGNAMPRGIKSLKGEAITDGPGILRIGAGINGNDRFTGLMQDVRSYERKLTLEEIYELHAMPAKSDLHPISGYLEFRQGETNKSFIISARDDNDEEGEELFILKLVSVYGGARISEENTTARLTIQKSDNANGLFGFTGACIPEIAEEGSTISCVVERTRGALDYVHVFYTISQIETDGINYLVDDFANASGTITFLPWQRSEVLNIYVLDDDIPELNEYFRVTLVSAIPGDGKLGSTPTSGASIDPEKETTDITIKASDHPYGLLQFSTGLPPQPKDAMTLPASSVPHITVEEEDGEIRLLVIRAQGLLGRVTAEFRTVSLTAFSPEDYQNVAGTLEFQPGERYKYIFINITDNSIPELEKSFKVELLNLEGGVAELFRVDGSGSGDGDMEFFLPTIHKRASLGVASQILVTIAASDHAHGVFEFSPESLFVSGTEPEDGYSTVTLNVIRHHGTLSPVTLHWNIDSDPDGDLAFTSGNITFEIGQTSANITVEILPDEDPELDKAFSVSVLSVSSGSLGAHINATLTVLASDDPYGIFIFSEKNRPVKVEEATQNITLSIIRLKGLMGKVLVSYATLDDMEKPPYFPPNLARATQGRDYIPASGFALFGANQSEATIAISILDDDEPERSESVFIELLNSTLVAKVQSRSIPNSPRLGPKVETIAQLIIIANDDAFGTLQLSAPIVRVAENHVGPIINVTRTGGAFADVSVKFKAVPITAIAGEDYSIASSDVVLLEGETSKAVPIYVINDIYPELEESFLVQLMNETTGGARLGALTEAVIIIEASDDPYGLFGFQITKLIVEEPEFNSVKVNLPIIRNSGTLGNVTVQWVATINGQLATGDLRVVSGNVTFAPGETIQTLLLEVLADDVPEIEEVIQVQLTDASGGGTIGLDRIANIIIPANDDPYGTVAFAQMVYRVQEPLERSSCANITVRRSGGHFGRLLLFYSTSDIDVVALAMEEGQDLLSYYESPIQGVPDPLWRTWMNVSAVGEPLYTCATLCLKEQACSAFSFFSASEGPQCFWMTSWISPAVNNSDFWTYRKNMTRVASLFSGQAVAGSDYEPVTRQWAIMQEGDEFANLTVSILPDDFPEMDESFLISLLEVHLMNISASLKNQPTIGQPNISTVVIALNGDAFGVFVIYNISPNTSEDGLFVEVQEQPQTLVELMIHRTGGSLGQVAVEWRVVGGTATEGLDFIGAGEILTFAEGETKKTVILTILDDSEPEDDESIIVSLVYTEGGSRILPSSDTVRVNILANDNVAGIVSFQTASRSVIGHEGEILQFHVIRTFPGRGNVTVNWKIIGQNLELNFANFSGQLFFPEGSLNTTLFVHLLDDNIPEEKEVYQVILYDVRTQGVPPAGIALLDAQGYAAVLTVEASDEPHGVLNFALSSRFVLLQEANITIQLFINREFGSLGAINVTYTTVPGMLSLKNQTVGNLAEPEVDFVPIIGFLILEEGETAAAINITILEDDVPELEEYFLVNLTYVGLTMAASTSFPPRLDSEGLTAQVIIDANDGARGVIEWQQSRFEVNETHGSLTLVAQRSREPLGHVSLFVYAQNLEAQVGLDYIFTPMILHFADGERYKNVNIMILDDDIPEGDEKFQLILTNPSPGLELGKNTIALIIVLANDDGPGVLSFNNSEHFFLREPTALYVQESVAVLYIVREPAQGLFGTVTVQFIVTEVNSSNESKDLTPSKGYIVLEEGVRFKALQISAILDTEPEMDEYFVCTLFNPTGGARLGVHVQTLITVLQNQAPLGLFSISAVENRATSIDIEEANRTVYLNVSRTNGIDLAVSVQWETVSETAFGMRGMDVVFSVFQSFLDESASGWCFFTLENLIYGIMLRKSSVTVYRWQGIFIPVEDLNIENPKTCEAFNIGFSPYFVITHEERNEEKPSLNSVFTFTSGFKLFLVQTIIILESSQVRYFTSDSQDYLIIASQRDDSELTQVFRWNGGSFVLHQKLPVRGVLTVALFNKGGSVFLAISQANARLNSLLFRWSGSGFINFQEVPVSGTTEVEALSSANDIYLIFAENVFLGDQNSIDIFIWEMGQSSFRYFQSVDFAAVNRIHSFTPASGIAHILLIGQDMSALYCWNSERNQFSFVLEVPSAYDVASVTVKSLNSSKNLIALVGAHSHIYELAYISSHSDFIPSSGELIFEPGEREATIAVNILDDTVPEKEESFKVQLKNPKGGAEIGINDSVTITILSNDDAYGIVAFAQNSLYKQVEEMEQDSLVTLNVERLKGTYGRITIAWEADGSISDIFPTSGVILFTEGQVLSTITLTILADNIPELSEVVIVTLTRITTEGVEDSYKGATIDQDRSKSVITTLPNDSPFGLVGWRAASVFIRVAEPKENTTTLQLQIARDKGLLGDIAIHLRAQPNFLLHVDNQATENEDYVLQETIIIMKENIKEAHAEVSILPDDLPELEEGFIVTITEVNLVNSDFSTGQPSVRRPGMEIAEIMIEENDDPRGIFMFHVTRGAGEVITAYEVPPPLNVLQVPVVRLAGSFGAVNVYWKASPDSAGLEDFKPSHGILEFADKQVTAMIEITIIDDAEFELTETFNISLISVAGGGRLGDDVVVTVVIPQNDSPFGVFGFEEKTVMIDESLSSDDPDSYVTLTVVRSPGGKGTVRLEWTIDEKAKHNLSPLNGTLHFDETESQKTIVLHTLQDTVLEEDRRFTIQLISIDEVEISPVKGSASIIIRGDKRASGEVGIAPSSRHILIGEPSAKYNGTAIISLVRGPGILGEVTVFWRIFPPSVGEFAETSGKLTMRDEQSAVIVVIQALNDDIPEEKSFYEFQLTAVSEGGVLSESSSTANITVVASDSPYGRFAFSHEQLRVSEAQRVNITIIRSSGDFGHVRLWYKTMSGTAEAGLDFVPAAGELLFEAGEMRKSLHVEILDDDYPEGPEEFSLTITKVELQGRGYDFTIQENGLQIDQPPEIGNISIVRIIIMKNDNAEGIIEFDPKYTAFEVEEDVGLIMIPVVRLHGTYGYVTADFISQSSSASPGGVDYILHGSTVTFQHGQNLSFINISIIDDNESEFEEPIEILLTGATGGAVLGRHLVSRIIIAKSDSPFGVIRFLNQSKISIANPNSTMILSLVLERTGGLLGEIQVNWETVGPNSQEALLPQNRDIADPVSGLFYFGEGEGGVRTIILTIYPHEEIEVEETFIIKLHLVKGEAKLDSRAKDVTLTIQEFGDPNGVVQFAPETLSKKTYSEPLALEGPLLITFFVRRVKGTFGEIMVYWELSSEFDITEDFLSTSGFFTIADGESEASFDVHLLPDEVPEIEEDYVIQLVSVEGGAELDLEKSITWFSVYANDDPHGVFALYSDRQSILIGQNLIRSIQINITRLAGTFGDVAVGLRISSDHKEQPIVTENAERQLVVKDGATYKVDVVPIKNQVFLSLGSNFTLQLVTVMLVGGRFYGMPTILQEAKSAVLPVSEKAANSQVGFESTAFQLMNITAGTSHVMISRRGTYGALSVAWTTGYAPGLEIPEFIVVGNMTPTLGSLSFSHGEQRKGVFLWTFPSPGWPEAFVLHLSGVQSSAPGGAQLRSGFIVAEIEPMGVFQFSTSSRNIIVSEDTQMIRLHVQRLFGFHSDLIKVSYQTTAGSAKPLEDFEPVQNGELFFQKFQTEVDFEITIINDQLSEIEEFFYINLTSVEIRGLQKFDVNWSPRLNLDFSVAVITILDNDDLAGMDISFPETTVAVAVDTTLIPVETESTTYLSTSKTTTILQPTNVVAIVTEATGVSAIPEKLVTLHGTPAVSEKPDVATVTANVSIHGTFSLGPSIVYIEEEMKNGTFNTAEVLIRRTGGFTGNVSITVKTFGERCAQMEPNALPFRGIYGISNLTWAVEEEDFEEQTLTLIFLDGERERKVSVQILDDDEPEGQEFFYVFLTNPQGGAQIVEEKDDTGFAAFAMVIITGSDLHNGIIGFSEESQSGLELREGAVMRRLHLIVTRQPNRAFEDVKVFWRVTLNKTVVVLQKDGVNLVEELQSVSGTTTCTMGQTKCFISIELKPEKVPQVEVYFFVELYEATAGAAINNSARFAQIKILESDESQSLVYFSVGSRLAVAHKKATLISLQVARDSGTGLMMSVNFSTQELRSAETIGRTIISPAISGKDFVITEGTLVFEPGQRSTVLDVILTPETGSLNSFPKRFQIVLFDPKGGARIDKVYGTANITLVSDADSQAIWGLADQLHQPVNDDILNRVLHTISMKVATENTDEQLSAMMHLIEKITTEGKIQAFSVASRTLFYEILCSLINPKRKDTRGFSHFAEVTENFAFSLLTNVTCGSPGEKSKTILDSCPYLSILALHWYPQQINGHKFEGKEGDYIRIPERLLDVQDAEIMAGKSTCKLVQFTEYSSQQWFISGNNLPTLKNKVLSLSVKGQSSQLLTNDNEVLYRIYAAEPRIIPQTSLCLLWNQAAASWLSDSQFCKVVEETADYVECACSHMSVYAVYARTDNLSSYNEAFFTSGFICISGLCLAVLSHIFCARYSMFAAKLLTHMMAASLGTQILFLASAYASPQLAEESCSAMAAVTHYLYLCQFSWMLIQSVNFWYVLVMNDEHTERRYLLFFLLSWGLPAFVVILLIVILKGIYHQSMSQIYGLIHGDLCFIPNVYAALFTAALVPLTCLVVVFVVFIHAYQVKPQWKAYDDVFRGRTNAAEIPLILYLFALISVTWLWGGLHMAYRHFWMLVLFVIFNSLQGLYVFMVYFILHNQMCCPMKASYTVEMNGHPGPSTAFFTPGSGMPPAGGEISKSTQNLIGAMEEVPPDWERASFQQGSQASPDLKPSPQNGATFPSSGGYGQGSLIADEESQEFDDLIFALKTGAGLSVSDNESGQGSQEGGTLTDSQIVELRRIPIADTHL

SEQ ID NO: 532 - protein, 6306 aa, Homo sapiens; identical to SEQ ID NO: 531

SEQ ID NO: 533 - protein, 938 aa, Homo sapiens
NSTMILSLVLERTGGLLGEIQVNWETVGPNSQEALLPQNRDIADPVSGLFYFGEGEGGVRTIILTIYPHEEIEVEETFIIKLHLVKGEAKLDSRAKDVTLTIQEFGDPNGVVQFAPETLSKKTYSEPLALEGPLLITFFVRRVKGTFGEIMVYWELSSEFDITEDFLSTSGFFTIADGESEASFDVHLLPDEVPEIEEDYVIQLVSVEGGAELDLEKSITWFSVYANDDPHGVFALYSDRQSILIGQNLIRSIQINITRLAGTFGDVAVGLRISSDHKEQPIVTENAERQLVVKDGATYKVDVVPIKNQVFLSLGSNFTLQLVTVMLVGGRFYGMPTILQEAKSAVLPVSEKAANSQVGFESTAFQLMNITAGTSHVMISRRGTYGALSVAWTTGYAPGLEIPEFIVVGNMTPTLGSLSFSHGEQRKGVFLWTFPSPGWPEAFVLHLSGVQSSAPGGAQLRSGFIVAEIEPMGVFQFSTSSRNIIVSEDTQMIRLHVQRLFGFHSDLIKVSYQTTAGSAKPLEDFEPVQNGELFFQKFQTEVDFEITIINDQLSEIEEFFYINLTSVEIRGLQKFDVNWSPRLNLDFSVAVITILDNDDLAGMDISFPETTVAVAVDTTLIPVETESTTYLSTSKTTTILQPTNVVAIVTEATGVSAIPEKLVTLHGTPAVSEKPDVATVTANVSIHGTFSLGPSIVYIEEEMKNGTFNTAEVLIRRTGGFTGNVSITVKTFGERCAQMEPNALPFRGIYGISNLTWAVEEEDFEEQTLTLIFLDGERERKVSVQILDDDEPEGQEFFYVFLTNPQGGAQIVEEKDDTGFAAFAMVIITGSDLHNGIIGFSEESQSGLELREGAVMRRLHLIVTRQPNRAFEDVKVFWRVTLNKTVVVLQKDGVNLVEELQSVSGTTTCTMGQTKCFISIELKPEKRNATEPIIKSFS

SEQ ID NO: 534 - protein, 2624 aa, Homo sapiens
QLKNPKGGAEIGINDSVTITILSNDDAYGIVAFAQNSLYKQVEEMEQDSLVTLNVERLKGTYGRITIAWEADGSISDIFPTSGVILFTEGQVLSTITLTILADNIPELSEVVIVTLTRITTEGVEDSYKGATIDQDRSKSVITTLPNDSPFGLVGWRAASVFIRVAEPKENTTTLQLQIARDKGLLGDIAIHLRAQPNFLLHVDNQATENEDYVLQETIIIMKENIKEAHAEVSILPGAGEVITAYEVPPPLNVLQVPVVRLAGSFGAVNVYWKASPDSAGLEDFKPSHGILEFADKQVTAMIEITIIDDAEFELTETFNISLISVAGGGRLGDDVVVTVVIPQNDSPFGVFGFEEKTVMIDESLSSDDPDSYVTLTVVRSPGGKGTVRLEWTIDEKAKHNLSPLNGTLHFDETESQKTIVLHTLQDTVLEEDRRFTIQLISIDEVEISPVKGSASIIIRGDKRASGEVGIAPSSRHILIGEPSAKYNGTAIISLVRGPGILGEVTVFWRIFPPSVGEFAETSGKLTMRDEQSAVIVVIQALNDDIPEEKSFYEFQLTAVSEGGVLSESSSTANITVVASDSPYGRFAFSHEQLRVSEAQRVNITIIRSSGDFGHVRLWYKTMSGTAEAGLDFVPAAGELLFEAGEMRKSLHVEILDDDYPEGPEEFSLTITKVELQGRGYDFTIQENGLQIDQPPEIGNISIVRIIIMKNDNAEGIIEFDPKYTAFEVEEDVGLIMIPVVRLHGTYGYVTADFISQSSSASPGGVDYILHGSTVTFQHGQNLSFINISIIDDNESEFEEPIEILLTGATGGAVLGRHLVSRIIIAKSDSPFGVIRFLNQSKISIANPNSTMILSLVLERTGGLLGEIQVNWETVGPNSQEALLPQNRDIADPVSGLFYFGEGEGGVRTIILTIYPHEEIEVEETFIIKLHLVKGEAKLDSRAKDVTLTIQEFGDPNGVVQFAPETLSKKTYSEPLALEGPLLITFFVRRVKGTFGEIMVYWELSSEFDITEDFLSTSGFFTIADGESEASFDVHLLPDEVPEIEEDYVIQLVSVEGGAELDLEKSITWFSVYANDDPHGVFALYSDRQSILIGQNLIRSIQINITRLAGTFGDVAVGLRISSDHKEQPIVTENAERQLVVKDGATYKVDVVPIKNQVFLSLGSNFTLQLVTVMLVGGRFYGMPTILQEAKSAVLPVSEKAANSQVGFESTAFQLMNITAGTSHVMISRRGTYGALSVAWTTGYAPGLEIPEFIVVGNMTPTLGSLSFSHGEQRKGVFLWTFPSPGWPEAFVLHLSGVQSSAPGGAQLRSGFIVAEIEPMGVFQFSTSSRNIIVSEDTQMIRLHVQRLFGFHSDLIKVSYQTTAGSAKPLEDFEPVQNGELFFQKFQTEVDFEITIINDQLSEIEEFFYINLTSVEIRGLQKFDVNWSPRLNLDFSVAVITILDNDDLAGMDISFPETTVAVAVDTTLIPVETESTTYLSTSKTTTILQPTNVVAIVTEATGVSAIPEKLVTLHGTPAVSEKPDVATVTANVSIHGTFSLGPSIVYIEEEMKNGTFNTAEVLIRRTGGFTGNVSITVKTFGERCAQMEPNALPFRGIYGISNLTWAVEEEDFEEQTLTLIFLDGERERKVSVQILDDDEPEGQEFFYVFLTNPQGGAQIVEEKDDTGFAAFAMVIITGSDLHNGIIGFSEESQSGLELREGAVMRRLHLIVTRQPNRAFEDVKVFWRVTLNKTVVVLQKDGVNLVEELQSVSGTTTCTMGQTKCFISIELKPEKVPQVEVYFFVELYEATAGAAINNSARFAQIKILESDESQSLVYFSVGSRLAVAHKKATLISLQVARDSGTGLMMSVNFSTQELRSAETIGRTIISPAISGKDFVITEGTLVFEPGQRSTVLDVILTPETGSLNSFPKRFQIVLFDPKGGARIDKVYGTANITLVSDADSQAIWGLADQLHQPVNDDILNRVLHTISMKVATENTDEQLSAMMHLIEKITTEGKIQAFSVASRTLFYEILCSLINPKRKDTRGFSHFAEVTENFAFSLLTNVTCGSPGEKSKTILDSCPYLSILALHWYPQQINGHKFEGKEGDYIRIPERLLDVQDAEIMAGKSTCKLVQFTEYSSQQWFISGNNLPTLKNKVLSLSVKGQSSQLLTNDNEVLYRIYAAEPRIIPQTSLCLLWNQAAASWLSDSQFCKVVEETADYVECACSHMSVYAVYARTDNLSSYNEAFFTSGFICISGLCLAVLSHIFCARYSMFAAKLLTHMMAASLGTQILFLASAYASPQLAEESCSAMAAVTHYLYLCQFSWMLIQSVNFWYVLVMNDEHTERRYLLFFLLSWGLPAFVVILLIVILKGIYHQSMSQIYGLIHGDLCFIPNVYAALFTAALVPLTCLVVVFVVFIHAYQVKPQWKAYDDVFRGRTNAAEIPLILYLFALISVTWLWGGLHMAYRHFWMLVLFVIFNSLQGLYVFMVYFILHNQMCCPMKASYTVEMNGHPGPSTAFFTPGSGMPPAGGEISKSTQNLIGAMEEVPPDWERASFQQGSQASPDLKPSPQNGATFPSSGGYGQGSLIADEESQEFDDLIFALKTGAGLSVSDNESGQGSQEGGTLTDSQIVELRRIPIADTHL

SEQ ID NO: 535 - protein, 390 aa, Homo sapiens
TFQHGQNLSFINISIIDDNESEFEEPIEILLTGATGGAVLGRHLVSRIIIAKSDSPFGVIRFLNQSKISIANPNSTMILSLVLERTGGLLGEIQVNWETVGPNSQEALLPQNRDIADPVSGLFYFGEGEGGVRTIILTIYPHEEIEVEETFIIKLHLVKGEAKLDSRAKDVTLTIQEFGDPNGVVQFAPETLSKKTYSEPLALEGPLLITFFVRRVKGTFGEIMVYWELSSEFDITEDFLSTSGFFTIADGESEASFDVHLLPDEVPEIEEDYVIQLVSVEGGAELDLEKSITWFSVYANDDPHGVFALYSDRQSILIGQNLIRSIQINITRLAGTFGDVAVGLRISSDHKEQPIVTENAERQLVVKDGATYKVDVVPIKNQVCGISSVS

SEQ ID NO: 536 - protein, 99 aa, Homo sapiens
VPHITVEEEDGEIRLLVIRAQGLLGRVTAEFRTVSLTAFSPEDYQNVAGTLEFQPGERYKYIFINITDNSIPELEKSFKVELLNLEGGVCEFLVRAGDE

SEQ ID NO: 537 - protein, 80 aa, Homo sapiens
  SITE 1: note = misc_feature - Xaa can be any naturally occurring amino acid
XDEQLSAMMHLIEKITTEGKIQAFSVASRTLFYEILCSLINPKRKDTRGFSHFAEVTENFAFSLLTNVTCGSPGEKSPAC

SEQ ID NO: 538 - protein, 72 aa, Homo sapiens
  SITE 1: note = misc_feature - Xaa can be any naturally occurring amino acid
XEGSTISCVVERTRGALDYVHVFYTISQIETDGINYLVDDFANASGTITFLPWQRSELLIEVSLPIIIYNCN

SEQ ID NO: 539 - protein, 567 aa, Homo sapiens
  SITE 1: note = misc_feature - Xaa can be any naturally occurring amino acid
XITVEEEDGEIRLLVIRAQGLLGRVTAEFRTVSLTAFSPEDYQNVAGTLEFQPGERYKYIFINITDNSIPELEKSFKVELLNLEGGAELFRVDGSGSGDGDMEFFLPTIHKRASLGVASQILVTIAASDHAHGVFEFSPESLFVSGTEPEDGYSTVTLNVIRHHGTLSPVTLHWNIDSDPDGDLAFTSGNITFEIGQTSANITVEILPDEDPELDKAFSVSVLSVSSGSLGAHINATLTVLASDDPYGIFIFSEKNRPVKVEEATQNITLSIIRLKGLMGKVLVSYATLDDMEKPPYFPPNLARATQGRDYIPASGFALFGANQSEATIAISILDDDEPERSESVFIELLNSTLVAKVQSRSIPNSPRLGPKVETIAQLIIIANDDAFGTLQLSAPIVRVAENHVGPIINVTRTGGAFADVSVKFKAVPITAIAGEDYSIASSDVVLLEGETSKAVPIYVINDIYPELEESFLVQLMNETTGGARLGALTEAVIIIEASDDPYGLFGFQITKLIVEEPEFNSVKVNLPIIRNSGTLGNVTVQWVATINGQLATGDLRVVSGYPSATN

SEQ ID NO: 540 - protein, 65 aa, Homo sapiens
  SITE 1: note = misc_feature - Xaa can be any naturally occurring amino acid
XLPTIHKRASLGVASQILVTIAASDHAHGVFEFSPESLFVSGTEPEDGYSTVTLNFQILHVLGLR

SEQ ID NO: 541 - protein, 173 aa, Homo sapiens
MSVKSSKLMFLCHGSSRSLHSGSLTSCNTGVCCSLDADKYENDPELEKIRRERNYSWMDIITICKDKLPNYEEKIKMFYEEHLHLDDEIRYILDGSGYFDVRDKEDQWIRIFMEKGDMVTLPAGIYHRFTVDEKNYTKAMRLFVGEPVWTAYNRPADHFEARGQYVKFLAQTA

SEQ ID NO: 542 - protein, 179 aa, Homo sapiens
MVQAWYMDDAPGDPRQPHRPDPGRPVGLEQLRRLGVLYWKLDADKYENDPELEKIRRERNYSWMDIITICKDKLPNYEEKIKMFYEEHLHLDDEIRYILDGSGYFDVRDKEDQWIRIFMEKGDMVTLPAGIYHRFTVDEKNYTKAMRLFVGEPVWTAYNRPADHFEARGQYVKFLAQTA

SEQ ID NO: 543 - protein, 117 aa, Homo sapiens
  SITE 1: note = misc_feature - Xaa can be any naturally occurring amino acid
XRWECCAFSPGPACVVALAVASLPLNCAASADSKRGRWARDSSTCASRRVCGAAGDVRGDSCPSVAASVAPACDPGGQNYTKAMRLFVGEPVWTAYNRPADHFEARGQYVKFLAQTA

SEQ ID NO: 544 - protein, 59 aa, Homo sapiens
MKYPLMPLVNDLTFSFLVFWFCLPVGLLLLLIIWLRFLLSQDILQVRRYRYDANILTAS

SEQ ID NO: 545 - protein, 80 aa, Homo sapiens
MKYPLMPLVNDLTFSFLVFWFCLPVGLLLLLIIWLRFLLSQDSEENDSSVCLDWEPWSKGPAEFCWKGTLHGQEKERPCW

SEQ ID NO: 546 - protein, 80 aa, Homo sapiens; identical to SEQ ID NO: 545

SEQ ID NO: 547 - protein, 179 aa, Homo sapiens
  SITE 1: note = misc_feature - Xaa can be any naturally occurring amino acid
XWFCLPVGLLLLLIIWLRFLLSQDSEENDSSVCLDWEPWSKGPAEFCWKGTLHGQEKERPCCLVFLESAGQWQWQKWMGETCQGGKRTLATVVPPWNPQLISSSDRHVKASRGPSPSPASQMTSSPAGSRSSLGGHGSSEQAHGEKLANLIQRGLKAGLGRRVWVHIKEARVFPYPGDP

SEQ ID NO: 548 - protein, 244 aa, Homo sapiens
MLLLGAVLLLLALPGHDQETTTQGPGVLLPLPKGACTGWMAGIPGHPGHNGAPGRDGRDGTPGEKGEKGDPGLIGPKGDIGETGVPGAEGPRGFPGIQGRKGEPGEGAYVYRSAFSVGLETYVTIPNMPIRFTKIFYNQQNHYDGSTGKFHCNIPGLYYFAYHITVYMKDVKVSLFKKDKAMLFTYDQYQENNVDQASGSVLLHLEVGDQVWLQVYGEGERNGLYADNDNDSTFTGFLLYHDTN

SEQ ID NO: 549 - protein, 244 aa, Homo sapiens; identical to SEQ ID NO: 548

SEQ ID NO: 550 - protein, 117 aa, Homo sapiens
MGSQVAFLPPPPARSSPDAARIRVKRYRQSMNNFQGLRSFGCRFGTCTVQKLAHQIYQFTDKDKDNVAPRSKISPQGYGRRRRRSLPEAGPGRTLVSSKPQAHGAPAPPSGSAPHFL

SEQ ID NO: 551 - protein, 83 aa, Homo sapiens
MKLVSVALMYLGSLAFLGADTARLDVASEFRKKWNKWALSRGKRELRMSSSYPTGLADVKAGPAQTLIRPQDMKGASRSPEDR

SEQ ID NO: 552 - protein, 83 aa, Homo sapiens; identical to SEQ ID NO: 551

SEQ ID NO: 553 - protein, 139 aa, Homo sapiens
MKLVSVALMYLGSLAFLGADTARLDVASEFRKKWNKWALSRGKRELRMSSSYPTGLADVKAGPAQTLIRPQDMKGASRSPEDSCLSSPSPRPQQSGCRPHPSQALPPEHEQLPGPPELWLPLRDVHGAEAGTPDLPVHR

SEQ ID NO: 554 - protein, 185 aa, Homo sapiens
MKLVSVALMYLGSLAFLGADTARLDVASEFRKKWNKWALSRGKRELRMSSSYPTGLADVKAGPAQTLIRPQDMKGASRSPEDSSPDAARIRVKRYRQSMNNFQGLRSFGCRFGTCTVQKLAHQIYQFTDKDKDNVAPRSKISPQGYGRRRRRSLPEAGPGRTLVSSKPQAHGAPAPPSGSAPHFL

SEQ ID NO: 555 - protein, 185 aa, Homo sapiens; identical to SEQ ID NO: 554

SEQ ID NO: 556 - protein, 185 aa, Homo sapiens; identical to SEQ ID NO: 554

SEQ ID NO: 557 - protein, 138 aa, Homo sapiens
MSSSYPTGLADVKAGPAQTLIRPQDMKGASRSPEDSSPDAARIRVKRYRQSMNNFQGLRSFGCRFGTCTVQKLAHQIYQFTDKDKDNVAPRSKISPQGYGRRRRRSLPEAGPGRTLVSSKPQAHGAPAPPSGSAPHFL

SEQ ID NO: 558 - protein, 148 aa, Homo sapiens
MARIPTAALGCISLLCLQLPGSLSRSLGGDPRPVKPREPPARSPSSSLQPRHPAPRPVVWKLHRALQAQRGAGLAPVMGQPLRDGGRQHSGPRRHSGPRRTQAQLLRVGCVLGTCQVQNLSHRLWQLMGPAGRQDSAPVDPSSPHSYG

SEQ ID NO: 559 - protein, 148 aa, Homo sapiens; identical to SEQ ID NO: 558

SEQ ID NO: 560 - protein, 153 aa, Homo sapiens
MTIHILILLLLLAFSAQGDLDTAARRGQHQVPQHRGHVCYLGVCRTHRLAEIIYWIRCLHQGALGEGQPRAPGPLQLWAPPVARGGSPARFPGFRPAARGLAQCPARWVTSGTARPLLGFSLPICMLELLLHISSPLTPAPETVFPSPSPGCD

SEQ ID NO: 561 - protein, 57 aa, Homo sapiens
LLEPELPGSALRSLWSSLCLGPAPAPPGPVSPEGRLAAAWDALIVRPVRRWRRVAVG

SEQ ID NO: 562 - protein, 222 aa, Homo sapiens
MAASCRVVTSISDIPTGIPVHLELASMTNRELMSSIVHQVFPAVTSLGLNEQELLFLTQSASGPHSSLSSWNGVPDVGMVSDILFWILKEHGRSKSRASDLTRIHFHTLVYHILATVDGHWANQLAAVAAGARVAGTQACATETIDTSRVSLRAPQEFMTSHSEAGSRIVLNPNKPVVEWHREGISFHFTPVLVCKDPIRTVGLGDAISAEGLFYSEVHPHY

SEQ ID NO: 563 - protein, 78 aa, Homo sapiens
MALWRGSAYAGFLALAVGCVFLLEPELPGSALRSLWSSLCLGPAPAPPGPVSPEGRLAAAWDALIVRPVRRWRRVAVG

SEQ ID NO: 564 - protein, 78 aa, Homo sapiens; identical to SEQ ID NO: 563

SEQ ID NO: 565 - protein, 78 aa, Homo sapiens; identical to SEQ ID NO: 563

SEQ ID NO: 566 - protein, 113 aa, Homo sapiens
MALWRGSAYAGFLALAVGCVFLLEPELPGSALRSLWSSLCLGPAPAPPGPVSPEGRLAAAWDALIVRPVRRWRRVAVGFFFAVQLVQSYMSFLMTMSLFHQSHCRKWMSSTSF

SEQ ID NO: 567 - protein, 496 aa, Homo sapiens
MALWRGSAYAGFLALAVGCVFLLEPELPGSALRSLWSSLCLGPAPAPPGPVSPEGRLAAAWDALIVRPVRRWRRVAVGVNACVDVVLSGVKLLQALGLSPGNGKDHSILHSRNDLEEAFIHFMGKGAAAERFFSDKETFHDIAQVASEFPGAQHYVGGNAALIGQKFAANSDLKVLLCGPVGPKLHELLDDNVFVPPESLQEVDEFHLILEYQAGEEWGQLKAPHANRFIFSHDLSNGAMNMLEVFVSSLEEFQPDLVVLSGLHMMEGQSKELQRKRLLEVVTSISDIPTGIPVHLELASMTNRELMSSIVHQVFPAVTSLGLNEQELLFLTQSASGPHSSLSSWNGVPDVGMVSDILFWILKEHGRSKSRASDLTRIHFHTLVYHILATVDGHWANQLAAVAAGARVAGTQACATETIDTSRVSLRAPQEFMTSHSEAGSRIVLNPNKPVVEWHREGISFHFTPVLVCKDPIRTVGLGDAISAEGLFYSEVHPHY

SEQ ID NO: 568 - protein, 154 aa, Homo sapiens
MGKGAAAERFFSDKETFHDIAQVASEFPGAQHYVGGNAALIGQKFAANSDLKVLLCGPVGPKLHELLDDNVFVPPESLQEVDEFHLILEYQAGEEWGQLKAPHANRFIFSHDLSNGAMNMLEVFVSSLEEFQPDLVVLSGLHMMEGQSKELQRK

SEQ ID NO: 569 - protein, 204 aa, Homo sapiens
  SITE 1: note = misc_feature - Xaa can be any naturally occurring amino acid
XEPELPGSALRSLWSSLCLGPAPAPPGPVSPEGRLAAAWDALIVRPVRRWRRVAVGVNACVDVVLSGVKLLQALGLSPGNGKDHSILHSRNDLEEAFIHFMGKGAAAERFFSDKETFHDIAQVASEFPGAQHYVGGNAALIGQKFAANSDLKVLLCGPVGPKLHELLDDNVFVPPESLQEVDEFHLILEYQAAGLSRGDFPWAE

SEQ ID NO: 570 - protein, 26 aa, Homo sapiens
  SITE 1: note = misc_feature - Xaa can be any naturally occurring amino acid
XKRLLEVLASQGHILAAGCGACLLLQ

SEQ ID NO: 571 - protein, 363 aa, Homo sapiens
MAAAAMAAAAGGGAGAARSLSRFRGCLAGALLGDCVGSFYEAHDTVDLTSVLRHVQSLEPDPGTPGSERTEALYYTDDTAMARALVQSLLAKEAFDEVDMAHRFAQEYKKDPDRGYGAGVVTVFKKLLNPKCRDVFEPARAQFNGKGSYGNGGAMRVAGISLAYSSVQDVQKFARLSAQLTHASSLGYNGAILQALAVHLALQGESSSEHFLKQLLGHMEDLEGDAQSVLDARELGMEERPYSSRLKKIGELLDQASVTREEVVSELGNGIAAFESVPTAIYCFLRCMEPDPEIPSAFNSLQRTLIYSISLGGDTDTIATMAGAIAGAYYGMDQVPESWQQSCEGYEETDILAQSLHRVFQKS

SEQ ID NO: 572 - protein, 69 aa, Homo sapiens
KPDAERQTDEEKEELKKPKKEDSSPKEETDKWAVEKGKDHKEPRKGEELEEEWTPTEKVRPLCRRSPSG

SEQ ID NO: 573 - protein, 54 aa, Homo sapiens
LMKVVNEECPTITRTYSLGKSSRGLKIYAMEISDNPGEHELGEGLWGPAAGLCC

SEQ ID NO: 574 - protein, 1158 aa, Homo sapiens
MAAVRGAPLLSCLLALLALCPGGRPQTVLTDDEIEEFLEGFLSELEPEPREDDVEAPPPPEPTPRVRKAQAGGKPGKRPGTAAEVPPEKTKDKGKKGKKDKGPKVPKESLEGSPRPPKKGKEKPPKATKKPKEKPPKATKKPKEKPPKATKKPKEKPPKATKKPPSGKRPPILAPSETLEWPLPPPPSPGPEELPQEGGAPLSNNWQNPGEETHVEAREHQPEPEEETEQPTLDYNDQIEREDYEDFEYIRRQKQPRPPPSRRRRPERVWPEPPEEKAPAPAPEERIEPPVKPLLPPLPPDYGDGYVIPNYDDMDYYFGPPPPQKPDAERQTDEEKEELKKPKKEDSSPKEETDKWAVEKGKDHKEPRKGEELEEEWTPTEKVKCPPIGMESHRIEDNQIRASSMLRHGLGAQRGRLNMQTGATEDDYYDGAWCAEDDARTQWIEVDTRRTTRFTGVITQGRDSSIHDDFVTTFFVGFSNDSQTWVMYTNGYEEMTFHGNVDKDTPVLSELPEPVVARFIRIYPLTWNGSLCMRLEVLGCSVAPVYSYYAQNEVVATDDLDFRHHSYKDMRQLMKVVNEECPTITRTYSLGKSSRGLKIYAMEISDNPGEHELGEPEFRYTAGIHGNEVLGRELLLLLMQYLCREYRDGNPRVRSLVQDTRIHLVPSLNPDGYEVAAQMGSEFGNWALGLWTEEGFDIFEDFPDLNSVLWGAEERKWVPYRVPNNNLPIPERYLSPDATVSTEVRAIIAWMEKNPFVLGANLNGGERLVSYPYDMARTPTQEQLLAAAMAAARGEDEDEVSEAQETPDHAIFRWLAISFASAHLTLTEPYRGGCQAQDYTGGMGIVNGAKWNPRTGTINDFSYLHTNCLELSFYLGCDKFPHESELPREWENNKEALLTFMEQVHRGIKGVVTDEQGIPIANATISVSGINHGVKTASGGDYWRILNPGEYRVTAHAEGYTPSAKTCNVDYDIGATQCNFILARSNWKRIREIMAMNGNRPIPHIDPSRPMTPQQRRLQQRRLQHRLRLRAQMRLRRLNATTTLGPHTVPPTLPPAPATTLSTTIEPWGLIPPTTAGWEESETETYTEVVTEFGTEVEPEFGTKVEPEFETQLEPEFETQLEPEFEEEEEEEKEEEIATGQAFPFTTVETYTVNFGDF

SEQ ID NO: 575 - protein, 162 aa, Homo sapiens
MPPEKTKDKGKKGKKDKGPKVPKESLEGSPRPPKKGKEKPPKATKKPKEKPPKATKKPKEKPPKATKKPKEKPPKATKKPPSGKRPPILAPSETLEWPLPPPPSPGPEELPQEGGAPLSNNWQNPGEETHVEAREHQPEPEEETEQPTLDYNDQIEREDYED

SEQ ID NO: 576 - protein, 733 aa, Homo sapiens
MRKWWAPCPGSWLCSHCLGEGWALRGAGSTALRPASPQTFHGNVDKDTPVLSELPEPVVARFIRIYPLTWNGSLCMRLEVLGCSVARECGGLAGALSGGGVLGWASRHPAKDNPASLAAVYSYYAQNEVVATDDLDFRHHSYKDMRQLMKVVNEECPTITRTYSLGKSSRGLKIYAMEISDNPGEHELGEPEFRYTAGIHGNEVLGRELLLLLMQYLCREYRDGNPRVRSLVQDTRIHLVPSLNPDGYEVAAQMGSEFGNWALGLWTEEGFDIFEDFPDLNSVLWGAEERKWVPYRVPNNNLPIPERYLSPDATVSTEVRAIIAWMEKNPFVLGANLNGGERLVSYPYDMARTPTQEQLLAAAMAAARGEDEDEVSEAQETPDHAIFRWLAISFASAHLTLTEPYRGGCQAQDYTGGMGIVNGAKWNPRTGTINDFSYLHTNCLELSFYLGCDKFPHESELPREWENNKEALLTFMEQVHRGIKGVVTDEQGIPIANATISVSGINHGVKTASGGDYWRILNPGEYRVTAHAEGYTPSAKTCNVDYDIGATQCNFILARSNWKRIREIMAMNGNRPIPHIDPSRPMTPQQRRLQQRRLQHRLRLRAQMRLRRLNATTTLGPHTVPPTLPPAPATTLSTTIEPWGLIPPTTAGWEESETETYTEVVTEFGTEVEPEFGTKVEPEFETQLEPEFETQLEPEFEEEEEEEKEEEIATGQAFPFTTVETYTVNFGDF

SEQ ID NO: 577 - protein, 104 aa, Homo sapiens
RTQWIEVDTRRTTRFTGVITQGRDSSIHDDFVTTFFVGFSNDSQTWVMYTNGYEEMVGTMPRLLALLPLSGRGVGSQRGWQYCSEACLSPDLSWERGQGHTRAE

SEQ ID NO: 578 - protein, 251 aa, Homo sapiens
  SITE 1: note = misc_feature - Xaa can be any naturally occurring amino acid
XELEPEPREDDVEAPPPPEPTPRVRKAQAGGKPGKRPGTAAEVPPEKTKDKGKKGKKDKGPKVPKESLEGSPRPPKKGKEKPPKATKKPKEKPPKATKKPKEKPPKATKKPKEKPPKATKKPPSGKRPPILAPSETLEWPLPPPPSPGPEELPQEGGAPLSNNWQNPGEETHVEAREHQPEPPVKPLLPPLPPDYGDGYVIPNYDDMDYYFGPPPPQKPDAERQTDEEKEELKKPKKEDSSPKEETDKWAV

SEQ ID NO: 579 - protein, 66 aa, Homo sapiens
  SITE 1: note = misc_feature - Xaa can be any naturally occurring amino acid
XFRHHSYKDMRQLMKVVNEECPTITRTYSLGKSSRGLKIYAMEISDNPGEHELGEGLWGPAAGLCC

SEQ ID NO: 580 - protein, 481 aa, Homo sapiens
MAASWSLLVTLRPLAQSPLRGRCVGCGAWAAALAPLATAPGKPFWKAYTVQTSESMTPTATSETYLKALAVCHGPLDHYDFLIKAHELKDDEHQRRVIQCLQKLHEDLKGYNIEAEGLFSKLFSRSKPPRGLYVYGDVGTGKTMVMDMFYAYVEMKRKKRVHFHGFMLDVHKRIHRLKQSLPKRKPGFMAKSYDPIAPIAEEISEEACLLCFDEFQVTDIADAMILKQLFENLFKNGVVVVATSNRPPEDLYKNGLQRANFVPFIAVLKEYCNTVQLDSGIDYRKRELPAAGKLYYLTSEADVEAVMDKLFDELAQKQNDLTRPRILKVQGRELRLNKACGTVADCTFEELCERPLGASDYLELSKNFDTIFLRNIPQFTLANRTQGRRFITLIDNFYDLKVRIICSASTPISSLFLHQHHDSELEQSRILMDDLGLSQDSAEGLSMFTGEEEIFAFQRTISRLTEMQTEQYWNEGDRTKK

SEQ ID NO: 581 - protein, 160 aa, Homo sapiens
MCATPPSLNFKKLAYTVQTSESMTPTATSETYLKALAVCHGPLDHYDFLIKAHELKDDEHQRRVIQCLQKLHEDLKGYNIEAEGLFSKLFSRSKPPRGLYVYGDVGTGKTMVMDMFYAYVEMKRKKRVHFHGFMLDVHKRIHRLKQSLPKRKPGFMAKSY

SEQ ID NO: 582 - protein, 80 aa, Homo sapiens
  SITE 1: note = misc_feature - Xaa can be any naturally occurring amino acid
XIHRLKQSLPKRKPGFMAKSYDPIAPIAEEISEEACLLCFDEFQVTDIADAMILKQLFENLFKNGVVVVATSNRPPEGIL

SEQ ID NO: 583 - protein, 349 aa, Homo sapiens
  SITE 1: note = misc_feature - Xaa can be any naturally occurring amino acid
XKPFWKGTGKTMVMDMFYAYVEMKRKKRVHFHGFMLDVHKRIHRLKQSLPKRKPGFMAKSYDPIAPIAEEISEEACLLCFDEFQVTDIADAMILKQLFENLFKNGVVVVATSNRPPEDLYKNGLQRANFVPFIAVLKEYCNTVQLDSGIDYRKRELPAAGKLYYLTSEADVEAVMDKLFDELAQKQNDLTRPRILKVQGRELRLNKACGTVADCTFEELCERPLGASDYLELSKNFDTIFLRNIPQFTLANRTQGRRFITLIDNFYDLKVRIICSASTPISSLFLHQHHDSELEQSRILMDDLGLSQDSAEGLSMFTGEEEIFAFQRTISRLTEMQTEQYWNEGDRTKK

SEQ ID NO: 584 - protein, 599 aa, Homo sapiens
MKLLKLTGFIFFLFFLTESLTLPTQPRDIENFNSTQKFIEDNIEYITIIAFAQYVQEATFEEMEKLVKDMVEYKDRCMADKTLPECSKLPNNVLQEKICAMEGLPQKHNFSHCCSKVDAQRRLCFFYNKKSDVGFLPPFPTLDPEEKCQAYESNRESLLNHFLYEVARRNPFVFAPTLLTVAVHFEEVAKSCCEEQNKVNCLQTRAIPVTQYLKAFSSYQKHVCGALLKFGTKVVHFIYIAILSQKFPKIEFKELISLVEDVSSNYDGCCEGDVVQCIRDTSKVMNHICSKQDSISSKIKECCEKKIPERGQCIINSNKDDRPKDLSLREGKFTDSENVCQERDADPDTFFAKFTFEYSRRHPDLSIPELLRIVQIYKDLLRNCCNTENPPGCYRYAEDKFNETTEKSLKMVQQECKHFQNLGKDGLKYHYLIRLTKIAPQLSTEELVSLGEKMVTAFTTCCTLSEEFACVDNLADLVFGELCGVNENRTINPAVDHCCKTNFAFRRPCFESLKADKTYVPPPFSQDLFTFHADMCQSQNEELQRKTDRFLVNLVKLKHELTDEELQSLFTNFANVVDKCCKAESPEVCFNEESPKIGN

SEQ ID NO: 585 - protein, 622 aa, Homo sapiens
MKWVESIFLIFLLNFTESRTLHRNEYGIASILDSYQCTAEISLADLATIFFAQFVQEATYKEVSKMVKDALTAIEKPTGDEQSSGCLENQLPAFLEELCHEKEILEKYGHSDCCSQSEEGRHNCFLAHKKPTPASIPLFQVPEPVTSCEAYEEDRETFMNKFIYEIARRHPFLYAPTILLWAARYDKIIPSCCKAENAVECFQTKAATVTKELRESSLLNQHACAVMKNFGTRTFQAITVTKLSQKFTKVNFTEIQKLVLDVAHVHEHCCRGDVLDCLQDGEKIMSYICSQQDTLSNKITECCKLTTLERGQCIIHAENDEKPEGLSPNLNRFLGDRDFNQFSSGEKNIFLASFVHEYSRRHPQLAVSVILRVAKGYQELLEKCFQTENPLECQDKGEEELQKYIQESQALAKRSCGLFQKLGEYYLQNAFLVAYTKKAPQLTSSELMAITRKMAATAATCCQLSEDKLLACGEGAADIIIGHLCIRHEMTPVNPGVGQCCTSSYANRRPCFSSLVVDETYVPPAFSDDKFIFHKDLCQAQGVALQTMKQEFLINLVKQKPQITEEQLEAVIADFSGLLEKCCQGQEQEVCFAEEGKRRQNESFIRCELFSLILTDLTLFVN

SEQ ID NO: 586 - protein, 609 aa, Homo sapiens
MKWVESIFLIFLLNFTESRTLHRNEYGIASILDSYQCTAEISLADLATIFFAQFVQEATYKEVSKMVKDALTAIEKPTGDEQSSGCLENQLPAFLEELCHEKEILEKYGHSDCCSQSEEGRHNCFLAHKKPTPASIPLFQVPEPVTSCEAYEEDRETFMNKFIYEIARRHPFLYAPTILLWAARYDKIIPSCCKAENAVECFQTKAATVTKELRESSLLNQHACAVMKNFGTRTFQAITVTKLSQKFTKVNFTEIQKLVLDVAHVHEHCCRGDVLDCLQDGEKIMSYICSQQDTLSNKITECCKLTTLERGQCIIHAENDEKPEGLSPNLNRFLGDRDFNQFSSGEKNIFLASFVHEYSRRHPQLAVSVILRVAKGYQELLEKCFQTENPLECQDKGEEELQKYIQESQALAKRSCGLFQKLGEYYLQNAFLVAYTKKAPQLTSSELMAITRKMAATAATCCQLSEDKLLACGEGAADIIIGHLCIRHEMTPVNPGVGQCCTSSYANRRPCFSSLVVDETYVPPAFSDDKFIFHKDLCQAQGVALQTMKQEFLINLVKQKPQITEEQLEAVIADFSGLLEKCCQGQEQEVCFAEEGQKLISKTRAALGV

SEQ ID NO: 587 - protein, 346 aa, Homo sapiens
MARKSNLPVLLVPFLLCQALVRCSSPLPLVVNTWPFKNATEAAWRALASGGSALDAVESGCAMCEREQCDGSVGFGGSPDELGETTLDAMIMDGTTMDVGAVGDLRRIKNAIGVARKVLEHTTHTLLVGESATTFAQSMGFINEDLSTTASQALHSDWLARNCQPNYWRNVIPDPSKYCGPYKPPGILKQDIPIHKETEDDRGHDTIGMVVIHKTGHIAAGTSTNGIKFKIHGRVGDSPIPGAGAYADDTAGAAAATGNGDILMRFLPSYQAVEYMRRGEDPTIACQKVISRIQKHFPEFFGAVICANVTGSYGAACNKLSTFTQFSFMVYNSEKNQPTEEKVDCI

SEQ ID NO: 588 - protein, 155 aa, Homo sapiens
RKVLEHTTHTLLVGESATTFAQSMGFINEDLSTTASQALHSDWLARNCQPNYWRNVIPDPSKYCGPYKPPGILKQDIPIHKETEDDRGHDTIGDSPIPGAGAYADDTAGAAAATGNGDILMRFLPSYQAVEYMRRGEDPTIACQKVISRIQKHFP

SEQ ID NO: 589 - protein, 138 aa, Homo sapiens
  SITE 1: note = misc_feature - Xaa can be any naturally occurring amino acid
XGDLRRIKNAIGVARKVLEHTTHTLLVGESATTFAQSMGFINEDLSTTASQALHSDWLARNCQPNYWRNVIPDPSKYCGPYKPPGILKQDIPIHKETEDDRGHDTIGMVVIHKTGHIAAGTSTNGDSPIPGAGAYADD

SEQ ID NO: 590 - protein, 342 aa, Homo sapiens
MAAGTAVGAWVLVLSLWGAVVGAQNITARIGEPLVLKCKGAPKKPPQRLEWKLGGGPWDSVARVLPNGSLFLPAVGIQDEGIFRCQAMNRNGKETKSNYRVRVYQIPGKPEIVDSASELTAGVPNKVGTCVSEGSYPAGTLSWHLDGKPLVPNEKGVSVKEQTRRHPETGLFTLQSELMVTPARGGDPRPTFSCSFSPGLPRHRALRTAPIQPRVWEPVPLEEVQLVVEPEGGAVAPGGTVTLTCEVPAQPSPQIHWMKDVSDLERGAGRTRRGGANCRLCGRIRAGNSSPGPGDPGRPGDSRPAHWGHLVAKAATPRRGEEGPRKPGGRGGACRTESVGGT

SEQ ID NO: 591 - protein, 234 aa, Homo sapiens
MAAGTAVGAWVLVLSLWGAVVGAQNITARIGEPLVLKCKGAPKKPPQRLEWKLNTGRTEAWKVLSPQGGGPWDSVARVLPNGSLFLPAVGIQDEGIFRCQAMNRNGKETKSNYRSLRTFTITASDWIFPPSEIPGKPEIVDSASELTAGVPNKVGTCVSEGSYPAGTLSWHLDGKPLVPNEKGVSVKEQTRRHPETGLFTLQSELMVTPARGGDPRPTFSCSFSPGLPRHRALR

SEQ ID NO: 592 - protein, 128 aa, Homo sapiens
MAAGTAVGAWVLVLSLWGAVVGAQNITARIGEPLVLKCKGAPKKPPQRLEWKLNTGRTEAWKVLSPQGGGPWDSVARVLPNGSLFLPAVGIQDEGIFRCQAMNRNGKETKSNYRVRVYQFENLHNYSL

SEQ ID NO: 593 - protein, 404 aa, Homo sapiens
MAAGTAVGAWVLVLSLWGAVVGAQNITARIGEPLVLKCKGAPKKPPQRLEWKLNTGRTEAWKVLSPQGGGPWDSVARVLPNGSLFLPAVGIQDEGIFRCQAMNRNGKETKSNYRVRVYQIPGKPEIVDSASELTAGVPNKVGTCVSEGSYPAGTLSWHLDGKPLVPNEKGVSVKEQTRRHPETGLFTLQSELMVTPARGGDPRPTFSCSFSPGLPRHRALRTAPIQPRVWEPVPLEEVQLVVEPEGGAVAPGGTVTLTCEVPAQPSPQIHWMKDGVPLPLPPSPVLILPEIGPQDQGTYSCVATHSSHGPQESRAVSISIIEPGEEGPTAGSVGGSGLGTLALALGILGGLGTAALLIGVILWQRRQRRGEERKAPENQEEEEERAELNQSEEPEAGESSTGGP

SEQ ID NO: 594 - protein, 347 aa, Homo sapiens
MAAGTAVGAWVLVLSLWGAVVGAQNITARIGEPLVLKCKGAPKKPPQRLEWKLNTGRTEAWKVLSPQGGGPWDSVARVLPNGSLFLPAVGIQDEGIFRCQAMNRNGKETKSNYRVRVYQIPGKPEIVDSASELTAGVPNKVGTCVSEGSYPAGTLSWHLDGKPLVPNEKGVSVKEQTRRHPETGLFTLQSELMVTPARGGDPRPTFSCSFSPGLPRHRALRTAPIQPRVWEPVPLEEVQLVVEPEGGAVAPGGTVTLTCEVPAQPSPQIHWMKDGVPLPLPPSPVLILPEIGPQDQGTYSCVATHSSHGPQESRAVSISIIEPGEEGPTAGEGFDKVREAEDSPQHM

SEQ ID NO: 595 - protein, 233 aa, Homo sapiens
MAAGTAVGAWVLVLSLWGAVVGAQNITARIGEPLVLKCKGAPKKPPQRLEWKLNTGRTEAWKVLSPQGGGPWDSVARVLPNGSLFLPAVGIQDEGIFRCQAMNRNGKETKSNYRVRVYQIPGKPEIVDSASELTAGVPNKVVEESRRSRKRPCEQEVGTCVSEGSYPAGTLSWHLDGKPLVPNEKGVSVKEQTRRHPETGLFTLQSELMVTPARGGDPRPTFSCSFSPGLPRH

SEQ ID NO: 596 - protein, 363 aa, Homo sapiens
MAAGTAVGAWVLVLSLWGAVVGAQNITARIGEPLVLKCKGAPKKPPQRLEWKLNTGRTEAWKVLSPQGGGPWDSVARVLPNGSLFLPAVGIQDEGIFRCQAMNRNGKETKSNYRVRVYQIPGKPEIVDSASELTAGVPNKVVEESRRSRKRPCEQEVGTCVSEGSYPAGTLSWHLDGKPLVPNEKGVSVKEQTRRHPETGLFTLQSELMVTPARGGDPRPTFSCSFSPGLPRHRALRTAPIQPRVWEPVPLEEVQLVVEPEGGAVAPGGTVTLTCEVPAQPSPQIHWMKDGVPLPLPPSPVLILPEIGPQDQGTYSCVATHSSHGPQESRAVSISIIEPGEEGPTAGEGFDKVREAEDSPQHM

SEQ ID NO: 597 - protein, 420 aa, Homo sapiens
MAAGTAVGAWVLVLSLWGAVVGAQNITARIGEPLVLKCKGAPKKPPQRLEWKLNTGRTEAWKVLSPQGGGPWDSVARVLPNGSLFLPAVGIQDEGIFRCQAMNRNGKETKSNYRVRVYQIPGKPEIVDSASELTAGVPNKVVEESRRSRKRPCEQEVGTCVSEGSYPAGTLSWHLDGKPLVPNEKGVSVKEQTRRHPETGLFTLQSELMVTPARGGDPRPTFSCSFSPGLPRHRALRTAPIQPRVWEPVPLEEVQLVVEPEGGAVAPGGTVTLTCEVPAQPSPQIHWMKDGVPLPLPPSPVLILPEIGPQDQGTYSCVATHSSHGPQESRAVSISIIEPGEEGPTAGSVGGSGLGTLALALGILGGLGTAALLIGVILWQRRQRRGEERKAPENQEEEEERAELNQSEEPEAGESSTGGP

SEQ ID NO: 598 - protein, 153 aa, Homo sapiens
MAAGTAVGAWVLVLSLWGAVVGAQNITARIGEPLVLKCKGAPKKPPQRLEWKLNTGRTEAWKVLSPQGGGPWDSVARVLPNGSLFLPAVGIQDEGILGGLGTAALLIGVILWQRRQRRGEERKAPENQEEEEERAELNQSEEPEAGESSTGGP

SEQ ID NO: 599 - protein, 133 aa, Homo sapiens
MKDGVPLPLPPSPVLILPEIGPQDQGTYSCVATHSSHGPQESRAVSISIIEPGEEGPTAGSVGGSGLGTLALALGILGGLGTAALLIGVILWQRRQRRGEERKAPENQEEEEERAELNQSEEPEAGESSTGGP

SEQ ID NO: 600 - protein, 294 aa, Homo sapiens
MNRNGKETKSNYRVRVYQIPGKPEIVDSASELTAGVPNKVGTCVSEGSYPAGTLSWHLDGKPLVPNEKGVSVKEQTRRHPETGLFTLQSELMVTPARGGDPRPTFSCSFSPGLPRHRALRTAPIQPRVWEPVPLEEVQLVVEPEGGAVAPGGTVTLTCEVPAQPSPQIHWMKDGVPLPLPPSPVLILPEIGPQDQGTYSCVATHSSHGPQESRAVSISIIGSVGGSGLGTLALALGILGGLGTAALLIGVILWQRRQRRGEERKAPENQEEEEERAELNQSEEPEAGESSTGGP

SEQ ID NO: 601 - protein, 394 aa, Homo sapiens
MENTDSDNLLRRAACQEAQVFGNQLIPPNAQVKKATVFLNPAACKGKARTLFEKNAAPILHLSGMDVTIVKTDYEGQAKKLLELMENTDVIIVAGGDGTLQEVVTGVLRRTDEATFSKIPIGFIPLGETSSLSHTLFAESGNKVQHITDATLAIVKGETVPLDVLQIKGEKEQPVFAMTGLRWGSFRDAGVKVSKYWYLGPLKIKAAHFFSTLKEWPQTHQASISYTGPTERPPNEPEETPVQRPSLYRRILRRLASYWAQPQDALSQEVSPEVWKDVQLSTIELSITTRNNQLDPTSKEDFLNICIEPDTISKGDFITIGSRKVRNPKLHVEGTECLQASQCTLLIPEGAGGSFSIDSEEYEAMPVEVKLLPRKLQFFCDPRKREQMLTSPTQ

SEQ ID NO: 602 - protein, 65 aa, Homo sapiens
MTVFFKTLRNHWKKTTAGLCLLTWGGHWLYGKHCDNLLRRAACQEAQHYQDESRWEPTLSRTPGS

SEQ ID NO: 603 - protein, 422 aa, Homo sapiens
MTVFFKTLRNHWKKTTAGLCLLTWGGHWLYGKHCDNLLRRAACQEAQVFGNQLIPPNAQVKKATVFLNPAACKGKARTLFEKNAAPILHLSGMDVTIVKTDYEGQAKKLLELMENTDVIIVAGGDGTLQEVVTGVLRRTDEATFSKIPIGFIPLGETSSLSHTLFAESGNKVQHITDATLAIVKGETVPLDVLQIKGEKEQPVFAMTGLRWGSFRDAGVKVSKYWYLGPLKIKAAHFFSTLKEWPQTHQASISYTGPTERPPNEPEETPVQRPSLYRRILRRLASYWAQPQDALSQEVSPEVWKDVQLSTIELSITTRNNQLDPTSKEDFLNICIEPDTISKGDFITIGSRKVRNPKLHVEGTECLQASQCTLLIPEGAGGSFSIDSEEYEAMPVEVKLLPRKLQFFCDPRKREQMLTSPTQ

SEQ ID NO: 604 - protein, 244 aa, Homo sapiens
MTVFFKTLRNHWKKTTAGLCLLTWGGHWLYGKHCDNLLRRAACQEAQVFGNQLIPPNAQVKKATVFLNPAACKGTLFEKNAAPILHLSGMDVTIVKTDYEGQAKKLLELMENTDVIIVAGGDGTLQEVVTGVLRRTDEATFSKIPIGFIPLGETSSLSHTLFAESGNKVQHITDATLAIVKGETVPLDVLQIKGEKEQPVFAMTGLRWGSFRDAGVKVSKYWYLGPLKIKAAHFFSTLKPFPKR

SEQ ID NO: 605 - protein, 244 aa, Homo sapiens; identical to SEQ ID NO: 604

SEQ ID NO: 606 - protein, 46 aa, Homo sapiens
MTVFFKTLRNHWKKTTAGLCLLTWGGHWLYGKHWCLAINSFLPMHK

SEQ ID NO: 607 - protein, 189 aa, Homo sapiens
MAEAAAAAGGTGLGAGASYGSAADRDRDPDPDRAGRRLRVLSGHLLGRPREALSTNECKARRAASAATAAPTATPAAQESGTIPKKRQEVMKWNGWGYNDSKFIFNKKGQIELTGKRGISDPLTVFEQTEAAAREEILANGGSLSHHHGVGKLRKQWLKESISDVGFGMLKSVKEYVDPNNIFGNRNLL

SEQ ID NO: 608 - protein, 658 aa, Homo sapiens
MAEAAAAAGGTGLGAGASYGSAADRDRDPDPDRAGRRLRVLSGHLLGRPREALSTNECKARRAASAATAAPTATPAAQESGTIPKKRQEVMKWNGWGYNDSKFIFNKKGQIELTGKRYPLSGMGLPTFKEWIQNTLGVNVEHKTTSKASLNPSDTPPSVVNEDFLHDLKETNISYSQEADDRVFRAHGHCLHEIFLLREGMFERIPDIVLWPTCHDDVVKIVNLACKYNLCIIPIGGGTSVSYGLMCPADETRTIISLDTSQMNRILWVDENNLTAHVEAGITGQELERQLKESGYCTGHEPDSLEFSTVGGWVSTRASGMKKNIYGNIEDLVVHIKMVTPRGIIEKSCQGPRMSTGPDIHHFIMGSEGTLGVITEATIKIRPVPEYQKYGSVAFPNFEQGVACLREIAKQRCAPASIRLMDNKQFQFGHALKPQVSSIFTSFLDGLKKFYITKFKGFDPNQLSVATLLFEGDREKVLQHEKQVYDIAAKFGGLAAGEDNGQRGYLLTYVIAYIRDLALEYYVLGESFETSAPWDRVVDLCRNVKERITRECKEKGVQFAPFSTCRVTQTYDAGACIYFYFAFNYRGISDPLTVFEQTEAAAREEILANGGSLSHHHGVGKLRKQWLKESISDVGFGMLKSVKEYVDPNNIFGNRNLL

SEQ ID NO: 609 - protein, 543 aa, Homo sapiens
  SITE 1: note = misc_feature - Xaa can be any naturally occurring amino acid
XQEVMKWNGWGYNDSKFIFNKKGQIELTGKRYPLSGMGLPTFKEWIQNTLGVNVEHKTTSKASLNPSDTPPSVVNEDFLHDLKETNISYSQEADDRVFRAHGHCLHEIFLLREGMFERIPDIVLWPTCHDDVVKIVNLACKYNLCIIPIGGGTSVSYGLMCPADETRTIISLDTSQMNRILWVDENNLTAHVEAGITGQELERQLKESGYCTGHEPDSLEFSTVGGWVSTRASGMKKNIYGNIEDLVVHIKMVTPRGIIEKSCQGPRMSTGPDIHHFIMGSEGTLGVITEATIKIRPVPEYQKYGSVAFPNFEQGVACLREIAKQRCAPASIRLMDNKQFQFGHALKPQVSSIFTSFLDGLKKFYITKFKGFDPNQLSVATLLFEGDREKVLQHEKQVYDIAAKFGGLAAGEDNGQRGYLLTYVIAYIRDLALEYYVLGESFETSAPWDRVVDLCRNVKERITRECKEKGVQFAPFSTCRVTQTYDAGACIYFYFAFNYRGISDPLTVFEQTEAAAREEILANGGSLSHHHGGLQLEGTCYES

SEQ ID NO: 610 - protein, 560 aa, Homo sapiens
  SITE 1: note = misc_feature - Xaa can be any naturally occurring amino acid
XYPLSGMGLPTFKEWIQNTLGVNVEHKTTSKASLNPSDTPPSVVNEDFLHDLKETNISYSQEADDRVFRAHGHCLHEIFLLREGMFERIPDIVLWPTCHDDVVKIVNLACKYNLCIIPIGGGTSVSYGLMCPADETRTIISLDTSQMNRILWVDENNLTAHVEAGITGQELERQLKESGYCTGHEPDSLEFSTVGGWVSTRASGMKKNIYGNIEDLVVHIKMVTPRGIIEKSCQGPRMSTGPDIHHFIMGSEGTLGVITEATIKIRPVPEYQKYGSVAFPNFEQGVACLREIAKQRCAPASIRLMDNKQFQFGHALKPQVSSIFTSFLDGLKKFYITKFKGFDPNQLSVATLLFEGDREKVLQHEKQVYDIAAKFGGLAAGEDNGQRGYLLTYVIAYIRDLALEYYVLGESFETSAPWDRVVDLCRNVKERITRECKEKGVQFAPFSTCRVTQTYDAGACIYFYFAFNYRGISDPLTVFEQTEAAAREEILANGGSLSHHHGEHEPHSTSTHHGRYRIPQICGRSFPPLDNFQDSSRFLPEPSTQECISPWFHHIHSLPF

SEQ ID NO: 611 - protein, 131 aa, Homo sapiens
MEKIPVSAFLLLVALSYTLARDTTVKPGAKKDTKDSRPKLPQTLSRGWGDQLIWTQTYEEALYKSKTSNKPLMIIHHLDECPHSQALKKVFAENKEIQKLAEQFVLLNLVYETTDKHLSPDGQYVPRIMFV

SEQ ID NO: 612 - protein, 188 aa, Homo sapiens
MEKIPVSAFLLLVALSYTLARDTTVKPGAKKDTKDSRPKLPQTLSRGWGDQLIWTQTYEEALYKSKTSNKPLMIIHHLDECPHSQALKKVFAENKEIQKLAEQFVLLNLVYETTDKHLSPDGQYVPRIMFVDPSLTVRADITGRYSNRLYAYEPADTALCKCDLQFGCCPRVEHLYCCSDGTRGCMVR

SEQ ID NO: 613 - protein, 175 aa, Homo sapiens
MEKIPVSAFLLLVALSYTLARDTTVKPGAKKDTKDSRPKLPQTLSRGWGDQLIWTQTYEEALYKSKTSNKPLMIIHHLDECPHSQALKKVFAENKEIQKLAEQFVLLNLVYETTDKHLSPDGQYVPRIMFVDPSLTVRADITGRYSNRLYAYEPADTALLLDNMKKALKLLKTEL

SEQ ID NO: 614 - protein, 119 aa, Homo sapiens
PLMIIHHLDECPHSQALKKVFAENKEIQKLAEQFVLLNLVYETTDKHLSPDGQYVPRIMFVDPSLTVRADITGRYSNRLYAYEPADTALCKCDLQFGCCPRVEHLYCCSDGTRGCMVSA

SEQ ID NO: 615 - protein, 163 aa, Homo sapiens
MMLHSALGLCLLLVTVSSNLAIAIKKEKRPPQTLSRGWGDDITWVQTYEEGLFYAQKSKKPLMVIHHLEDCQYSQALKKVFAQNEEIQEMAQNKFIMLNLMHETTDKNLSPDGQYVPRIMFVDPSLTVRADIAGRYSNRLYTYEPRDLPLCKYSQMISNSGHS

SEQ ID NO: 616 - protein, 166 aa, Homo sapiens
MMLHSALGLCLLLVTVSSNLAIAIKKEKRPPQTLSRGWGDDITWVQTYEEGLFYAQKSKKPLMVIHHLEDCQYSQALKKVFAQNEEIQEMAQNKFIMLNLMHETTDKNLSPDGQYVPRIMFVDPSLTVRADIAGRYSNRLYTYEPRDLPLLIENMKKALRLIQSEL

SEQ ID NO: 617 - protein, 129 aa, Homo sapiens
  SITE 1: note = misc_feature - Xaa can be any naturally occurring amino acid
XNIQNTFPTRALAKSGWGDDITWVQTYEEGLFYAQKSKKPLMVIHHLEDCQYSQALKKVFAQNEEIQEMAQNKFIMLNLMHETTDKNLSPDGQYVPRIMFVDPSLTVRADIAGRYSNRLYTYEPRDLPL

SEQ ID NO: 618 - protein, 2045 aa, Homo sapiens
MAGRSHPGPLRPLLPLLVVAACVLPGAGGTCPERALERREEEANVVLTGTVEEILNVDPVQHTYSCKVRVWRYLKGKDLVARESLLDGGNKVVISGFGDPLICDNQVSTGDTRIFFVNPAPPYLWPAHKNELMLNSSLMRITLRNLEEVEFCVEDKPGTHFTPVPPTPPDACRGMLCGFGAVCEPNAEGPGRASCVCKKSPCPSVVAPVCGSDASTYSNECELQRAQCSQQRRIRLLSRGPCGSRDPCSNVTCSFGSTCARSADGLTASCLCPATCRGAPEGTVCGSDGADYPGECQLLRRACARQENVFKKFDGPCDPCQGALPDPSRSCRVNPRTRRPEMLLRPESCPARQAPVCGDDGVTYENDCVMGRSGAARGLLLQKVRSGQCQGRDQCPEPCRFNAVCLSRRGRPRCSCDRVTCDGAYRPVCAQDGRTYDSDCWRQQAECRQQRAIPSKHQGPCDQAPSPCLGVQCAFGATCAVKNGQAACECLQACSSLYDPVCGSDGVTYGSACELEATACTLGREIQVARKGPCDRCGQCRFGALCEAETGRCVCPSECVALAQPVCGSDGHTYPSECMLHVHACTHQISLHVASAGPCETCGDAVCAFGAVCSAGQCVCPRCEHPPPGPVCGSDGVTYGSACELREAACLQQTQIEEARAGPCEQAECGSGGSGSGEDGDCEQELCRQRGGIWDEDSEDGPCVCDFSCQSVPGSPVCGSDGVTYSTECELKKARCESQRGLYVAAQGACRGPTFAPLPPVAPLHCAQTPYGCCQDNITAARGVGLAGCPSACQCNPHGSYGGTCDPATGQCSCRPGVGGLRCDRCEPGFWNFRGIVTDGRSGCTPCSCDPQGAVRDDCEQMTGLCSCKPGVAGPKCGQCPDGRALGPAGCEADASAPATCAEMRCEFGARCVEESGSAHCVCPMLTCPEANATKVCGSDGVTYGNECQLKTIACRQGLQISIQSLGPCQEAVAPSTHPTSASVTVTTPGLLLSQALPAPPGALPLAPSSTAHSQTTPPPSSRPRTTASVPRTTVWPVLTVPPTAPSPAPSLVASAFGESGSTDGSSDEELSGDQEASGGGSGGLEPLEGSSVATPGPPVERASCYNSALGCCSDGKTPSLDAEGSNCPATKVFQGVLELEGVEGQELFYTPEMADPKSELFGETARSIESTLDDLFRNSDVKKDFRSVRLRDLGPGKSVRAIVDVHFDPTTAFRAPDVARALLRQIQVSRRRSLGVRRPLQEHVRFMDFDWFPAFITGATSGAIAAGATARATTASRLPSSAVTPRAPHPSHTSQPVAKTTAAPTTRRPPTTAPSRVPGRRPPAPQQPPKPCDSQPCFHGGTCQDWALGGGFTCSCPAGRGGAVCEKVLGAPVPAFEGRSFLAFPTLRAYHTLRLALEFRALEPQGLLLYNGNARGKDFLALALLDGRVQLRFDTGSGPAVLTSAVPVEPGQWHRLELSRHWRRGTLSVDGETPVLGESPSGTDGLNLDTDLFVGGVPEDQAAVALERTFVGAGLRGCIRLLDVNNQRLELGIGPGAATRGSGVGECGDHPCLPNPCHGGAPCQNLEAGRFHCQCPPGRVGPTCADEKSPCQPNPCHGAAPCRVLPEGGAQCECPLGREGTFCQTASGQDGSGPFLADFNGFSHLELRGLHTFARDLGEKMALEVVFLARGPSGLLLYNGQKTDGKGDFVSLALRDRRLEFRYDLGKGAAVIRSREPVTLGAWTRVSLERNGRKGALRVGDGPRVLGESPVPHTVLNLKEPLYVGGAPDFSKLARAAAVSSGFDGAIQLVSLGGRQLLTPEHVLRQVDVTSFAGHPCTRASGHPCLNGASCVPREAAYVCLCPGGFSGPHCEKGLVEKSAGDVDTLAFDGRTFVEYLNAVTESEKALQSNHFELSLRTEATQGLVLWSGKATERADYVALAIVDGHLQLSYNLGSQPVVLRSTVPVNTNRWLRVVAHREQREGSLQVGNEAPVTGSSPLGATQLDTDGALWLGGLPELPVGPALPKAYGTGFVGCLRDVVVGRHPLHLLEDAVTKPELRPCPTP

SEQ ID NO: 619 - protein, 86 aa, Homo sapiens
MPPLPLARDTRQPPGASLLVRGFMVPCNACLILLATATLGFAVLLFLNNYKPGTHFTPVPPTPPDACRGMLCGFGAVCEPNAEGPG

SEQ ID NO: 620 - protein, 1930 aa, Homo sapiens
MRITLRNLEEVEFCVEDKPGTHFTPVPPTPPDACRGMLCGFGAVCEPNAEGPGRASCVCKKSPCPSVVAPVCGSDASTYSNECELQRAQCSQQRRIRLLSRGPCGSRDPCSNVTCSFGSTCARSADGLTASCLCPATCRGAPEGTVCGSDGADYPGECQLLRRACARQENVFKKFDGPCDPCQGALPDPSRSCRVNPRTRRPEMLLRPESCPARQAPVCGDDGVTYENDCVMGRSGAARGLLLQKVRSGQCQGRDQCPEPCRFNAVCLSRRGRPRCSCDRVTCDGAYRPVCAQDGRTYDSDCWRQQAECRQQRAIPSKHQGPCDQAPSPCLGVQCAFGATCAVKNGQAACECLQACSSLYDPVCGSDGVTYGSACELEATACTLGREIQVARKGPCDRCGQCRFGALCEAETGRCVCPSECVALAQPVCGSDGHTYPSECMLHVHACTHQISLHVASAGPCETCGDAVCAFGAVCSAGQCVCPRCEHPPPGPVCGSDGVTYGSACELREAACLQQTQIEEARAGPCEQAECGSGGSGSGEDGDCEQELCRQRGGIWDEDSEDGPCVCDFSCQSVPGSPVCGSDGVTYSTECELKKARCESQRGLYVAAQGACRGPTFAPLPPVAPLHCAQTPYGCCQDNITAARGVGLAGCPSACQCNPHGSYGGTCDPATGQCSCRPGVGGLRCDRCEPGFWNFRGIVTDGRSGCTPCSCDPQGAVRDDCEQMTGLCSCKPGVAGPKCGQCPDGRALGPAGCEADASAPATCAEMRCEFGARCVEESGSAHCVCPMLTCPEANATKVCGSDGVTYGNECQLKTIACRQGLQISIQSLGPCQEAVAPSTHPTSASVTVTTPGLLLSQALPAPPGALPLAPSSTAHSQTTPPPSSRPRTTASVPRTTVWPVLTVPPTAPSPAPSLVASAFGESGSTDGSSDEELSGDQEASGGGSGGLEPLEGSSVATPGPPVERASCYNSALGCCSDGKTPSLDAEGSNCPATKVFQGVLELEGVEGQELFYTPEMADPKSELFGETARSIESTLDDLFRNSDVKKDFRSVRLRDLGPGKSVRAIVDVHFDPTTAFRAPDVARALLRQIQVSRRRSLGVRRPLQEHVRFMDFDWFPAFITGATSGAIAAGATARATTASRLPSSAVTPRAPHPSHTSQPVAKTTAAPTTRRPPTTAPSRVPGRRPPAPQQPPKPCDSQPCFHGGTCQDWALGGGFTCSCPAGRGGAVCEKVLGAPVPAFEGRSFLAFPTLRAYHTLRLALEFRALEPQGLLLYNGNARGKDFLALALLDGRVQLRFDTGSGPAVLTSAVPVEPGQWHRLELSRHWRRGTLSVDGETPVLGESPSGTDGLNLDTDLFVGGVPEDQAAVALERTFVGAGLRGCIRLLDVNNQRLELGIGPGAATRGSGVGECGDHPCLPNPCHGGAPCQNLEAGRFHCQCPPGRVGPTCADEKSPCQPNPCHGAAPCRVLPEGGAQCECPLGREGTFCQTASGQDGSGPFLADFNGFSHLELRGLHTFARDLGEKMALEVVFLARGPSGLLLYNGQKTDGKGDFVSLALRDRRLEFRYDLGKGAAVIRSREPVTLGAWTRVSLERNGRKGALRVGDGPRVLGESPKSRKVPHTVLNLKEPLYVGGAPDFSKLARAAAVSSGFDGAIQLVSLGGRQLLTPEHVLRQVDVTSFAGHPCTRASGHPCLNGASCVPREAAYVCLCPGGFSGPHCEKGLVEKSAGDVDTLAFDGRTFVEYLNAVTESELANEIPVPETLDSGALHSEKALQSNHFELSLRTEATQGLVLWSGKATERADYVALAIVDGHLQLSYNLGSQPVVLRSTVPVNTNRWLRVVAHREQREGSLQVGNEAPVTGSSPLGATQLDTDGALWLGGLPELPVGPALPKAYGTGFVGCLRDVVVGRHPLHLLEDAVTKPELRPCPTP

SEQ ID NO: 621 - protein, 287 aa, Homo sapiens
  SITE 1: note = misc_feature - Xaa can be any naturally occurring amino acid
XKGDFVSLALRDRRLEFRYDLGKGAAVIRSREPVTLGAWTRVSLERNGRKGALRVGDGPRVLGESPKSRKVPHTVLNLKEPLYVGGAPDFSKLARAAAVSSGFDGAIQLVSLGGRQLLTPEHVLRQVDVTSFAGHPCTRASGHPCLNGASCVPREAAYVCLCPGGFSGPHCEKGLVEKSAGDVDTLAFDGRTFVEYLNAVTESELANEIPVPETLDSGALHSEKALQSNHFELSLRTEATQGLVLWSGKATERADYVALAIVDGHLQLSYNLGSQPVVLRSTVPVNT

SEQ ID NO: 622 - protein, 132 aa, Homo sapiens
MLTAAVLSCALLLALPATRGAQMGLAPMEGIRRPDQALLPELPGLGLRAPLKKTTAEQAEEDLLQEAQALAEVLDLQDREPRSSRRCVRLHESCLGQQVPCCDPCATCYCRFFNAFCYCRKLGTAMNPCSRT

SEQ ID NO: 623 - protein, 485 aa, Homo sapiens
MRKRAPQSEMAPAGVSLRATILCLLAWAGLAAGDRVYIHPFHLVIHNESTCEQLAKANAGKPKDPTFIPAPIQAKTSPVDEKALQDQLVLVAAKLDTEDKLRAAMVGMLANFLGFRIYGMHSELWGVVHGATVLSPTAVFGTLASLYLGALDHTADRLQAILGVPWKDKNCTSRLDAHKVLSALQAVQGLLVAQGRADSQAQLLLSTVVGVFTAPGLHLKQPFVQGLALYTPVVLPRSLDFTELDVAAEKIDRFMQAVTGWKTGCSLMGASVDSTLAFNTYVHFQGKMKGFSLLAEPQEFWVDNSTSVSVPMLSGMGTFQHWSDIQDNFSVTQVPFTESACLLLIQPHYASDLDKVEGLTFQQNSLNWMKKLSPRTIHLTMPQLVLQGSYDLQDLLAQAELPAILHTELNLQKLSNDRIRVGEVLNSIFFELEADEREPTESTQQLNKPEVLEVTLNRPFLFAVYDQSATALHFLGRVANPLSTA

SEQ ID NO: 624 - protein, 1278 aa, Homo sapiens
MRTGSAASSAAAAAAAAAASASPATGVCMKTPGGGRRGIRRDPGAEPGAAALRGPRQRPILSRLTNNSRIVGLLAQLEKINAEPSESDTARYVTSKILHLAQSQEKTRREMTAKGSTGMEILLSTLENTKDLQTTLNILSILVELVSAGGGRRVSFLVTKGGSQILLQLLMNASKESPPHEDLMVQIHSILAKIGPKDKKFGVKARINGALNITLNLVKQNLQNHRLVLPCLQLLRVYSANSVNSVSLGKNGVVELMFKIIGPFSKKNSSLIKVALDTLAALLKSKTNARRAVDRGYVQVLLTIYVDWHRHDNRHRNMLIRKGILQSLKSVTNIKLGRKAFIDANGMKILYNTSQECLAVRTLDPLVNTSSLIMRKCFPKNRLPLPTIKSSFHFQLPVIPVTGPVAQLYSLPPEVDDVVDESDDNDDIDVEAENETENEDDLDQNFKNDDIETDINKLKPQQEPGRTIEDLKMYEHLFPELVDDFQDYDLISKEPKPFVFEGKVRGPIVVPTAGEETSGNSGNLRKVVMKENISSKGDEGEKKSTFMDLAKEDIKDNDRTLQQQPGDQNRTISSVHGLNNDIVKALDRITLQNIPSQTAPGFTAEMKKDCSLPLTVLTCAKACPHMATCGNVLFEGRTVQLGKLCCTGVETEDDEDTESNSSVEQASVEVPDGPTLHDPDLYIEIVKNTKSVPEYSEVAYPDYFGHIPPPFKEPILERPYGVQRTKIAQDIERLIHQSDIIDRVVYDLDNPNYTIPEEGDILKFNSKFESGNLRKVIQIRKNEYDLILNSDINSNHYHQWFYFEVSGMRPGVAYRFNIINCEKSNSQFNYGMQPLMYSVQEALNARPWWIRMGTDICYYKNHFSRSSVAAGGQKGKSYYTITFTVNFPHKDDVCYFAYHYPYTYSTLQMHLQKLESAHNPQQIYFRKDVLCETLSGNSCPLVTITAMPESNYYEHICHFRNRPYVFLSARVHPGETNASWVMKGTLEYLMSNNPTAQSLRESYIFKIVPMLNPDGVINGNHRCSLSGEDLNRQWQSPSPDLHPTIYHAKGLLQYLAAVKRLPLVYCDYHGHSRKKNVFMYGCSIKETVWHTNDNATSCDVVEDTGYRTLPKILSHIAPAFCMSSCSFVVEKSKESTARVVVWREIGVQRSYTMESTLCGCDQGKYKGLQIGTRELEEMGAKFCVGLLRLKRLTSPLEYNLPSSLLDFENDLIESSCKVTSPTTYVLDEDEPRFLEEVDYSAESNDELDIELAENVGDYEPSAQEEVLSDSELSRTYLP

SEQ ID NO: 625 - protein, 1238 aa, Homo sapiens
MRTGSAASSAAAAAAAAAASASPATGVCMKTPGGGRRGIRRDPGAEPGAAALRGPRQRPILSRLTNNSRIVGLLAQLEKINAEPSESDTARYVTSKILHLAQSQEKTRREMTAKGSTGMEILLSTLENTKDLQTTLNILSILVELVSAGGGRRVSFLVTKGGSQILLQLLMNASKESPPHEDLMVQIHSILAKIGPKDKKFGVKARINGALNITLNLVKQNLQNHRLVLPCLQLLRVYSANSVNSVSLGKNGVVELMFKIIGPFSKKNSSLIKVALDTLAALLKSKTNARRAVDRGYVQVLLTIYVDWHRHDNRHRNMLIRKGILQSLKSVTNIKLGRKAFIDANGMKILYNTSQLPVIPVTGPVAQLYSLPPEVDDVVDESDDNDDIDVEAENETENEDDLDQNFKNDDIETDINKLKPQQEPGRTIEDLKMYEHLFPELVDDFQDYDLISKEPKPFVFEGKVRGPIVVPTAGEETSGNSGNLRKVVMKENISSKGDEGEKKSTFMDLAKEDIKDNDRTLQQQPGDQNRTISSVHGLNNDIVKALDRITLQNIPSQTAPGFTAEMKKDCSLPLTVLTCAKACPHMATCGNVLFEGRTVQLGKLCCTGVETEDDEDTESNSSVEQASVEVPDGPTLHDPDLYIEIVKNTKSVPEYSEVAYPDYFGHIPPPFKEPILERPYGVQRTKIAQDIERLIHQSDIIDRVVYDLDNPNYTIPEEGDILKFNSKFESGNLRKVIQIRKNEYDLILNSDINSNHYHQWFYFEVSGMRPGVAYRFNIINCEKSNSQFNYGMQPLMYSVQEALNARPWWIRMGTDICYYKNHFSRSSVAAGGQKGKSYYTITFTVNFPHKDDVCYFAYHYPYTYSTLQMHLQKLESAHNPQQIYFRKDVLCETLSGNSCPLVTITAMPESNYYEHICHFRNRPYVFLSARVHPGETNASWVMKGTLEYLMSNNPTAQSLRESYIFKIVPMLNPDGVINGNHRCSLSGEDLNRQWQSPSPDLHPTIYHAKGLLQYLAAVKRLPLVYCDYHGHSRKKNVFMYGCSIKETVWHTNDNATSCDVVEDTGYRTLPKILSHIAPAFCMSSCSFVVEKSKESTARVVVWREIGVQRSYTMESTLCGCDQGKYKGLQIGTRELEEMGAKFCVGLLRLKRLTSPLEYNLPSSLLDFENDLIESSCKVTSPTTYVLDEDEPRFLEEVDYSAESNDELDIELAENVGDYEPSAQEEVLSDSELSRTYLP

SEQ ID NO: 626 - protein, 1226 aa, Homo sapiens
MSKLKVIPEKSLTNNSRIVGLLAQLEKINAEPSESDTARYVTSKILHLAQSQEKTRREMTAKGSTGMEILLSTLENTKDLQTTLNILSILVELVSAGGGRRVSFLVTKGGSQILLQLLMNASKESPPHEDLMVQIHSILAKIGPKDKKFGVKARINGALNITLNLVKQNLQNHRLVLPCLQLLRVYSANSVNSVSLGKNGVVELMFKIIGPFSKKNSSLIKVALDTLAALLKSKTNARRAVDRGYVQVLLTIYVDWHRHDNRHRNMLIRKGILQSLKSVTNIKLGRKAFIDANGMKILYNTSQECLAVRTLDPLVNTSSLIMRKCFPKNRLPLPTIKSSFHFQLPVIPVTGPVAQLYSLPPEVDDVVDESDDNDDIDVEAENETENEDDLDQNFKNDDIETDINKLKPQQEPGRTIEDLKMYEHLFPELVDDFQDYDLISKEPKPFVFEGKVRGPIVVPTAGEETSGNSGNLRKVVMKENISSKGDEGEKKSTFMDLAKEDIKDNDRTLQQQPGDQNRTISSVHGLNNDIVKALDRITLQNIPSQTAPGFTAEMKKDCSLPLTVLTCAKACPHMATCGNVLFEGRTVQLGKLCCTGVETEDDEDTESNSSVEQASVEVPDGPTLHDPDLYIEIVKNTKSVPEYSEVAYPDYFGHIPPPFKEPILERPYGVQRTKIAQDIERLIHQSDIIDRVVYDLDNPNYTIPEEGDILKFNSKFESGNLRKVIQIRKNEYDLILNSDINSNHYHQWFYFEVSGMRPGVAYRFNIINCEKSNSQFNYGMQPLMYSVQEALNARPWWIRMGTDICYYKNHFSRSSVAAGGQKGKSYYTITFTVNFPHKDDVCYFAYHYPYTYSTLQMHLQKLESAHNPQQIYFRKDVLCETLSGNSCPLVTITAMPESNYYEHICHFRNRPYVFLSARVHPGETNASWVMKGTLEYLMSNNPTAQSLRESYIFKIVPMLNPDGVINGNHRCSLSGEDLNRQWQSPSPDLHPTIYHAKGLLQYLAAVKRLPLVYCDYHGHSRKKNVFMYGCSIKETVWHTNDNATSCDVVEDTGYRTLPKILSHIAPAFCMSSCSFVVEKSKESTARVVVWREIGVQRSYTMESTLCGCDQGKYKGLQIGTRELEEMGAKFCVGLLRLKRLTSPLEYNLPSSLLDFENDLIESSCKVTSPTTYVLDEDEPRFLEEVDYSAESNDELDIELAENVGDYEPSAQEEVLSDSELSRTYLP

SEQ ID NO: 627 - protein, 1186 aa, Homo sapiens
MSKLKVIPEKSLTNNSRIVGLLAQLEKINAEPSESDTARYVTSKILHLAQSQEKTRREMTAKGSTGMEILLSTLENTKDLQTTLNILSILVELVSAGGGRRVSFLVTKGGSQILLQLLMNASKESPPHEDLMVQIHSILAKIGPKDKKFGVKARINGALNITLNLVKQNLQNHRLVLPCLQLLRVYSANSVNSVSLGKNGVVELMFKIIGPFSKKNSSLIKVALDTLAALLKSKTNARRAVDRGYVQVLLTIYVDWHRHDNRHRNMLIRKGILQSLKSVTNIKLGRKAFIDANGMKILYNTSQLPVIPVTGPVAQLYSLPPEVDDVVDESDDNDDIDVEAENETENEDDLDQNFKNDDIETDINKLKPQQEPGRTIEDLKMYEHLFPELVDDFQDYDLISKEPKPFVFEGKVRGPIVVPTAGEETSGNSGNLRKVVMKENISSKGDEGEKKSTFMDLAKEDIKDNDRTLQQQPGDQNRTISSVHGLNNDIVKALDRITLQNIPSQTAPGFTAEMKKDCSLPLTVLTCAKACPHMATCGNVLFEGRTVQLGKLCCTGVETEDDEDTESNSSVEQASVEVPDGPTLHDPDLYIEIVKNTKSVPEYSEVAYPDYFGHIPPPFKEPILERPYGVQRTKIAQDIERLIHQSDIIDRVVYDLDNPNYTIPEEGDILKFNSKFESGNLRKVIQIRKNEYDLILNSDINSNHYHQWFYFEVSGMRPGVAYRFNIINCEKSNSQFNYGMQPLMYSVQEALNARPWWIRMGTDICYYKNHFSRSSVAAGGQKGKSYYTITFTVNFPHKDDVCYFAYHYPYTYSTLQMHLQKLESAHNPQQIYFRKDVLCETLSGNSCPLVTITAMPESNYYEHICHFRNRPYVFLSARVHPGETNASWVMKGTLEYLMSNNPTAQSLRESYIFKIVPMLNPDGVINGNHRCSLSGEDLNRQWQSPSPDLHPTIYHAKGLLQYLAAVKRLPLVYCDYHGHSRKKNVFMYGCSIKETVWHTNDNATSCDVVEDTGYRTLPKILSHIAPAFCMSSCSFVVEKSKESTARVVVWREIGVQRSYTMESTLCGCDQGKYKGLQIGTRELEEMGAKFCVGLLRLKRLTSPLEYNLPSSLLDFENDLIESSCKVTSPTTYVLDEDEPRFLEEVDYSAESNDELDIELAENVGDYEPSAQEEVLSDSELSRTYLP

SEQ ID NO: 628 - protein, 159 aa, Homo sapiens
MELPAVNLKCASSSVPRNHPHVILLGHWLLTTCFWRHFSAKPRLETIELTCALCKLRSAAHRATAGLHCILRLLCLGQLHHPGLGRVGCGSAGLHRRHKHVSGWLAGHHLPGHRAHQHLLPAGQPHGHGPLWRGHGHPQLAAQAALLLLRLPHVPGARG

SEQ ID NO: 629 - protein, 111 aa, Homo sapiens
MELPAVNLKGLHCILRLLCLGQLHHPGLGRVGCGSAGLHRRHKHVSGWLAGHHLPGHRAHQHLLPAGQPHGHGPLWRGHGHPQLAAQAALLLLRLPHVPGARGFPWVFSGP

SEQ ID NO: 630 - protein, 147 aa, Homo sapiens
MELPAVNLKVILLGHWLLTTCFWRHFSAKPRLETIELTCALCKLRSAAHRATAGLHCILRLLCLGQLHHPGLGRVGCGSAGLHRRHKHVSGWLAGHHLPGHRAHQHLLPAGQPHGHGPLWRGHGHPQLAAQAALLLLRLPHVPGARG

SEQ ID NO: 631 - protein, 155 aa, Homo sapiens
MELPAVNLKVILLGHWLLTTCFWRHFSAKPRLETIELTCALCKLRSAAHRATAGLHCILRLLCLGQLHHPGLGRVGCGSAGLHRRHKHVSGWLAGHHLPGHRAHQHLLPAGQPHGHGPLWRGHGHPQLAAQAALLLLRLPHVPGARGFPWVFSGP

SEQ ID NO: 632 - protein, 155 aa, Homo sapiens
MELPAVNLKVILLGHWLLTTCFWVACWPPSSWTSCTSASSTRGSASRTRAALAWAWPSSACCSSRSPAASSTTCTGSAGVSSWSTLVSLGLLRTVVPTRRLTQQRRPQIPLQSQRAGVKMPEGTEASHAAPGPAPGLPRAWEVVLGMLLTSVSWT

SEQ ID NO: 633 - protein, 159 aa, Homo sapiens
MELPAVNLKVILLGHWLLTTWGCIVFSGSYAWANFTILALGVWAVAQRDSIDAISMFLGGLLATIFLDIVHISIFYPRVSLTDTGRFGVGMAILSLLLKPLSCCFVYHMYRERGGELLVHTGFLGSSQDRSAYQTIDSAEAPADPFAVPEGRSQDARGY

SEQ ID NO: 634 - protein, 152 aa, Homo sapiens
MELPAVNLKVILLGHWLLTTWGCIVFSGSYAWANFTILALGVWAVAQRDSIDAISMFLGGLLATIFLDIVHISIFYPRVSLTDTGRFGVGMAILSLLLKPLSCCFVYHMYRERGGFLGSSQDRSAYQTIDSAEAPADPFAVPEGRSQDARGY

SEQ ID NO: 635 - protein, 63 aa, Homo sapiens
MELPAVNLKVILLGHWLLTTWHKDCTPCRSWEGDVEVLIRAPQGLPHSEASALQLDFHLYHLF

SEQ ID NO: 636 - protein, 508 aa, Homo sapiens
MEKWDGNEGTSAFHMPEWMIQFADQKQEFNKRPTKIGRRSLSRSISQSSTDSYSSAASYTDSSDDETSPRDKQQKNSKGSSDFCVKNIKQAEFGRREIEIAEQEMPALMALRKRAQGEKPLAGAKIVGCTHITAQTAVLMETLGALGAQCRWAACNIYSTLNEVAAALAESGFPVFAWKGESEDDFWWCIDRCVNVEGWQPNMILDDGGDLTHWIYKKYPNMFKKIKGIVEESVTGVHRLYQLSKAGKLCVPAMNVNDSVTKQKFDNLYCCRESILDGLKRTTDMMFGGKQVVVCGYGEVGKGCCAALKAMGSIVYVTEIDPICALQACMDGFRLVKLNEVIRQVDIVITCTGNKNVVTREHLDRMKNSCIVCNMGHSNTEIDVASLRTPELTWERVRSQVDHVIWPDGKRIVLLAEGRLLNLSCSTVPTFVLSITATTQALALIELYNAPEGRYKQDVYLLPKKMDEYVASLHLPTFDAHLTELTDEQAKYLGLNKNGPFKPNYYRY

SEQ ID NO: 637 - protein, 75 aa, Homo sapiens
MEKWDGNEGTSAFHMPEWMQIQFADQKQEFNKRPTKIGRRSLSRSISQSSTDSYSSAASYTDSSDDETSPRDKQQ

SEQ ID NO: 638 - protein, 508 aa, Homo sapiens
MLGSKKKYIVNGNSGIKAQIQFADQKQEFNKRPTKIGRRSLSRSISQSSTDSYSSAASYTDSSDDETSPRDKQQKNSKGSSDFCVKNIKQAEFGRREIEIAEQEMPALMALRKRAQGEKPLAGAKIVGCTHITAQTAVLMETLGALGAQCRWAACNIYSTLNEVAAALAESGFPVFAWKGESEDDFWWCIDRCVNVEGWQPNMILDDGGDLTHWIYKKYPNMFKKIKGIVEESVTGVHRLYQLSKAGKLCVPAMNVNDSVTKQKFDNLYCCRESILDGLKRTTDMMFGGKQVVVCGYGEVGKGCCAALKAMGSIVYVTEIDPICALQACMDGFRLVKLNEVIRQVDIVITCTGNKNVVTREHLDRMKNSCIVCNMGHSNTEIDVASLRTPELTWERVRSQVDHVIWPDGKRIVLLAEGRLLNLSCSTVPTFVLSITATTQALALIELYNAPEGRYKQDVYLLPKKMDEYVASLHLPTFDAHLTELTDEQAKYLGLNKNGPFKPNYYRY

SEQ ID NO: 639 - protein, 183 aa, Homo sapiens [sequence omitted]

SEQ ID NO: 640 - protein, 610 aa, Homo sapiens
MSVQVVSAAAAAKVPEVELKDLSPSEAESQLGLSTAAVGAMAPPAGGGDPEAPAPAAERPPVPGPGSGPAAALSPAAGKVPQASAMKRSDPHHQHQRHRDGGEALVSPDGTVTEAPRTVKKIQFADQKQEFNKRPTKIGRRSLSRSISQSSTDSYSSAASYTDSSDDETSPRDKQQKNSKGSSDFCVKNIKQAEFGRREIEIAEQEMPALMALRKRAQGEKPLAGAKIVGCTHITAQTAVLMETLGALGAQCRWAACNIYSTLNEVAAALAESGFPVFAWKGESEDDFWWCIDRCVNVEGWQPNMILDDGGDLTHWIYKKYPNMFKKIKGIVEESVTGVHRLYQLSKAGKLCVPAMNVNDSVTKQKFDNLYCCRESILDGLKRTTDMMFGGKQVVVCGYGEVGKGCCAALKAMGSIVYVTEIDPICALQACMDGFRLVKLNEVIRQVDIVITCTGNKNVVTREHLDRMKNSCIVCNMGHSNTEIDVASLRTPELTWERVRSQVDHVIWPDGKRIVLLAEGRLLNLSCSTVPTFVLSITATTQALALIELYNAPEGRYKQDVYLLPKKMDEYVASLHLPTFDAHLTELTDEQAKYLGLNKNGPFKPNYYRY

SEQ ID NO: 641 - protein, 611 aa, Homo sapiens
MSVQVVSAAAAAKVPEVELKDLSPSEAESQLGLSTAAVGAMAPPAGGGDPEAPAPAAERPPVPGPGSGPAAALSPAAGKVPQASAMKRSDPHHQHQRHRDGGEALVSPDGTVTEAPRTVKKQIQFADQKQEFNKRPTKIGRRSLSRSISQSSTDSYSSAASYTDSSDDETSPRDKQQKNSKGSSDFCVKNIKQAEFGRREIEIAEQEMPALMALRKRAQGEKPLAGAKIVGCTHITAQTAVLMETLGALGAQCRWAACNIYSTLNEVAAALAESGFPVFAWKGESEDDFWWCIDRCVNVEGWQPNMILDDGGDLTHWIYKKYPNMFKKIKGIVEESVTGVHRLYQLSKAGKLCVPAMNVNDSVTKQKFDNLYCCRESILDGLKRTTDMMFGGKQVVVCGYGEVGKGCCAALKAMGSIVYVTEIDPICALQACMDGFRLVKLNEVIRQVDIVITCTGNKNVVTREHLDRMKNSCIVCNMGHSNTEIDVASLRTPELTWERVRSQVDHVIWPDGKRIVLLAEGRLLNLSCSTVPTFVLSITATTQALALIELYNAPEGRYKQDVYLLPKKMDEYVASLHLPTFDAHLTELTDEQAKYLGLNKNGPFKPNYYRY

SEQ ID NO: 642 - protein, 518 aa, Homo sapiens
  SITE 1: note = misc_feature - Xaa can be any naturally occurring amino acid
XRKWSRQFLLSFWCTVCSAHQGTIFLSLKIQFADQKQEFNKRPTKIGRRSLSRSISQSSTDSYSSAASYTDSSDDETSPRDKQQKNSKGSSDFCVKNIKQAEFGRREIEIAEQEMPALMALRKRAQGEKPLAGAKIVGCTHITAQTAVLMETLGALGAQCRWAACNIYSTLNEVAAALAESGFPVFAWKGESEDDFWWCIDRCVNVEGWQPNMILDDGGDLTHWIYKKYPNMFKKIKGIVEESVTGVHRLYQLSKAGKLCVPAMNVNDSVTKQKFDNLYCCRESILDGLKRTTDMMFGGKQVVVCGYGEVGKGCCAALKAMGSIVYVTEIDPICALQACMDGFRLVKLNEVIRQVDIVITCTGNKNVVTREHLDRMKNSCIVCNMGHSNTEIDVASLRTPELTWERVRSQVDHVIWPDGKRIVLLAEGRLLNLSCSTVPTFVLSITATTQALALIELYNAPEGRYKQDVYLLPKKMDEYVASLHLPTFDAHLTELTDEQAKYLGLNKNGPFKPNYYRY

SEQ ID NO: 643 - protein, 368 aa, Homo sapiens
MKSLVLLLCLAQLWGCHSAPHGPGLIYRQPNCDDPETEEAALVAIDYINQNLPWGYKHTLNQIDEVKVWPQQPSGELFEIEIDTLETTCHVLDPTPVARCSVRQLKEHAVEGDCDFQLLKLDGKFSVVYAKCDSSPADSAEDVRKVCQDCPLLAPLNDTRVVHAAKAALAAFNAQNNGSNFQLEEISRAQLVPLPPSTYVEFTVSGTDCVAKEATEAAKCNLLAEKQYGFCKATLSEKLGGAEVAVTCMVFQTQPVSSQPQPEGANEAVPTPVVDPDAPPSPPLGAPGLPPAGSPPDSHVLLAAPPGHQLHRAHYDLRHTFMGVVSLGSPSGEVSHPRKTRTVVQPSVGAAAGPVVPPCPGRIRHFKV

SEQ ID NO: 644 - protein, 367 aa, Homo sapiens
MKSLVLLLCLAQLWGCHSAPHGPGLIYRQPNCDDPETEEAALVAIDYINQNLPWGYKHTLNQIDEVKVWPQQPSGELFEIEIDTLETTCHVLDPTPVARCSVRQLKEHAVEGDCDFQLLKLDGKFSVVYAKCDSSPDSAEDVRKVCQDCPLLAPLNDTRVVHAAKAALAAFNAQNNGSNFQLEEISRAQLVPLPPSTYVEFTVSGTDCVAKEATEAAKCNLLAEKQYGFCKATLSEKLGGAEVAVTCMVFQTQPVSSQPQPEGANEAVPTPVVDPDAPPSPPLGAPGLPPAGSPPDSHVLLAAPPGHQLHRAHYDLRHTFMGVVSLGSPSGEVSHPRKTRTVVQPSVGAAAGPVVPPCPGRIRHFKV

SEQ ID NO: 645 - protein, 47 aa, Homo sapiens
MALVPCQVLRMAILLSYCSILCNYKAIEMPSHQTYGGSWKFLTFIDL

SEQ ID NO: 646 - protein, 124 aa, Homo sapiens
MALVPCQVLRMAILLSYCSILCNYKAIEMPSHQTYGGSWKFLTFIDLFVVAVFWIIYAYDREMIYPKLLDNFIPGWLNHGMHTTVLPFILIEMRTSHHQYPSRSSGLTAICTFSVGYILWVCWV

SEQ ID NO: 647 - protein, 137 aa, Homo sapiens
MALVPCQVLRMAILLSYCSILCNYKAIEMPSHQTYGGSWKFLTFIDLVIQAVFFGICVLTDLSSLLTRGSGNQEQERQLKKLISLRDWMLAVLAFPVGVFVVAVFWIIYAYDREMIYPKLLDNFIPGWLNHGMHFKA

SEQ ID NO: 648 - protein, 245 aa, Homo sapiens
MALVPCQVLRMAILLSYCSILCNYKAIEMPSHQTYGGSWKFLTFIDLVIQAVFFGICVLTDLSSLLTRGSGNQEQERQLKKLISLRDWMLAVLAFPVGVFVVAVFWIIYAYDREMIYPKLLDNFIPGWLNHGMHTTVLPFILIEMRTSHHQYPSRSSGLTAICTFSVGYILWVCWVHHVTGMWVYPFLEHIGPGARIIFFGSTTILMNFLYLLGEVLNNYIWDTQKKPPSWQDMKIKFMYLGPSS

SEQ ID NO: 649 - protein, 238 aa, Homo sapiens
MALVPCQVLRMAILLSYCSILCNYKAIEMPSHQTYGGSWKFLTFIDLVIQAVFFGICVLTDLSSLLTRGSGNQEQERQLKKLISLRDWMLAVLAFPVGVFVVAVFWIIYAYDREMIYPKLLDNFIPGWLNHGMHTTVLPFILIEMRTSHHQYPSRSSGLTAICTFSVGYILWVCWVHHVTGMWVYPFLEHIGPGARIIFFGSTTILMNFLYLLGEVLNNYIWDTQKSMEEEKEKPKLE

SEQ ID NO: 650 - protein, 231 aa, Homo sapiens
MALVPCQVLRMAILLSYCSILCNYKAIEMPSHQTYGGSWKFLTFIDLVIQAVFFGICVLTDLSSLLTRGSGNQEQERQLKKLISLRDWMLAVLAFPVGVFVVAVFWIIYAYDREMIYPKLLDNFIPGWLNHGMHTTVLPFILIEMRTSHHQYPSRSSGLTAICTFSVGYILWVCWVHHVTGMWVYPFLEHIGPGARIIFFGSTTILMNFLYLLGEVLNNYIWDTQKTAKLK

SEQ ID NO: 651 - protein, 134 aa, Homo sapiens
MALVPCQVLRMAILLSYCSILCNYKAIEMPSHQTYGGSWKFLTFIDLVIQAVFFGICVLTDLSSLLTRGSGNQEQERQLKKLISLRDWMLAVLAFPVGVFVVAVFWIIYAYDREMIYPKLLDNFIPGWLNHGML

SEQ ID NO: 652 - protein, 138 aa, Homo sapiens
MLAVLAFPVGVFVVAVFWIIYAYDREMIYPKLLDNFIPGWLNHGMHTTVLPFILIEMRTSHHQYPSRSSGLTAICTFSVGYILWVCWVHHVTGMWVYPFLEHIGPGARIIFFGSTTILMNFLYLLGEVLNNYIWDTQK

SEQ ID NO: 653 - protein, 192 aa, Homo sapiens
MTKVLRMAILLSYCSILCNYKAIEMPSHQTYGGSWKFLTFIDLVIQAVFFGICVLTDLSSLLTRGSGNQEQERQLKKLISLRDWMLAVLAFPVGVFVVAVFWIIYAYDREMIYPKLLDNFIPGWLNHGMHTTVLPFILIEMRTSHHQYPSRSSGLTAICTFSVGYILWVCWVHHVTGMWVYPFLEHIGPGAR

SEQ ID NO: 654 - protein, 171 aa, Homo sapiens
MAKQYIEKSLLVPDHVITRLMMSELENRRGQHWLLDGFPRTLGQAEALDKICEVDLVISLNIPFETLKDRLSRRWIHPPSGRVYNLDFNPPHVHGIDDVTGEPLVQQEDDKPEAVAARLRQYKDVAKPVIELYKSRGVLHQFSGTETNKIWPYVYTLFSNKITPIQSKEAY

SEQ ID NO: 655 - protein, 223 aa, Homo sapiens
MASKLLRAVILGPPGSGKGTVCQRIAQNFGLQHLSSGHFLRENIKASTEVGEMAKQYIEKSLLVPDHVITRLMMSELENRRGQHWLLDGFPRTLGQAEALDKICEVDLVISLNIPFETLKDRLSRRWIHPPSGRVYNLDFNPPHVHGIDDVTGEPLVQQEDDKPEAVAARLRQYKDVAKPVIELYKSRGVLHQFSGTETNKIWPYVYTLFSNKITPIQSKEAY

SEQ ID NO: 656 - protein, 223 aa, Homo sapiens; identical to SEQ ID NO: 655

SEQ ID NO: 657 - protein, 223 aa, Homo sapiens; identical to SEQ ID NO: 655

SEQ ID NO: 658 - protein, 78 aa, Homo sapiens
LALLALLMSLTQGVLTALRLRKMTFGRVSDLGQFIRESEPEPDVRKSKGSMFSQAMKKWVQGNTDEAQEELAWKIAKM

SEQ ID NO: 659 - protein, 138 aa, Homo sapiens
MRGAGPSPRQSPRTLRPDPGPAMSFFRRKVKGKEQEKTSDVKSIKALKIMPCWRLQDQVMLQSMPFLPTWTPFQVAGQPHLRSSQATWRPLILVTWADLVWTTRLKRPNQAFLRPLNKSCTTLLSSLTSFNSWNFGEW

SEQ ID NO: 660 - protein, 150 aa, Homo sapiens
MRGAGPSPRQSPRTLRPDPGPAMSFFRRKVKGKEQEKTSDVKSIKASISVHSPQKSTKNHALLEAAGPSHVAINAISANMDSFSSSRTATLKKQPSHMEAAHFGDLDLVWTTRLKRPNQAFLRPLNKSCTTLLSSLTSFNSWNFGEWSIW

SEQ ID NO: 661 - protein, 662 aa, Homo sapiens
MRGAGPSPRQSPRTLRPDPGPAMSFFRRKVKGKEQEKTSDVKSIKASISVHSPQKSTKNHALLEAAGPSHVAINAISANMDSFSSSRTATLKKQPSHMEAAHFGDLGRSCLDYQTQETKSSLSKTLEQVLHDTIVLPYFIQFMELRRMEHLVKFWLEAESFHSTTWSRIRAHSLNTVKQSSLAEPVSPSKKHETTASFLTDSLDKRLEDSGSAQLFMTHSEGIDLNNRTNSTQNHLLLSQECDSAHSLRLEMARAGTHQVSMETQESSSTLTVASRNSPASPLKELSGKLMKSIEQDAVNTFTKYISPDAAKPIPITEAMRNDIIARICGEDGQVDPNCFVLAQSIVFSAMEQEHFSEFLRSHHFCKYQIEVLTSGTVYLADILFCESALFYFSEYMEKEDAVNILQFWLAADNFQSQLAAKKGQYDGQEAQNDAMILYDKYFSLQATHPLGFDDVVRLEIESNICREGGPLPNCFTTPLRQAWTTMEKVFLPGFLSSNLYYKYLNDLIHSVRGDEFLGGNVSLTAPGSVGPPDESHPGSSDSSASQSSVKKASIKILKNFDEAIIVDAASLDPESLYQRTYAGKMTFGRVSDLGQFIRESEPEPDVRKSKGSMFSQAMKKWVQGNTDEAQEELAWKIAKMIVSDIMQQAQYDQPLEKSTKL

SEQ ID NO: 662 - protein, 604 aa, Homo sapiens
MRGAGPSPRQSPRTLRPDPGPAMSFFRRKVKGKEQEKTSDVKSIKASISVHSPQKSTKNHALLEAAGPSHVAINAISANMDSFSSSRTATLKKQPSHMEAAHFGDLGRSCLDYQTQETKSSLSKTLEQVLHDTIVLPYFIQFMELRRMEHLVKFWLEAESFHSTTWSRIRAHSLNTVKQSSLAEPVSPSKKHETTASFLTDSLDKRLEDSGSAQLFMTHSEGIDLNNRTNSTQNHLLLSQECDSAHSLRLEMARAGTHQVSMETQESSSTLTVASRNSPASPLKELSGKLMKSIEQDAVNTFTKYISPDAAKPIPITEAMRNDIIARICGEDGQVDPNCFVLAQSIVFSAMEQEHFSEFLRSHHFCKYQIEVLTSGTVYLADILFCESALFYFSEYMEKEDAVNILQFWLAADNFQSQLAAKKGQYDGQEAQNDAMILYDKYFSLQATHPLGFDDVVRLEIESNICREGGPLPNCFTTPLRQAWTTMEKSSVKKASIKILKNFDEAIIVDAASLDPESLYQRTYAGKMTFGRVSDLGQFIRESEPEPDVRKSKGSMFSQAMKKWVQGNTDEAQEELAWKIAKMIVSDIMQQAQYDQPLEKSTKL

SEQ ID NO: 663 - protein, 66 aa, Homo sapiens
MRGAGPSPRQSPRTLRPDPGPAMSFFRRKVKGKEQEKTSDVKSIKGCRTKSCCNQCHFCQHGLLFK

SEQ ID NO: 664 - protein, 63 aa, Homo sapiens
MRGAGPSPRQSPRTLRPDPGPAMSFFRRKVKGKEQEKTSDVKSIKVETEFHHVSQYGLDLLTL

SEQ ID NO: 665 - protein, 59 aa, Homo sapiens
  SITE 1: note = misc_feature - Xaa can be any naturally occurring amino acid
XKYISPDAAKPIPITEAMRNDIIARICGEDGQVDPNCFVLAQSIVFSAMEQDTWKKRMQ

SEQ ID NO: 666 - protein, 31 aa, Homo sapiens
  SITE 1: note = misc_feature - Xaa can be any naturally occurring amino acid
XLTAPGSVGPPDESHPGSSDSSASQCEKSQY

SEQ ID NO: 667 - protein, 323 aa, Homo sapiens
MDSKYQCVKLNDGHFMPVLGFGTYAPAEVPKSKALEATKLAIEAGFRHIDSAHLYNNEEQVGLAIRSKIADGSVKREDIFYTSKLWCNSHRPELVRPALERSLKNLQLDYVDLYLIHFPVSVKPGEEVIPKDENGKILFDTVDLCATWEAVEKCKDAGLAKSIGVSNFNRRQLEMILNKPGLKYKPVCNQVECHPYFNQRKLLDFCKSKDIVLVAYSALGSHREEPWVDPNSPVLLEDPVLCALAKKHKRTPALIALRYQLQRGVVVLAKSYNEQRIRQNVQVFEFQLTSEEMKAIDGLNRNVRYLTLDIFAGPPNYPFSDEY

SEQ ID NO: 668 - protein, 205 aa, Homo sapiens
MGVVSLFLCIVEQIFTSSKKIQFRGIFMAKVPKSKALEATKLAIEAGFRHIDSAHLYNNEEQVGLAIRSKIADGSVKREDIFYTSKLWCNSHRPELVRPALERSLKNLQLDYVDLYLIHFPVSVKPGEEVIPKDENGKILFDTVDLCATWEAVEKCKDAGLAKSIGVSNFNRRQLEMILNKPGLKYKPVCNQPRDNSIFSLSPDW

SEQ ID NO: 669 - protein, 248 aa, Homo sapiens
  SITE 1: note = misc_feature - Xaa can be any naturally occurring amino acid
XSKYQCVKLNDGHFMPVLGFGTYAPAEVGLAIRSKIADGSVKREDIFYTSKLWCNSHRPELVRPALERSLKNLQLDYVDLYLIHFPVSVKPGEEVIPKDENGKILFDTVDLCATWEAVEKCKDAGLAKSIGVSNFNRRQLEMILNKPGLKYKPVCNQVECHPYFNQRKLLDFCKSKDIVLVAYSALGSHREEPWVDPNSPVLLEDPVLCALAKKHKRTPALIALRYQLQRGVVVLAKSYNEQRIRQNV

SEQ ID NO: 670 - protein, 172 aa, Homo sapiens
MPVPASWPHLPSPFLLMTLLLGRLTGVAGEDELQVIQPEKSVSVAAGESATLRCAMTSLIPVGPIMWFRGAGAGRELIYNQKEGHFPRVTTVSELTKRNNLDFSISISNITPADAGTYYCVKFRKGSPDDVEFKSGAGTELSVRAFFQESHMCSMCNKRRCHRLYQLGSQSS

SEQ ID NO: 671 - protein, 177 aa, Homo sapiens
MPVPASWPHPPCPFLLLTLLLGLTGVAGEDELQVIQPEKSVSVAAGESATLRCAMTSLIPVGPIMWFRGAGAGRELIYNQKEGHFPRVTTVSELTKRNNLDFSISISNITPADAGTYYCVKFRKGSPDDVEFKSGAGTELSVRGVTHVFHVQQTEMSQTVSTGESIILSCSVPNTLP

SEQ ID NO: 672 - protein, 140 aa, Homo sapiens
  SITE 1: note = misc_feature - Xaa can be any naturally occurring amino acid
XLIYNQKEGHFPRVTTVSDLTKRNNMDFSIRISNITPADAGTYYCVKFRKGSPDHVEFKSGAGTELSVREARTVFSARSTESRASPGQAFRQSKLQVSPQCPSLPPHSTHLCLPYCCICCLNWQSLTVLEARSLKSASLD

SEQ ID NO: 673 - protein, 45 aa, Homo sapiens
  SITE 1: note = misc_feature - Xaa can be any naturally occurring amino acid
XVHKAVVEVDESGTRAAAATGTIFTFRYSLNGHCVPGTVPSAEEK

SEQ ID NO: 674 - protein, 85 aa, Homo sapiens
KKEHVFIHERPRKINGICISPKKVACQNLSAIFCFQSETKFKMTVCQLIEGTRYPACRYHYSPTEGFVLVTCDDLRPDSFLGYVK

SEQ ID NO: 675 - protein, 96 aa, Homo sapiens
MIIMVIIFLVLLFWENEVNDEAVMSTLEHLHVDYPQNDVPVPARRDYTTSEMETFPLLLLSLGLVLAEASESTMKIIKEEFTDEEMQYDMAKSGQE

SEQ ID NO: 676 - protein, 31 aa, Homo sapiens
MVMGLGVLLLVFVLGLGLTPPTLAQDNSRHL

SEQ ID NO: 677 - protein, 190 aa, Homo sapiens
MCLCVCLYVCICVYVCVCHFVCFWVCLPLRVSVYLYLRVCVCVCVFVCLCMCVRGCVSVCVCVCIEREGERKGATDGSAWKVYPHSQPWEESVNPPTGQDQLWWCLADSGNVTFHLRMGLHFLGKECRSWSLKECFFFPFVIERAQPCVHWLTVTNLRVGDSHREETEGTADSEQESGGTSLPLGPNPQL

SEQ ID NO: 678 - protein, 23 aa, Homo sapiens
MSRLVRGSSLLTYLVVALVLQSR

SEQ ID NO: 679 - protein, 1266 aa, Homo sapiens
MGPLMVLFCLLFLYPGLADSAPSCPQNVNISGGTFTLSHGWAPGSLLTYSCPQGLYPSPASRLCKSSGQWQTPGATRSLSKAVCKPGHCPNPGISLGAVRTGFRFGHGDKVRYRCSSNLVLTGSSERECQGNGVWSGTEPICRQPYSYDFPEDVAPALGTSFSHMLGATNPTQKTKDHENGTGTNTYAALNSVYLMMNNQMRLLGMETMAWQEIRHAIILLTDGKSNMGGSPKTAVDHIREILNINQKRNDYLDIYAIGVGKLDVDWRELNELGSKKDGERHAFILQDTKALHQVFEHMLDVSKLTDTICGVGNMSANASDQERTPWHVTIKPKSQETCRGALISDQWVLTAAHCFRDGNDHSLWRVNVGDPKSQWGKEFLIEKAVISPGFDVFAKKNQGILEFYGDDIALLKLAQKVKMSTHARPICLPCTMEANLALRRPQGSTCRDHENELLNKQSVPAHFVALNGSKLNINLKMGVEWTSCAEVVSQEKTMFPNLTDVREVVTDQFLCSGTQEDESPCKGVTTTPWSLARPQGSCSLEGVEIKGGSFRLLQEGQALEYVCPSGFYPYPVQTRTCRSTGSWSTLKTQDQKTVRKAECRAIHCPRPHDFENGEYWPRSPYYNVSDEISFHCYDGYTLRGSANRTCQVNGRWSGQTAICDNGAGYCSNPGIPIGTRKVGSQYRLEDSVTYHCSRGLTLRGSQRRTCQEGGSWSGTEPSCQDSFMYDTPQEVAEAFLSSLTETIEGVDAEDGHGPGEQQKRKIVLDPSGSMNIYLVLDGSDSIGASNFTGAKKCLVNLIEKVASYGVKPRYGLVTYATYPKIWVKVSEADSSNADWVTKQLNEINYEDHKLKSGTNTKKALQAVYSMMSWPDDVPPEGWNRTRHVIILMTDGLHNMGGDPITVIDEIRDLLYIGKDRKNPREDYLDVYVFGVGPLVNQVNINALASKKDNEQHVFKVKDMENLEDVFYQMIDESQSLSLCGMVWEHRKGTDYHKQPWQAKISVIRPSKGHESCMGAVVSEYFVLTAAHCFTVDDKEHSIKVSVGGEKRDLEIEVVLFHPNYNINGKKEAGIPEFYDYDVALIKLKNKLKYGQTIRPICLPCTEGTTRALRLPPTTTCQQQKEELLPAQDIKALFVSEEEKKLTRKEVYIKNGDKKGSCERDAQYAPGYDKVKDISEVVTPRFLCTGGVSPYADPNTCRGDSGGPLIVHKRSRFIQVGVISWGVVDVCKNQKRQKQVPAHARDFHINLFQVLPWLKEKLQDEDLGFL

SEQ ID NO: 680 - protein, 1115 aa, Homo sapiens
MGPLMVLFCLLFLYPGLADSAPSCPQNVNISGGTFTLSHGWAPGSLLTYSCPQGLYPSPASRLCKSSGQWQTPGATRSLSKAVCKPVRCPAPVSFENGIYTPRLGSYPVGGNVSFECEDGFILRGSPVRQCRPNGMWDGETAVCDNGDHENGTGTNTYAALNSVYLMMNNQMRLLGMETMAWQEIRHAIILLTDGKSNMGGSPKTAVDHIREILNINQKRNDYLDVSKLTDTICGVGNMSANASDQERTPWHVTIKPKSQETCRGALISDQWVLTAAHCFRDGNDHSLWRVNVGDPKSQWGKEFLIEKAVISPGFDVFAKKNQGILEFYGDDIALLKLAQKVKMSTHARPICLPCTMEANLALRRPQGSTCRDHENELLNKQSVPAHFVALNGSKLNINLKMGVEWTSCAEVVSQEKTMFPNLTDVREVVTDQFLCSGTQEDESPCKGGSAIHCPRPHDFENGEYWPRSPYYNVSDEISFHCYDGYTLRGSANRTCQVNGRWSGQTAICDNGAGYCSNPGIPIGTRKVGSQYRLEDSVTYHCSRGLTLRGSQRRTCQEGGSWSGTEPSCQDSFMYDTPQEVAEAFLSSLTETIEGVDAEDGHGPGEQQKRKIVLDPSGSMNIYLVLDGSDSIGASNFTGAKKCLVNLIEKVASYGVKPRYGLVTYATYPKIWVKVSEADSSNADWVTKQLNEINYEDHKLKSGTNTKKALQAVYSMMSWPDDVPPEGWNRTRHVIILMTDGLHNMGGDPITVIDEIRDLLYIGKDRKNPREDYLDVYVFGVGPLVNQVNINALASKKDNEQHVFKVKDMENLEDVFYQMIDESQSLSLCGMVWEHRKGTDYHKQPWQAKISVIRPSKGHESCMGAVVSEYFVLTAAHCFTVDDKEHSIKVSVGGEKRDLEIEVVLFHPNYNINGKKEAGIPEFYDYDVALIKLKNKLKYGQTIRPICLPCTEGTTRALRLPPTTTCQQQKEELLPAQDIKALFVSEEEKKLTRKEVYIKNGDKKGSCERDAQYAPGYDKVKDISEVVTPRFLCTGGVSPYADPNTCRGDSGGPLIVHKRSRFIQVGVISWGVVDVCKNQKRQKQVPAHARDFHINLFQVLPWLKEKLQDEDLGFL

SEQ ID NO: 681 - protein, 175 aa, Homo sapiens
MGHEQNQGAALLQMLPLLWLLPHSWAVPEEQSMITFLPLLLGLSLGCTGAGGFVAHVESTCLLDDAGTPKDFTYCISFNKDLLTCWDPEENKMAPCEFGVLNSLANVLSQHLNQKDTLMQRLRNGLQNCATHTQPFWGSLTNRTRPPSVQVAKTTPFNTREPVMLACYVWGFYPA

SEQ ID NO: 682 - protein, 63 aa, Homo sapiens
MGTSSIFLCVLFLCGALGLTMSPARGRLRCYICGFTKPCHPVPTECRDDEACGISIGTSDAHC

SEQ ID NO: 683 - protein, 33 aa, Homo sapiens
  SITE 1: note = misc_feature - Xaa can be any naturally occurring amino acid
XLGLTYLSLLLIPAAGASSCPRTPLPAMAPLPQ

SEQ ID NO: 684 - protein, 198 aa, Homo sapiens
MLSELQDGKSKIVQKAAPEVQEDVKAFKTDLPSSLVSVSLRKPFSGPQEQEQISGKVTHLIQNNMPGNYVFSYDQFFRDKIMEKKQDHTYRVFKTVNRWADAYPFAQHFSEASVASKDVSVWCSNDYLGMSRHPQVLQATQETLQRHGAGAGGTRNISGTSKFHVELEQELAELHQKDSALLFSSCFVANDSTLFTLA

SEQ ID NO: 685 - protein, 171 aa, Homo sapiens
MLSELQDGKSKIVQKAAPEVQEDVKAFKTGNYVFSYDQFFRDKIMEKKQDHTYRVFKTVNRWADAYPFAQHFSEASVASKDVSVWCSNDYLGMSRHPQVLQATQETLQRHGAGAGGTRNISGTSKFHVELEQELAELHQKDSALLFSSCFVANDSTLFTLAKILPGCEIYS

SEQ ID NO: 686 - protein, 165 aa, Homo sapiens
MRGGEVALGWNKKKRLFCEDFRFKMVTAAMLLQCCPVLARGPTSLLGKVVKTHQFLFGIGRCPILATQGPNCSQIHLKATKAGGDSPSWAKGHCPFMLSELQDGKSKIVQKAAPEVQEDVKAFKTDLPSSLVSVSLRKPFSGPQEQEQISGKVTHLIQNNMPGNY

SEQ ID NO: 687 - protein, 574 aa, Homo sapiens
MRGGEVALGWNKKKRLFCEDFRFKMVTAAMLLQCCPVLARGPTSLLGKVVKTHQFLFGIGRCPILATQGPNCSQIHLKATKAGGDSPSWAKGHCPFMLSELQDGKSKIVQKAAPEVQEDVKAFKTGNYVFSYDQFFRDKIMEKKQDHTYRVFKTVNRWADAYPFAQHFSEASVASKDVSVWCSNDYLGMSRHPQVLQATQETLQRHGAGAGGTRNISGTSKFHVELEQELAELHQKDSALLFSSCFVANDSTLFTLAKILPGCEIYSDAGNHASMIQGIRNSGAAKFVFRHNDPDHLKKLLEKSNPKIPKIVAFETVHSMDGAICPLEELCDVSHQYGALTFVDEVHAVGLYGSRGAGIGERDGIMHKIDIISGTLGKAFGCVGGYIASTRDLVDMVRSYAAGFIFTTSLPPMVLSGALESVRLLKGEEGQALRRAHQRNVKHMRQLLMDRGLPVIPCPSHIIPIRVGNAALNSKLCDLLLSKHGIYVQAINYPTVPRGEELLRLAPSPHHSPQMMEDFVEKLLLAWTAVGLPLQDVSVAACNFCRRPVHFELMSEWERSYFGNMGPQYVTTYA

SEQ ID NO: 688 - protein, 587 aa, Homo sapiens
MVTAAMLLQCCPVLARGPTSLLGKVVKTHQFLFGIGRCPILATQGPNCSQIHLKATKAGGDSPSWAKGHCPFMLSELQDGKSKIVQKAAPEVQEDVKAFKTDLPSSLVSVSLRKPFSGPQEQEQISGKVTHLIQNNMPGNYVFSYDQFFRDKIMEKKQDHTYRVFKTVNRWADAYPFAQHFSEASVASKDVSVWCSNDYLGMSRHPQVLQATQETLQRHGAGAGGTRNISGTSKFHVELEQELAELHQKDSALLFSSCFVANDSTLFTLAKILPGCEIYSDAGNHASMIQGIRNSGAAKFVFRHNDPDHLKKLLEKSNPKIPKIVAFETVHSMDGAICPLEELCDVSHQYGALTFVDEVHAVGLYGSRGAGIGERDGIMHKIDIISGTLGKAFGCVGGYIASTRDLVDMVRSYAAGFIFTTSLPPMVLSGALESVRLLKGEEGQALRRAHQRNVKHMRQLLMDRGLPVIPCPSHIIPIRVGNAALNSKLCDLLLSKHGIYVQAINYPTVPRGEELLRLAPSPHHSPQMMEDFVEKLLLAWTAVGLPLQDVSVAACNFCRRPVHFELMSEWERSYFGNMGPQYVTTYA

SEQ ID NO: 689 - protein, 550 aa, Homo sapiens
MVTAAMLLQCCPVLARGPTSLLGKVVKTHQFLFGIGRCPILATQGPNCSQIHLKATKAGGDSPSWAKGHCPFMLSELQDGKSKIVQKAAPEVQEDVKAFKTGNYVFSYDQFFRDKIMEKKQDHTYRVFKTVNRWADAYPFAQHFSEASVASKDVSVWCSNDYLGMSRHPQVLQATQETLQRHGAGAGGTRNISGTSKFHVELEQELAELHQKDSALLFSSCFVANDSTLFTLAKILPGCEIYSDAGNHASMIQGIRNSGAAKFVFRHNDPDHLKKLLEKSNPKIPKIVAFETVHSMDGAICPLEELCDVSHQYGALTFVDEVHAVGLYGSRGAGIGERDGIMHKIDIISGTLGKAFGCVGGYIASTRDLVDMVRSYAAGFIFTTSLPPMVLSGALESVRLLKGEEGQALRRAHQRNVKHMRQLLMDRGLPVIPCPSHIIPIRVGNAALNSKLCDLLLSKHGIYVQAINYPTVPRGEELLRLAPSPHHSPQMMEDFVEKLLLAWTAVGLPLQDVSVAACNFCRRPVHFELMSEWERSYFGNMGPQYVTTYA

SEQ ID NO: 690 - protein, 141 aa, Homo sapiens
MVTAAMLLQCCPVLARGPTSLLGKVVKTHQFLFGIGRCPILATQGPNCSQIHLKATKAGGDSPSWAKGHCPFMLSELQDGKSKIVQKAAPEVQEDVKAFKTGRPCSVMVLELVAPATSQAPILPGCEIYSDAGNHASMIQG

SEQ ID NO: 691 - protein, 276 aa, Homo sapiens
  SITE 1: note = misc_feature - Xaa can be any naturally occurring amino acid
XELEQELAELHQKDSALLFSSCFVANDSTLFTLAKILPGCEIYSDAGNHASMIQGIRNSGAAKFVFRHNDPDHLKKLLEKSNPKIPKIVAFETVHSMDGAICPLEELCDVSHQYGALTFVDEVHAVGLYGSRGAGIGERDGIMHKIDIISGTLGKAFGCVGGYIASTRDLVDMVRSYAAGFIFTTSLPPMVLSGALESVRLLKGEEGQALRRAHQRNVKHMRQLLMDRGLPVIPCPSHIIPIRRSCCWLGLRWGCPSRMCLWLPAISVAVLYTLSS

SEQ ID NO: 692 - protein, 197 aa, Homo sapiens
GFEWGGQRRASHNSTFSAYSRGVFRRDAHKSEVAHRFKDLGEENFKALVLIAFAQYLQQCPFEDHVKLVNEVTEFAKTCVADESAENCDKSLHTLFGDKLCTVATLRETYGEMADCCAKQEPERNECFLQHKDDNPNLPRLVRPEVDVMCTAFHDNEETFLKKYLYEIARRHPYFYAPELLFFAKRYKAAFTECCQA

SEQ ID NO: 693 - protein, 417 aa, Homo sapiens
MKWVTFISLLFLFSSAYSRGVFRRDAHKSEVAHRFKDLGEENFKALAVARLSQRFPKAEFAEVSKLVTDLTKVHTECCHGDLLECADDRADLAKYICENQDSISSKLKECCEKPLLEKSHCIAEVENDEMPADLPSLAADFVESKDVCKNYAEAKDVFLGMFLYEYARRHPDYSVVLLLRLAKTYETTLEKCCAAADPHECYAKVFDEFKPLVEEPQNLIKQNCELFEQLGEYKFQNALLVRYTKKVPQVSTPTLVEVSRNLGKVGSKCCKHPEAKRMPCAEDYLSVVLNQLCVLHEKTPVSDRVTKCCTESLVNRRPCFSALEVDETYVPKEFNAETFTFHADICTLSEKERQIKKQTALVELVKHKPKATKEQLKAVMDDFAAFVEKCCKADDKETCFAEEGKKLVAASQAALGL

SEQ ID NO: 694 - protein, 609 aa, Homo sapiens [sequence omitted]

SEQ ID NO: 695 - protein, 604 aa, Homo sapiens
MKWVTFISLLFLFSSAYSRGVFRRDAHKSEVAHRFKDLGEENFKALVLIAFAQYLQQCPFEDHVKLVNEVTEFAKTCVADESAENCDKSLHTLFGDKLCTVATLRETYGEMADCCAKQEPERNECFLQHKDDNPNLPRLVRPEVDVMCTAFHDNEETFLKKYLYEIARRHPYFYAPELLFFAKRYKAAFTECCQAADKAACLLPKLDELRDEGKASSAKQRLKCASLQKFGERAFKAWAVARLSQRFPKAEFAEVSKLVTDLTKVHTECCHGDLLECADDRADLAKYICENQDSISSKLKECCEKPLLEKSHCIAEVENDEMPADLPSLAADFVESKDVCKNYAEAKDVFLGMFLYEYARRHPDYSVVLLLRLAKTYETTLEKCCAAADPHECYAKVFDEFKPLVEEPQNLIKQNCELFEQLGEYKFQNALLVRYTKKVPQVSTPTLVEVSRNLGKVGSKCCKHPEAKRMPCAEDYLSVVLNQLCVLHEKTPVSDRVTKCCTESLVNRRPCFSALEVDETYVPKEFNAETFTFHADICTLSEKERQIKKQTALVELVKHKPKATKEQLKAVMDDFAAFVEKCCKADDKETCFAEEPTMRIRERK

SEQ ID NO: 696 - protein, 396 aa, Homo sapiens
MKWVTFISLLFLFSSAYSRGVFRRDAHKSEVAHRFKDLGEENFKALVLIAFAQYLQQCPFEDHVKLVNEVTEFAKTCVADESAENCDKSLHTLFGDKLCTVATLRETYGEMADCCAKQEPERNECFLQHKDDNPNLPRLVRPEVDVMCTAFHDNEETFLKKYLYETTLEKCCAAADPHECYAKVFDEFKPLVEEPQNLIKQNCELFEQLGEYKFQNALLVRYTKKVPQVSTPTLVEVSRNLGKVGSKCCKHPEAKRMPCAEDYLSVVLNQLCVLHEKTPVSDRVTKCCTESLVNRRPCFSALEVDETYVPKEFNAETFTFHADICTLSEKERQIKKQTALVELVKHKPKATKEQLKAVMDDFAAFVEKCCKADDKETCFAEEGKKLVAASQAALGL

SEQ ID NO: 697 - protein, 396 aa, Homo sapiens
MKWVTFISLLFLFSSAYSRGVFRRDAHKSEVAHRFKDLGEENFKALVLIAFAQYLQQCPFEDHVKLVNEVTEFAKTCVADESAENCDKSLHTLFGDKLCTVATLRETYGEMADCCAKQEPERNECFLQHKDDNPNLPRLVRPEVDVMCTAFHDNEETFLKKYTYETTLEKCCAAADPHECYAKVFDEFKPLVEEPQNLIKQNCELFEQLGEYKFQNALLVRYTKKVPQVSTPTLVEVSRNLGKVGSKCCKHPEAKRMPCAEDYLSVVLNQLCVLHEKTPVSDRVTKCCTESLVNRRPCFSALEVDETYVPKEFNAETFTFHADICTLSEKERQIKKQTALVELVKHKPKATKEQLKAVMDDFAAFVEKCCKADDKETCFAEEGKKLVAASQAALGL

SEQ ID NO: 698 - protein, 494 aa, Homo sapiens
MKWVTFISLLFLFSSAYSRGVFRRDAHKSEVAHRFKDLGEENFKALYLYEIARRHPYFYAPELLFFAKRYKAAFTECCQAADKAACLLPKLDELRDEGKASSAKQRLKCASLQKFGERAFKAWAVARLSQRFPKAEFAEVSKLVTDLTKVHTECCHGDLLECADDRADLAKYICENQDSISSKLKECCEKPLLEKSHCIAEVENDEMPADLPSLAADFVESKDVCKNYAEAKDVFLGMFLYEYARRHPDYSVVLLLRLAKTYETTLEKCCAAADPHECYAKVFDEFKPLVEEPQNLIKQNCELFEQLGEYKFQNALLVRYTKKVPQVSTPTLVEVSRNLGKVGSKCCKHPEAKRMPCAEDYLSVVLNQLCVLHEKTPVSDRVTKCCTESLVNRRPCFSALEVDETYVPKEFNAETFTFHADICTLSEKERQIKKQTALVELVKHKPKATKEQLKAVMDDFAAFVEKCCKADDKETCFAEEGKKLVAASQAALGL

SEQ ID NO: 699 - protein, 105 aa, Homo sapiens
MKWVTFISLLFLFSSAYSRGVFRRDAHTYMKLPEDILTFMPRNSFSLLKGIKLLLQNVAKLLIKLPACCQSSMNFGMKGRLRLPNRDSSVPVSKNLEKELSKHGQ

SEQ ID NO: 700 - protein, 459 aa, Homo sapiens
MSQLKIVTNHLYLYEIARRHPYFYAPELLFFAKRYKAAFTECCQAADKAACLLPKLDELRDEGKASSAKQRLKCASLQKFGERAFKAWAVARLSQRFPKAEFAEVSKLVTDLTKVHTECCHGDLLECADDRADLAKYICENQDSISSKLKECCEKPLLEKSHCIAEVENDEMPADLPSLAADFVESKDVCKNYAEAKDVFLGMFLYEYARRHPDYSVVLLLRLAKTYETTLEKCCAAADPHECYAKVFDEFKPLVEEPQNLIKQNCELFEQLGEYKFQNALLVRYTKKVPQVSTPTLVEVSRNLGKVGSKCCKHPEAKRMPCAEDYLSVVLNQLCVLHEKTPVSDRVTKCCTESLVNRRPCFSALEVDETYVPKEFNAETFTFHADICTLSEKERQIKKQTALVELVKHKPKATKEQLKAVMDDFAAFVEKCCKADDKETCFAEEGKKLVAASQAALGL

SEQ ID NO: 701 - protein, 454 aa, Homo sapiens
  SITE 1: note = misc_feature - Xaa can be any naturally occurring amino acid
XFSKFRYLYEIARRHPYFYAPELLFFAKRYKAAFTECCQAADKAACLLPKLDELRDEGKASSAKQRLKCASLQKFGERAFKAWAVARLSQRFPKAEFAEVSKLVTDLTKVHTECCHGDLLECADDRADLAKYICENQDSISSKLKECCEKPLLEKSHCIAEVENDEMPADLPSLAADFVESKDVCKNYAEAKDVFLGMFLYEYARRHPDYSVVLLLRLAKTYETTLEKCCAAADPHECYAKVFDEFKPLVEEPQNLIKQNCELFEQLGEYKFQNALLVRYTKKVPQVSTPTLVEVSRNLGKVGSKCCKHPEAKRMPCAEDYLSVVLNQLCVLHEKTPVSDRVTKCCTESLVNRRPCFSALEVDETYVPKEFNAETFTFHADICTLSEKERQIKKQTALVELVKHKPKATKEQLKAVMDDFAAFVEKCCKADDKETCFAEEGKKLVAASQAALGL

SEQ ID NO: 702 - protein, 518 aa, Homo sapiens
MFLRAGLAALSPLLRSLRPSPVAAMSTGTFVVSQPLNYRGGARVEPADASGTEKAFEPATGRVIATFTCSGEKEVNLAVQNAKAAFKIWSQKSGMERCRILLEAARIIREREDEIATMECINNGKSIFEARLDIDISWQCLEYYAGLAASMAGEHIQLPGGSFGYTRREPLGVCVGIGAWNYPFQIASWKSAPALACGNAMVFKPSPFTPVSALLLAEIYSEAGVPPGLFNVVQGGAATGQFLCQHPDVAKVSFTGSVPTGMKIMEMSAKGIKPVTLELGGKSPLIIFSDCDMNNAVKGALMANFLTQGQVCCNGTRVFVQKEILDKFTEEVVKQTQRIKIGDPLLEDTRMGPLINRPHLERVLGFVKVAKEQGAKVLCGGDIYVPEDPKLKDGYYMRPCVLTNCRDDMTCVKEEIFGPVMSILSFDTEAEVLERANDTTFGLAAGVFTRDIQRAHRVVAELQAGTCFINNYNVSPVELPFGGYKKSGFGRENGRVTIEYYSQLKTVCVEMGDVESAF

SEQ ID NO: 703 - protein, 418 aa, Homo sapiens
MARRKPEGSSFNMTHLSMAMAFSFPPVASGQLHPQLGNTQHQTELGKELATTSTMPYQYPALTPEQKKELSDIAHRIVAPGKGILAADESTGSIAKRLQSIGTENTEENRRFYRQLLLTADDRVNPCIGGVILFHETLYQKADDGRPFPQVIKSKGGVVGIKVDKGVVPLAGTNGETTTQGLDGLSERCAQYKKDGADFAKWRCVLKIGEHTPSALAIMENANVLARYASICQQNGIVPIVEPEILPDGDHDLKRCQYVTEKVLAAVYKALSDHHIYLEGTLLKPNMVTPGHACTQKFSHEEIAMATVTALRRTVPPAVTGITFLSGGQSEEEASINLNAINKCPLLKPWALTFSYGRALQASALKAWGGKKENLKAAQEEYVKRALANSLACQGKYTPSGQAGAAASESLFVSNHAY

SEQ ID NO: 704 - protein, 278 aa, Homo sapiens
MARRKPEGSSFNMTHLSMAMAFSFPPVASGQLHPQLGNTQHQTELGKELATTSTMPYQYPALTPEQKKELSDIAHRIVAPGKGILAADESTGSIAKRLQSIGTENTEENRRFYRQLLLTADDRVNPCIGGVILFHETLYQKADDGRPFPQVIKSKGGVVGIKVDKGVVPLAGTNGETTTQGLDGLSERCAQYKKDGADFAKWRCVLKIGEHTPSALAIMENANVLARYASICQQNGIVPIVEPEILPDGDHDLKRCQYVTEKVLAAVYKALSDHHIYL

SEQ ID NO: 705 - protein, 418 aa, Homo sapiens; identical to SEQ ID NO: 703

SEQ ID NO: 706 - protein, 155 aa, Homo sapiens
MPYQYPALTPEQKKELSDIAHRIVAPGKGILAADESTGSIAKRLQSIGTENTEENRRFYRQLLLTADDRVNPCIGGVILFHETLYQKADDGRPFPQVIKSKGGVVGIKVDKGVVPLAGTNGETTTQGLDGLSERCAQYKKDGADFAKWRCVLKIG

SEQ ID NO: 707 - protein, 364 aa, Homo sapiens
MPYQYPALTPEQKKELSDIAHRIVAPGKGILAADESTGSIAKRLQSIGTENTEENRRFYRQLLLTADDRVNPCIGGVILFHETLYQKADDGRPFPQVIKSKGGVVGIKVDKGVVPLAGTNGETTTQGLDGLSERCAQYKKDGADFAKWRCVLKIGEHTPSALAIMENANVLARYASICQQNGIVPIVEPEILPDGDHDLKRCQYVTEKVLAAVYKALSDHHIYLEGTLLKPNMVTPGHACTQKFSHEEIAMATVTALRRTVPPAVTGITFLSGGQSEEEASINLNAINKCPLLKPWALTFSYGRALQASALKAWGGKKENLKAAQEEYVKRALANSLACQGKYTPSGQAGAAASESLFVSNHAY

SEQ ID NO: 708 - protein, 364 aa, Homo sapiens; identical to SEQ ID NO: 707

SEQ ID NO: 709 - protein, 364 aa, Homo sapiens; identical to SEQ ID NO: 707

SEQ ID NO: 710 - protein, 364 aa, Homo sapiens; identical to SEQ ID NO: 707

SEQ ID NO: 711 - protein, 361 aa, Homo sapiens
MPYQYPALTPEQKKELSDIAHRIVAPGKGILAADESTGSIAKRLQSIGTENTEENRRFYRQLLLTADDRVNPCIGGVILFHETLYQKADDGRPFPQVIKSKGGVVGIKVDKGVVPLAGTNGETTTQGLDGLSERCAQYKKDGADFAKWRCVLKIGEHTPSALAIMENANVLARYASICQQNGIVPIVEPEILPDGDHDLKRCQYVTEKVLAAVYKALSDHHIYLEGTLLKPNMVTPGHACTQKFSHEEIAMATVTALRRTVPPAVTGITFLSGGQSEEEASINLNAINKCPLLKPWALTFSYGRALQASALKAWGGKKENLKAAQEEYVKRALVRIGRRWAGCLGGWDSEKSPSHSTPLPA

SEQ ID NO: 712 - protein, 364 aa, Homo sapiens; identical to SEQ ID NO: 707

SEQ ID NO: 713 - protein, 368 aa, Homo sapiens
MPYQYPALTPEQKKELSDIAHRIVAPGKGILAADESTGSIAKRLQSIGTENTEENRRFYRQLLLTADDRVNPCIGGVILFHETLYQKADDGRPFPQVIKSKGGVVGIKVDKGVVPLAGTNGETTTQGLDGLSERCAQYKKDGADFAKWRCVLKIGEHTPSALAIMENANVLARYASICQQVGLQNGIVPIVEPEILPDGDHDLKRCQYVTEKVLAAVYKALSDHHIYLEGTLLKPNMVTPGHACTQKFSHEEIAMATVTALRRTVPPAVTGITFLSGGQSEEEASINLNAINKCPLLKPWALTFSYGRALQASALKAWGGKKENLKAAQEEYVKRALANSLACQGKYTPSGQAGAAASESLFVSNHAY

SEQ ID NO: 714 - protein, 140 aa, Homo sapiens
MPYQYPALTPEQKKELSDIAHRIVAPGSIAKRLQSIGTENTEENRRFYRQLLLTADDRVNPCIGGVILFHETLYQKADDGRPFPQVIKSKGGVVGIKVDKGVVPLAGTNGETTTQGLDGLSERCAQYKKDGADFAKWRCV

SEQ ID NO: 715 - protein, 162 aa, Homo sapiens
MPYQYPALTPEQKKELSDIAHRIVAPGSIAKRLQSIGTENTEENRRFYRQLLLTADDRVNPCIGGVILFHETLYQKADDGRPFPQVIKSKGGVVGIKVDKGVVPLAGTNGETTTQGLDGLSERCAQYKKDGADFAKWRCVLKIGEHTPSALAIMENANVLAR

SEQ ID NO: 716 - protein, 204 aa, Homo sapiens
RRFYRQLLLTADDRVNPCIGGVILFHETLYQKADDGRPFPQVIKSKGGVVGIKVDKGVVPLAGTNGETTTQGLDGLSERCAQYKKDGADFAKWRCVLKIGEHTPSALAIMENANVLARYASICQQVLAAVYKALSDHHIYLEGTLLKPNMVTPGHACTQKFSHEEIAMATVTALRRTVPPAVTGITFLSGGQSEEEASINLNAI

SEQ ID NO: 717 - protein, 130 aa, Homo sapiens
  SITE 1: note = misc_feature - Xaa can be any naturally occurring amino acid
XPGHACTQKFSHEEIAMATVTALRRTVPPAVTGITFLSGGQSEEEASINLNAINKCPLLKPWALTFSYGRALQASALKAWGGKKENLKAAQEEYVKRALANSLACQGKYTPSGQAGAAASESLFVSNHAY

SEQ ID NO: 718 - protein, 464 aa, Homo sapiens
MAASCLVLLALCLLLPLLLLGGWKRWRRGRAARHVVAVVLGDVGRSPRMQYHALSLAMHGFSVTLLGFCNSKPHDELLQNNRIQIVGLTELQSLAVGPRVFQYGVKVVLQAMYLLWKLMWREPGAYIFLQNPPGLPSIAVCWFVGCLCGSKLVIDWHNYGYSIMGLVHGPNHPLVLLAKWYEKFFGRLSHLNLCVTNAMREDLADNWHIRAVTVYDKPASFFKETPLDLQHRLFMKLGSMHSPFRARSEPEDPVTERSAFTERDAGSGLVTRLRERPALLVSSTSWTEDEDFSILLAALEKFEQLTLDGHNLPSLVCVITGKGPLREYYSRLIHQKHFQHIQVCTPWLEAEDYPLLLGSADLGVCLHTSSSGLDLPMKVVDMFGCCLPVCAVNFKCLHELVKHEENGLVFEDSEELAAQLQMLFSNFPDPAGKLNQFRKNLRESQQLRWDESWVQTVLPLVMDT

SEQ ID NO: 719 - protein, 184 aa, Homo sapiens
MAASCLVLLALCLLLPLLLLGGWKRWRRGRAARHVVAVVLGDVGRSPRMQYHALSLAMHGFSVTLLGFCNSKPHDELLQNNRIQIVGLTELQSLAVGPRVFQYGVKVVLQAMYLLWKLMWREPGAYIFLQVCLALLSAGSWAAFVEASSSLTGTTMATPSWVWCMAPTIPSFCWPSGTRSSLGA

SEQ ID NO: 720 - protein, 84 aa, Homo sapiens
MAASCLVLLALCLLLPLLLLGGWKRWRRGRAARHVVAVVLGDVGRSPRMQYHALSLAMHGFSVTLLGFCSEWPRVWEGRCSLSR

SEQ ID NO: 721 - protein, 168 aa, Homo sapiens
MYLLWKLMWREPGAYIFLQNPPGLPSIAVCWFVGCLCGSKLVIDWHNYGYSIMGLVHGPNHPLVLLAKWYEKFFGRLSHLNLCVTNAMREDLADNWHIRAVTVYDKPASFFKETPLDLQHRLFMKLGSMHSPFRARSEPEDPVTERSAFTERDAGSGLVTRLRERPAL

SEQ ID NO: 722 - protein, 353 aa, Homo sapiens
MYLLWKLMWREPGAYIFLQNPPGLPSIAVCWFVGCLCGSKLVIDWHNYGYSIMGLVHGPNHPLVLLAKWYEKFFGRLSHLNLCVTNAMREDLADNWHIRAVTVYDKPASFFKETPLDLQHRLFMKLGSMHSPFRARSEPEDPVTERSAFTERDAGSGLVTRLRERPALLVSSTSWTEDEDFSILLAALEKFEQLTLDGHNLPSLVCVITGKGPLREYYSRLIHQKHFQHIQVCTPWLEAEDYPLLLGSADLGVCLHTSSSGLDLPMKVVDMFGCCLPVCAVNFKCLHELVKHEENGLVFEDSEELAAQLQMLFSNFPDPAGKLNQFRKNLRESQQLRWDESWVQTVLPLVMDT

SEQ ID NO: 723 - protein, 353 aa, Homo sapiens; identical to SEQ ID NO: 722

SEQ ID NO: 724 - protein, 324 aa, Homo sapiens
MAPLLLQLAVLGAALAAAALVLISIVAFTTATKMPALHRHEEEKFFLNAKGQKETLPSIWDSPTKQLSVVVPSYNEEKRLPVMMDEALSYLEKRQKRDPAFTYEVIVVDDGSKDQTSKVAFKYCQKYGSDKVRVITLVKNRGKGGAIRMGIFSSRGEKILMADADGATKFPDVEKLEKGLNDLQPWPNQMAIACGSRAHLEKESIAQRSYFRTLLMYGFHFLVWFLCVKGIRDTQCGFKLFTREAASRTFSSLHVERWAFDVELLYIAQFFKIPIAEIAVNWTEIEGSKLVPFWSWLQMGKDLLFIRLRYLTGAWRLEQTRKMN

SEQ ID NO: 725 - protein, 294 aa, Homo sapiens
MAPLLLQLAVLGAALAAAALVLISIVAFTTATKMPALHRHEEEKFFLNAKGQKETLPSIWDSPTKQLSVVVPSYNEEKRLPVMMDEALSYLEKRQKYGSDKVRVITLVKNRGKGGAIRMGIFSSRGEKILMADADGATKFPDVEKLEKGLNDLQPWPNQMAIACGSRAHLEKESIAQRSYFRTLLMYGFHFLVWFLCVKGIRDTQCGFKLFTREAASRTFSSLHVERWAFDVELLYIAQFFKIPIAEIAVNWTEIEGSKLVPFWSWLQMGKDLLFIRLRYLTGAWRLEQTRKMN

SEQ ID NO: 726 - protein, 102 aa, Homo sapiens
MASRGARQRLKGSGASSGDTAPAADKLRELLGSREAGGAEHRTEHTTSSMGKGFRLGNIPQHMPFAPMLTCCFMPGQLHFMQEFYKLIRFLCFTFCDVFWLL

SEQ ID NO: 727 - protein, 168 aa, Homo sapiens
MASRGARQRLKGSGASSGDTAPAADKLRELLGSREAGGAEHRTELSGNKAGQVWAPEGSTAFKCLLSARLCAALLSNISDCDETFNYWEPTHYLIYGEGFQTWEYSPAYAIRSYAYLLLHAWPAAFHARILQTNKGCVQEVWVARESNDASLLGSQHWHVLLIISIPS

SEQ ID NO: 728 - protein, 618 aa, Homo sapiens
MASRGARQRLKGSGASSGDTAPAADKLRELLGSREAGGAEHRTELSGNKAGQVWAPEGSTAFKCLLSARLCAALLSNISDCDETFNYWEPTHYLIYGEGFQTWEYSPAYAIRSYAYLLLHAWPAAFHARILQTNKILVFYFLRCLLAFVSCICELYFYKAVCKKFGLHVSRMMLAFLVLSTGMFCSSSAFLPSSFCMYTTLIAMTGWYMDKTSIAVLGVAAGAILGWPFSAALGLPIAFDLLVMKHRWKSFFHWSLMALILFLVPVVVIDSYYYGKLVIAPLNIVLYNVFTPHGPDLYGTEPWYFYLINGFLNFNVAFALALLVLPLTSLMEYLLQRFHVQNLGHPYWLTLAPMYIWFIIFFIQPHKEERFLFPVYPLICLCGAVALSALQHSFLYFQKCYHFVFQRYRLEHYTVTSNWLALGTVFLFGLLSFSRSVALFRGYHGPLDLYPEFYRIATDPTIHTVPEGRPVNVCVGKEWYRFPSSFLLPDNWQLQFIPSEFRGQLPKPFAEGPLATRIVPTDMNDQNLEEPSRYIDISKCHYLVDLDTMRETPREPKYSSNKEEWISLAYRPFLDASRSSKLLRAFYVPFLSDQYTVYVNYTILKPRKAKQIRKKSGG

SEQ ID NO: 729 - protein, 611 aa, Homo sapiens
MASRGARQRLKGSGASSGDTAPAADKLRELLGSREAGGAEHRTELSGNKAGQVWAPEGSTAFKCLLSARLCAALLSNISDCDETFNYWEPTHYLIYGEGFQTWEYSPAYAIRSYAYLLLHAWPAAFHARILQTNKILVFYFLRCLLAFVSCICELYFYKAVCKKFGLHVSRMMLAFLVLSTGMFCSSSAFLPSSFCMYTTLIAMTGWYMDKTSIAVLGVAAGAILGWPFSAALGLPIAFDLLVMKHRWKSFFHWSLMALILFLVPVVVIDSYYYGKLVIAPLNIVLYNVFTPHGPDLYGTEPWYFYLINGFLNFNVAFALALLVLPLTSLMEYLLQRFHVQNLGHPYWLTLAPMYIWFIIFFIQPHKEERFLFPVYPLICLCGAVALSALQKCYHFVFQRYRLEHYTVTSNWLALGTVFLFGLLSFSRSVALFRGYHGPLDLYPEFYRIATDPTIHTVPEGRPVNVCVGKEWYRFPSSFLLPDNWQLQFIPSEFRGQLPKPFAEGPLATRIVPTDMNDQNLEEPSRYIDISKCHYLVDLDTMRETPREPKYSSNKEEWISLAYRPFLDASRSSKLLRAFYVPFLSDQYTVYVNYTILKPRKAKQIRKKSGG

SEQ ID NO: 730 - protein, 198 aa, Homo sapiens
MASRGARQRLKGSGASSGDTAPAADKLRELLGSREAGGAEHRTELSGNKAGQVWAPEGSTAFKCLLSARLCAALLSNISDCDETFNYWEPTHYLIYGEGFQTWEYSPAYAIRSYAYLLLHAWPAAFHARILQTNKILVFYFLRCLLAFVSCICELYFYKAVCKKFGLHVSRMMLAFLVLSTGMFCSSSVYPLPLICWS

SEQ ID NO: 731 - protein, 134 aa, Homo sapiens
MASRGARQRLKGSGASSGDTAPAADKLRELLGSREAGGAEHRTELSGNKAGQVWAPEGSTAFKCLLSARLCAALLSNISDCDETFNYWEPVDTLPHLWGRVSDLGIFPSICHSLLCLPVASCLASCISCKNSTN

SEQ ID NO: 732 - protein, 447 aa, Homo sapiens
MMLAFLVLSTGMFCSSSAFLPSSFCMYTTLIAMTGWYMDKTSIAVLGVAAGAILGWPFSAALGLPIAFDLLVMKHRWKSFFHWSLMALILFLVPVVVIDSYYYGKLVIAPLNIVLYNVFTPHGPDLYGTEPWYFYLINGFLNFNVAFALALLVLPLTSLMEYLLQRFHVQNLGHPYWLTLAPMYIWFIIFFIQPHKEERFLFPVYPLICLCGAVALSALQHSFLYFQKCYHFVFQRYRLEHYTVTSNWLALGTVFLFGLLSFSRSVALFRGYHGPLDLYPEFYRIATDPTIHTVPEGRPVNVCVGKEWYRFPSSFLLPDNWQLQFIPSEFRGQLPKPFAEGPLATRIVPTDMNDQNLEEPSRYIDISKCHYLVDLDTMRETPREPKYSSNKEEWISLAYRPFLDASRSSKLLRAFYVPFLSDQYTVYVNYTILKPRKAKQIRKKSGG

SEQ ID NO: 733 - protein, 440 aa, Homo sapiens
MMLAFLVLSTGMFCSSSAFLPSSFCMYTTLIAMTGWYMDKTSIAVLGVAAGAILGWPFSAALGLPIAFDLLVMKHRWKSFFHWSLMALILFLVPVVVIDSYYYGKLVIAPLNIVLYNVFTPHGPDLYGTEPWYFYLINGFLNFNVAFALALLVLPLTSLMEYLLQRFHVQNLGHPYWLTLAPMYIWFIIFFIQPHKEERFLFPVYPLICLCGAVALSALQKCYHFVFQRYRLEHYTVTSNWLALGTVFLFGLLSFSRSVALFRGYHGPLDLYPEFYRIATDPTIHTVPEGRPVNVCVGKEWYRFPSSFLLPDNWQLQFIPSEFRGQLPKPFAEGPLATRIVPTDMNDQNLEEPSRYIDISKCHYLVDLDTMRETPREPKYSSNKEEWISLAYRPFLDASRSSKLLRAFYVPFLSDQYTVYVNYTILKPRKAKQIRKKSGG

SEQ ID NO: 734 - protein, 24 aa, Homo sapiens
  SITE 1: note = misc_feature - Xaa can be any naturally occurring amino acid
XEEWISLAYRPFLDASRVSLCCPG

SEQ ID NO: 735 - protein, 35 aa, Homo sapiens
  SITE 1: note = misc_feature - Xaa can be any naturally occurring amino acid
XKYSSNKEEWISLAYRPFLDASSFEGWKTKITMPV

SEQ ID NO: 736 - protein, 207 aa, Homo sapiens
  SITE 1: note = misc_feature - Xaa can be any naturally occurring amino acid
XTVFLFGLLSFSRSVALFRGYHGPLDLYPEFYRIATDPTIHTVPEGRPVNVCVGKEWYRFPSSFLLPDNWQLQFIPSEFRGQLPKPFAEGPLATRIVPTDMNDQNLEEPSRYIDISKCHYLVDLDTMRETPREPKYSSNKEEWISLAYRPFLDASRSSKLLRAFYVPFLSDQYTVYVNYTILKPRKAKQIRKKSGDRRRAEPTYRKN

SEQ ID NO: 737 - protein, 111 aa, Homo sapiens
MRPLKPGAPLPALFLLALALSPHGAHGRPRGRRGARVTDKEPKPLLFLPAAGAGRTPSGSRSAEIFPRDSNLKDKFIKHFTGPVTFSPECSKHFHRLYYNTRECSTPAYIS

SEQ ID NO: 738 - protein, 129 aa, Homo sapiens
MRPLKPGAPLPALFLLALALSPHGAHGRPRGRRGARVTDKEPKPLLFLPAAGAGRTPSGSRSAEIFPRDSNLKDKFIKHFTGPVTFSPECSKHFHRLYYNTRECSTPAYYKRCARLLTRLAVSPLCSQT

SEQ ID NO: 739 - protein, 59 aa, Homo sapiens
MKDKFLKHLTGPLYFSPKCSKHFHRLYHNTRDCTIPAYYKRCARLLTRLAVSPVCMEDK

SEQ ID NO: 740 - protein, 59 aa, Homo sapiens; identical to SEQ ID NO: 739

SEQ ID NO: 741 - protein, 60 aa, Homo sapiens
MKDKFLKHLTGPLYFSPKCSKHFHRLYHNTRDCTIPAYYKRCARLLTRLAVSPVCMEDKQ

SEQ ID NO: 742 - protein, 151 aa, Homo sapiens
MRGPGHPLLLGLLLVLGAAGRGRGGAEPREPADGQALLRLVVELVQELRKHHSAEHKGLQLLGRDCALGRAEAAGLGPSPEQRVEIVPRDLRMKDKFLKHLTGPLYFSPKCSKHFHRLYHNTRDCTIPAYYKRCARLLTRLAVSPVCMEDK

SEQ ID NO: 743 - protein, 152 aa, Homo sapiens
MRGPGHPLLLGLLLVLGAAGRGRGGAEPREPADGQALLRLVVELVQELRKHHSAEHKGLQLLGRDCALGRAEAAGLGPSPEQRVEIVPRDLRMKDKFLKHLTGPLYFSPKCSKHFHRLYHNTRDCTIPAYYKRCARLLTRLAVSPVCMEDKQ

SEQ ID NO: 744 - protein, 91 aa, Homo sapiens
MRGPGHPLLLGLLLVLGPSPEQRVEIVPRDLRMKDKFLKHLTGPLYFSPKCSKHFHRLYHNTRDCTIPAYYKRCARLLTRLAVSPVCMEDK

SEQ ID NO: 745 - protein, 102 aa, Homo sapiens
  SITE 1: note = misc_feature - Xaa can be any naturally occurring amino acid
XHHSAEHKGLQLLGRDCALGRAEAAGLGPSPEQRVEIVPRDLRMKDKFLKHLTGPLYFSPKCSKHFHRLYHNTRDCTIPAYYKRCARLLTRLAVSPVCMEDK

SEQ ID NO: 746 - protein, 112 aa, Homo sapiens
AAAVGSVATLATEPGEDAFRKLFRFYRQSRPGTADLEGVIDFSAAHAARGKGPGAQKVIKSQLNVSSVSEQNAYRAGLQPVSKWQAYGLKGYPGIKKRLNGDPEVYWRNCVG

SEQ ID NO: 747 - protein, 389 aa, Homo sapiens
MGKMAAAVGSVATLATEPGEDAFRKLFRFYRQSRPGTADLEGVIDFSAAHAARGKGPGAQKVIKSQLNVSSVSEQNAYRAGLQPVSKWQAYGLKGYPGFIFIPNPFLPGYQWHWVKQCLKLYSQKPNVCNLDKHMSKEETQDLWEQSKEFLRYKEATKRRPRSLLEKLRWVTVGYHYNWDSKKYSADHYTPFPSDLGFLSEQVAAACGFEDFRAEAGILNYYRLDSTLGIHVDRSELDHSKPLLSFSFGQSAIFLLGGLQRDEAPTAMFMHSGDIMIMSGFSRLLNHAVPRVLPNPEGEGLPHCLEAPLPAVLPRDSMVEPCSMEDWQVCASYLKTARVNMTVRQVLATDQNFPLEPIEDEKRDISTEGFCHLDDQNSEVKRARINPDS

SEQ ID NO: 748 - protein, 116 aa, Homo sapiens
MGKMAAAVGSVATLATEPGEDAFRKLFRFYRQSRPGTADLEGVIDFSAAHAARGKGPGAQKVIKSQLNVSSVSEQNAYRAGLQPVSKWQAYGLKGYPGIKKRLNGDPEVYWRNCVG

SEQ ID NO: 749 - protein, 394 aa, Homo sapiens
MAAASGYTDLREKLKSMTSRDNYKAGSREAAAAAAAAVAAAAAAAAAAEPYPVSGAKRKYQEDSDPERSDYEEQQLQKEEEARKVKSGIRQMRLFSQDECAKIEARIDEVVSRAEKGLYNEHTVDRAPLRNKYFFGEGYTYGAQLQKRGPGQERLYPPGDVDEIPEWVHQLVIQKLVEHRVIPEGFVNSAVINDYQPGGCIVSHVDPIHIFERPIVSVSFFSDSALCFGCKFQFKPIRVSEPVLSLPVRRGSVTVLSGYAADEITHCIRPQDIKERRAVIILRKTRLDAPRLETKSLSSSVLPPSYASDRLSGNNRDPALKPKRSHRKADPDAAHRPRILEMDKEENRRSVLLPTHRRRGSFSSENYWRKSYESSEDCSEAAGSPARKVKMRRH

SEQ ID NO: 750 - protein, 53 aa, Homo sapiens
MDKEENRRSVLLPTHRRRGSFSSENYWRKSYESSEDCSEAAGSPARKVKMRRH

SEQ ID NO: 751 - protein, 528 aa, Homo sapiens
MQGPWVLLLLGLRLQLSLGVIPAEEENPAFWNRQAAEALDAAKKLQPIQKVAKNLILFLGDGLGVPTVTATRILKGQKNGKLGPETPLAMDRFPYLALSKTYNVDRQVPDSAATATAYLCGVKANFQTIGLSAAARFNQCNTTRGNEVISVMNRAKQAGKSVGVVTTTRVQHASPAGTYAHTVNRNWYSDADMPASARQEGCQDIATQLISNMDIDVILGGGRKYMFPMGTPDPEYPADASQNGIRLDGKNLVQEWLAKHQGAWYVWNRTELMQASLDQSVTHLMGLFEPGDTKYEIHRDPTLDPSLMEMTEAALRLLSRNPRGFYLFVEGGRIDHGHHEGVAYQALTEAVMFDDAIERAGQLTSEEDTLTLVTADHSHVFSFGGYTLRGSSIFGLAPSKAQDSKAYTSILYGNGPGYVFNSGVRPDVNESESGSPDYQQQAAVPLSSETHGGEDVAVFARGPQAHLVHGVQEQSFVAHVMAFAACLEPYTACDLAPPACTTDAAHPVAASLPLLAGTLLLLGASAAP

SEQ ID NO: 752 - protein, 50 aa, Homo sapiens
MQGPWVLLLLGLRLQLSLGVIPGNEAPQAVPHTGHPLSQADLISTLPLAS

SEQ ID NO: 753 - protein, 469 aa, Homo sapiens
MFLGDGMGVSTVTAARILKGQLHHNPGEETRLEMDKFPFVALSKTYNTNAQVPDSAGTATAYLCGVKANEGTVGVSAATERSRCNTTQGNEVTSILRWAKDAGKSVGIVTTTRVNHATPSAAYAHSADRDWYSDNEMPPEALSQGCKDIAYQLMHNIRDIDVIMGGGRKYMYPKNKTDVEYESDEKARGTRLDGLDLVDTWKSFKPRYKHSHFIWNRTELLTLDPHNVDYLLGLFEPGDMQYELNRNNVTDPSLSEMVVVAIQILRKNPKGFFLLVEGGRIDHGHHEGKAKQALHEAVEMDRAIGQAGSLTSSEDTLTVVTADHSHVFTFGGYTPRGNSIFGLAPMLSDTDKKPFTAILYGNGPGYKVVGGERENVSMVDYAHNNYQAQSAVPLRHETHGGEDVAVFSKGPMAHLLHGVHEQNYVPHVMAYAACIGANLGHCAPASSAGSLAAGPLLLALALYPLSVLF

SEQ ID NO: 754 - protein, 524 aa, Homo sapiens
MISPFLVLAIGTCLTNSLVPEKEKDPKYWRDQAQETLKYALELQKLNTNVAKNVIMFLGDGMGVSTVTAARILKGQLHHNPGEETRLEMDKFPFVALSKTYNTNAQVPDSAGTATAYLCGVKANEGTVGVSAATERSRCNTTQGNEVTSILRWAKDAGKSVGIVTTTRVNHATPSAAYAHSADRDWYSDNEMPPEALSQGCKDIAYQLMHNIRDIDVIMGGGRKYMYPKNKTDVEYESDEKARGTRLDGLDLVDTWKSFKPRYKHSHFIWNRTELLTLDPHNVDYLLGLFEPGDMQYELNRNNVTDPSLSEMVVVAIQILRKNPKGFFLLVEGGRIDHGHHEGKAKQALHEAVEMDRAIGQAGSLTSSEDTLTVVTADHSHVFTFGGYTPRGNSIFGLAPMLSDTDKKPFTAILYGNGPGYKVVGGERENVSMVDYAHNNYQAQSAVPLRHETHGGEDVAVFSKGPMAHLLHGVHEQNYVPHVMAYAACIGANLGHCAPASSAGSLAAGPLLLALALYPLSVLF

SEQ ID NO: 755 - protein, 524 aa, Homo sapiens; identical to SEQ ID NO: 754

SEQ ID NO: 756 - protein, 447 aa, Homo sapiens
MPWSFRSSTPTWLRMSSCSWEMTYNTNAQVPDSAGTATAYLCGVKANEGTVGVSAATERSRCNTTQGNEVTSILRWAKDAGKSVGIVTTTRVNHATPSAAYAHSADRDWYSDNEMPPEALSQGCKDIAYQLMHNIRDIDVIMGGGRKYMYPKNKTDVEYESDEKARGTRLDGLDLVDTWKSFKPRYKHSHFIWNRTELLTLDPHNVDYLLGLFEPGDMQYELNRNNVTDPSLSEMVVVAIQILRKNPKGFFLLVEGGRIDHGHHEGKAKQALHEAVEMDRAIGQAGSLTSSEDTLTVVTADHSHVFTFGGYTPRGNSIFGLAPMLSDTDKKPFTAILYGNGPGYKVVGGERENVSMVDYAHNNYQAQSAVPLRHETHGGEDVAVFSKGPMAHLLHGVHEQNYVPHVMAYAACIGANLGHCAPASSAGSLAAGPLLLALALYPLSVLF

SEQ ID NO: 757 - protein, 216 aa, Homo sapiens
  SITE 1: note = misc_feature - Xaa can be any naturally occurring amino acid
XHSHFIWNRTELLTLDPHNVDYLLGGRIDHGHHEGKAKQALHEAVEMDRAIGQAGSLTSSEDTLTVVTADHSHVFTFGGYTPRGNSIFGLAPMLSDTDKKPFTAILYGNGPGYKVVGGERENVSMVDYAHNNYQAQSAVPLRHETHGGEDVAVFSKGPMAHLLHGVHEQNYVPHVMAYAACIGANLGHCAPASSAGSLAAGPLLLALALYPLSVLF

SEQ ID NO: 758 - protein, 535 aa, Homo sapiens
MLGPCMLLLLLLLGLRLQLSLGIIPVEEENPDFWNREAAEALGAAKKLQPAQTAAKNLIIFLGDGMGVSTVTAARILKGQKKDKLGPEIPLAMDRFPYVALSKTYNVDKHVPDSGATATAYLCGVKGNFQTIGLSAAARFNQCNTTRGNEVISVMNRAKKAGKSVGVVTTTRVQHASPAGTYAHTVNRNWYSDADVPASARQEGCQDIATQLISNMDIDVILGGGRKYMFRMGTPDPEYPDDYSQGGTRLDGKNLVQEWLAKRQGARYVWNRTELMQASLDPSVTHLMGLFEPGDMKYEIHRDSTLDPSLMEMTEAALRLLSRNPRGFFLFVEGGRIDHGHHESRAYRALTETIMFDDAIERAGQLTSEEDTLSLVTADHSHVFSFGGYPLRGSSIFGLAPGKARDRKAYTVLLYGNGPGYVLKDGARPDVTESESGSPEYRQQSAVPLDEETHAGEDVAVFARGPQAHLVHGVQEQTFIAHVMAFAACLEPYTACDLAPPAGTTDAAHPGRSVVPALLPLLAGTLLLLETATAP

SEQ ID NO: 759 - protein, 532 aa, Homo sapiens
MQGPWVLLLLGLRLQLSLGIIPVEEENPDFWNRQAAEALGAAKKLQPAQTAAKNLIIFLGDGMGVSTVTAARILKGQKKDKLGPETFLAMDRFPYVALSKTYSVDKHVPDSGATATAYLCGVKGNFQTIGLSAAARFNQCNTTRGNEVISVMNRAKKAGKSVGVVTTTRVQHASPAGAYAHTVNRNWYSDADVPASARQEGCQDIATQLISNMDIDVILGGGRKYMFPMGTPDPEYPDDYSQGGTRLDGKNLVQEWLAKHQGARYVWNRTELLQASLDPSVTHLMGLFEPGDMKYEIHRDSTLDPSLMEMTEAALLLLSRNPRGFFLFVEGGRIDHGHHESRAYRALTETIMFDDAIERAGQLTSEEDTLSLVTADHSHVFSFGGYPLRGSSIFGLAPGKARDRKAYTVLLYGNGPGYVLKDGARPDVTESESGSPEYRQQSAVPLDGETHAGEDVAVFARGPQAHLVHGVQEQTFIAHVMAFAACLEPYTACDLAPRAGTTDAAHPGPSVVPALLPLLAGTLLLLGTATAP

SEQ ID NO: 760 - protein, 432 aa, Homo sapiens
MSASKIPLFKMKDLILILCLLEMSFAVPFFPQQSGTPGMASLSLETMRQLGSLQRLNTLSQYSRYGFGKSFNSLWMHGLLPPHSSLPWMRPREHETQQPSLKPQQPGLKPFLQSAAATTNQATALKEALQPPIHLGHLPLQEGELPLVQQQVAPSDKPPKPELPGVDFADPQGPSLPGMDFPDPQGPSLPGLDFADPQGSTIFQIARLISHGPMPQNKQSPLYPGMLYVPFGANQLNAPARLGIMSSEEVAGGREDPMAYGAMFPGFGGMRPGFEGMPHNPAMGGDFTLEFDSPVAATKGPENEEGGAQGSPMPEANPDNLENPAFLTELEPAPHAGLLALPKDDIPGLPRSPSGKMKGLPSVTPAAADPLMTPELADVYRTYDADMTTSVDFQEEATMDTTMAPNSLQTSMPGNKAQEPEMMHDAWHFQEP

SEQ ID NO: 761 - protein, 447 aa, Homo sapiens
MSASKIPLFKMKDLILILCLLEMSFAVPFFPQQSGTPGMASLSLETMRQLGSLQRLNTLSQYSRYGFGKSFNSLWMHGLLPPHSSLPWMRPREHETQQYEYSLPVHPPPLPSQPSLKPQQPGLKPFLQSAAATTNQATALKEALQPPIHLGHLPLQEGELPLVQQQVAPSDKPPKPELPGVDFADPQGPSLPGMDFPDPQGPSLPGLDFADPQGSTIFQIARLISHGPMPQNKQSPLYPGMLYVPFGANQLNAPARLGIMSSEEVAGGREDPMAYGAMFPGFGGMRPGFEGMPHNPAMGGDFTLEFDSPVAATKGPENEEGGAQGSPMPEANPDNLENPAFLTELEPAPHAGLLALPKDDIPGLPRSPSGKMKGLPSVTPAAADPLMTPELADVYRTYDADMTTSVDFQEEATMDTTMAPNSLQTSMPGNKAQEPEMMHDAWHFQEP

SEQ ID NO: 762 - protein, 446 aa, Homo sapiens [sequence omitted]

SEQ ID NO: 763 - protein, 193 aa, Homo sapiens
HKSKWNITMESYVVHTNYDEYAIFLTKKFSRHHGPTITAKLYGRAPQLRETLLQDFRVVAQGVGIPEDSIFTMADRGECVPGEQEPEPILIPRVRRAVLPQEEEGSGGGQLVTEVTKKEDSCQLGYSAGPCMGMTSRYFYNGTSMACETFQYGGCMGNGNNFVTVRGPCRAFIQLWAFDAVKGKCVLFPYGGC

SEQ ID NO: 764 - protein, 352 aa, Homo sapiens
MRSLGALLLLLSACLAVSAGPVPTPPDNIQVQENFNISRIYGKWYNLAIGSTCPWLKKIMDRMTVSTLVLGEGATEAEISMTSTRWRKGVCEETSGAYEKTDTDGKFLYHKSKWNITMESYVVHTNYDEYAIFLTKKFSRHHGPTITAKLYGRAPQLRETLLQDFRVVAQGVGIPEDSIFTMADRGECVPGEQEPEPILIPRVRRAVLPQEEEGSGGGQLVTEVTKKEDSCQLGYSAGPCMGMTSRYFYNGTSMACETFQYGGCMGNGNNFVTEKECLQTCRTVAACNLPIVRGPCRAFIQLWAFDAVKGKCVLFPYGGCQGNGNKFYSEKECREYCGVPGDGDEELLRFSN

SEQ ID NO: 765 - protein, 238 aa, Homo sapiens
MRSLGALLLLLSACLAVSAGPVPTPPDNIQVQENFNISRIYGKWYNLAIGSTCPWLKKIMDRMTVSTLVLGEGATEAEISMTSTRWRKGVCEETSGAYEKTDTDGKFLYHKSKWNITMESYVVHTNYDEYAIFLTKKFSRHHGPTITAKLYGRAPQLRETLLQDFRVVAQGVGIPEDSIFTMADRVNGLEQATQAGPFMKWTKARQVPSTMLTKDTNPGLGWPLGLVLLFTPLSCSVT

SEQ ID NO: 766 - protein, 205 aa, Homo sapiens
MGTWILFACLLGAAFAMPLPPHPGHPGYINFSYENSHSQAINVDRTALVLTPLKWYQSIRPPYPSYGYEPMGGWLHHQIIPVLSQQHPPTHTLQPHHHIPVVPAQQPVIPQQPMMPVPGQHSMTPIQHHQPNLPPPAQQPYQPQPVQPQPHQPMQPQPPVHPMQPLPPQPPLPPMFPMQPLPPMLPDLTLEAWPSTDKTKREEVD

SEQ ID NO: 767 - protein, 191 aa, Homo sapiens
MGTWILFACLLGAAFAMPLPPHPGHPGYINFSYEVLTPLKWYQSIRPPYPSYGYEPMGGWLHHQIIPVLSQQHPPTHTLQPHHHIPVVPAQQPVIPQQPMMPVPGQHSMTPIQHHQPNLPPPAQQPYQPQPVQPQPHQPMQPQPPVHPMQPLPPQPPLPPMFPMQPLPPMLPDLTLEAWPSTDKTKREEVD

SEQ ID NO: 768 - protein, 175 aa, Homo sapiens
MGTWILFACLLGAAFAMPVLTPLKWYQSIRPPYPSYGYEPMGGWLHHQIIPVLSQQHPPTHTLQPHHHIPVVPAQQPVIPQQPMMPVPGQHSMTPIQHHQPNLPPPAQQPYQPQPVQPQPHQPMQPQPPVHPMQPLPPQPPLPPMFPMQPLPPMLPDLTLEAWPSTDKTKREEVD

SEQ ID NO: 769 - protein, 206 aa, Homo sapiens
MGTWILFACLVGAAFAMPLPPHPGHPGYINFSYENSHSQAINVDRIALVLTPLKWYQSMIRPPYSSYGYEPMGGWLHHQIIPVVSQQHPLTHTLQSHHHIPVVPAQQPRVRQQALMPVPGQQSMTPTQHHQPNLPLPAQQPFQPQPVQPQPHQPMQPQPPVQPMQPLLPQPPLPPMFPLRPLPPILPDLHLEAWPATDKTKQEEVD

SEQ ID NO: 770 - protein, 192 aa, Homo sapiens
MGTWILFACLVGAAFAMPLPPHPGHPGYINFSYEVLTPLKWYQSMIRPPYSSYGYEPMGGWLHHQIIPVVSQQHPLTHTLQSHHHIPVVPAQQPRVRQQALMPVPGQQSMTPTQHHQPNLPLPAQQPFQPQPVQPQPHQPMQPQPPVQPMQPLLPQPPLPPMFPLRPLPPILPDLHLEAWPATDKTKQEEVD

SEQ ID NO: 771 - protein, 560 aa, Homo sapiens
MRDLPLTSLALVLSALGALLGTEALRAEEPAVGTSGLIFREDLDWPPGSPQEPLCLVALGGDSNGSSSPLRVVGALSAYEQAFLGAVQRARWGPRDLATFGVCNTGDRQAALPSLRRLGAWLRDPGGQRLVVLHLEEVTWEPTPSLRFQEPPPGGAGPPELALLVLYPGPGPEVTVTRAGLPGAQSLCPSRDTRYLVLAVDRPAGAWRGSGLALTLQPRGEDSRLSTARLQALLFGDDHRCFTRMTPALLLLPRSEPAPLPAHGQLDTVPFPPPRPSAELEESPPSADPFLETLTRLVRALRVPPARASAPRLALDPDALAGFPQGLVNLSDPAALERLLDGEEPLLLLLRPTAATTGDPAPLHDPTSAPWATALARRVAAELQAAAAELRSLPGLPPATAPLLARLLALCPGGPGGLGDPLRALLLLKALQGLRVEWRGRDPRGPGRAQRSAGATAADGPCALRELSVDLRAERSVLIPETYQANNCQGVCGWPQSDRNPRYGNHVVLLLKMQVRGAALARPPCCVPTAYAGKLLISLSEERISAHHVPNMVATECGCR

SEQ ID NO: 772 - protein, 780 aa, Homo sapiens
MNVRIFYSVSQSPHSLLSLLFYCAILESRISATMPLFKLPAEEKQIDDAMRNFAEKVFASEVKDEGGRQEISPFDVDEICPISHHEMQAHIFHLETLSTSTEARRKKRFQGRKTVNLSIPLSETSSTKLSHIDEYISSSPTYQTVPDFQRVQITGDYASGVTVEDFEIVCKGLYRALCIREKYMQKSFQRFPKTPSKYLRNIDGEAWVANESFYPVFTPPVKKGEDPFRTDNLPENLGYHLKMKDGVVYVYPNEAAVSKDEPKPLPYPNLDTFLDDMNFLLALIAQGPVKTYTHRRLKFLSSKFQVHQMLNEMDELKELKNNPHRDFYNCRKVDTHIHAAACMNQKHLLRFIKKSYQIDADRVVYSTKEKNLTLKELFAKLKMHPYDLTVDSLDVHAGRQTFQRFDKFNDKYNPVGASELRDLYLKTDNYINGEYFATIIKEVGADLVEAKYQHAEPRLSIYGRSPDEWSKLSSWFVCNRIHCPNMTWMIQVPRIYDVFRSKNFLPHFGKMLENIFMPVFEATINPQADPELSVFLKHITGFDSVDDESKHSGHMFSSKSPKPQEWTLEKNPSYTYYAYYMYANIMVLNSLRKERGMNTFLFRPHCGEAGALTHLMTAFMIADDISHGLNLKKSPVLQYLFFLAQIPIAMSPLSNNSLFLEYAKNPFLDFLQKGLMISLSTDDPMQFHFTKEPLMEEYAIAAQVFKLSTCDMCEVARNSVLQCGISHEEKVKFLGDNYLEEGPAGNDIRRTNVAQIRMAYRYETWCYELNLIAEGLKSTE

SEQ ID NO: 773 - protein, 776 aa, Homo sapiens
MNVRIFYSVSQSPHSLLSLLFYCAILESRISATMPLFKLPEIDDAMRNFAEKVFASEVKDEGGRQEISPFDVDEICPISHHEMQAHIFHLETLSTSTEARRKKRFQGRKTVNLSIPLSETSSTKLSHIDEYISSSPTYQTVPDFQRVQITGDYASGVTVEDFEIVCKGLYRALCIREKYMQKSFQRFPKTPSKYLRNIDGEAWVANESFYPVFTPPVKKGEDPFRTDNLPENLGYHLKMKDGVVYVYPNEAAVSKDEPKPLPYPNLDTFLDDMNFLLALIAQGPVKTYTHRRLKFLSSKFQVHQMLNEMDELKELKNNPHRDFYNCRKVDTHIHAAACMNQKHLLRFIKKSYQIDADRVVYSTKEKNLTLKELFAKLKMHPYDLTVDSLDVHAGRQTFQRFDKFNDKYNPVGASELRDLYLKTDNYINGEYFATIIKEVGADLVEAKYQHAEPRLSIYGRSPDEWSKLSSWFVCNRIHCPNMTWMIQVPRIYDVFRSKNFLPHFGKMLENIFMPVFEATINPQADPELSVFLKHITGFDSVDDESKHSGHMFSSKSPKPQEWTLEKNPSYTYYAYYMYANIMVLNSLRKERGMNTFLFRPHCGEAGALTHLMTAFMIADDISHGLNLKKSPVLQYLFFLAQIPIAMSPLSNNSLFLEYAKNPFLDFLQKGLMISLSTDDPMQFHFTKEPLMEEYAIAAQVFKLSTCDMCEVARNSVLQCGISHEEKVKFLGDNYLEEGPAGNDIRRTNVAQIRMAYRYETWCYELNLIAEGLKSTE

SEQ ID NO: 774 - protein, 191 aa, Homo sapiens
QCLCSNSQVGVQKIDDAMRNFAEKVFASEVKDEGGRQEISPFDVDEICPISHHEMQAHIFHLETLSTSTEARRKKRFQGRKTVNLSIPLSETSSTKLSHIDEYISSSPTYQTVPDFQRVQITGDYASGVTVEDFEIVCKGLYRALCIREKYMQKSFQRFPKTPSKYLRNIDGEAWVANESFYPVRPIPTGA

SEQ ID NO: 775 - protein, 208 aa, Homo sapiens
MRSTILLFCLLGSTRSLPLKPALGLPPTKLAPDQGTLPNQQQSNQVFPSLSLIPLTQMLTLGPDLHLLNPAAGMTPGTQTHPLTLGGLNVQQQLHPHVLPIFVTQLGAQGTILSSEELPQIFTSLIIHSLFPGGILPTSQAGANPDVQDGSLPAGGAGVNPATQGTPAGRLPTPSGTDDDFAVTTPAGIQRSTHAIEEATTESANGIQ

SEQ ID NO: 776 - protein, 209 aa, Homo sapiens
MRSTILLFCLLGSTRSLPQLKPALGLPPTKLAPDQGTLPNQQQSNQVFPSLSLIPLTQMLTLGPDLHLLNPAAGMTPGTQTHPLTLGGLNVQQQLHPHVLPIFVTQLGAQGTILSSEELPQIFTSLIIHSLFPGGILPTSQAGANPDVQDGSLPAGGAGVNPATQGTPAGRLPTPSGTDDDFAVTTPAGIQRSTHAIEEATTESANGIQ

SEQ ID NO: 777 - protein, 105 aa, Homo sapiens
MKLFWLLFTIGFCWAQYSSNTQQGRTSIVHLFEWRWVDIALECERYLAPKGFGGVQVSPPNENVAIHNPFRPWWERYQPVSYKLCTRSGNEDEFRNMVTRCNNVG

SEQ ID NO: 778 - protein, 226 aa, Homo sapiens
MKLFWLLFTIGFCWAQYSSNTQQGRTSIVHLFEWRWVDIALECERYLAPKGFGGVQVSPPNENVAIHNPFRPWWERYQPVSYKLCTRSGNEDEFRNMVTRCNNVGVRIYVDAVINHMCGNAVSAGTSSTCGSYFNPGSRDFPAVPYSGWDFNDGKCKTGSGDIENYNDATQVRDCRLSGLLDLALGKDYVRSKIAEYMNHLIDIGVAGFRIDASKHMWPGDIKAIL

SEQ ID NO: 779 - protein, 511 aa, Homo sapiens
MKLFWLLFTIGFCWAQYSSNTQQGRTSIVHLFEWRWVDIALECERYLAPKGFGGVQVSPPNENVAIHNPFRPWWERYQPVSYKLCTRSGNEDEFRNMVTRCNNVGVRIYVDAVINHMCGNAVSAGTSSTCGSYFNPGSRDFPAVPYSGWDFNDGKCKTGSGDIENYNDATQVRDCRLSGLLDLALGKDYVRSKIAEYMNHLIDIGVAGFRIDASKHMWPGDIKAILDKLHNLNSNWFPEGSKPFIYQEVIDLGGEPIKSSDYFGNGRVTEFKYGAKLGTVIRKWNGEKMSYLKNWGEGWGFMPSDRALVFVDNHDNQRGHGAGGASILTFWDARLYKMAVGFMLAHPYGFTRVMSSYRWPRYFENGKDVNDWVGPPNDNGVTKEVTINPDTTCGNDWVCEHRWRQIRNMVNFRNVVDGQPFTNWYDNGSNQVAFGRGNRGFIVFNNDDWTFSLTLQTGLPAGTYCDVISGDKINGNCTGIKIYVSDDGKAHFSISNSAEDPFIAIHAESKL

SEQ ID NO: 780 - protein, 105 aa, Homo sapiens; identical to SEQ ID NO: 777

SEQ ID NO: 781 - protein, 226 aa, Homo sapiens; identical to SEQ ID NO: 778

SEQ ID NO: 782 - protein, 511 aa, Homo sapiens; identical to SEQ ID NO: 779

SEQ ID NO: 783 - protein, 511 aa, Homo sapiens; identical to SEQ ID NO: 779

SEQ ID NO: 784 - protein, 511 aa, Homo sapiens; identical to SEQ ID NO: 779

SEQ ID NO: 785 - protein, 511 aa, Homo sapiens
MKFFLLLFTIGFCWAQYSPNTQQGRTSIVHLFEWRWVDIALECERYLAPKGFGGVQVSPPNENVAIYNPFRPWWERYQPVSYKLCTRSGNEDEFRNMVTRCNNVGVRIYVDAVINHMCGNAVSAGTSSTCGSYFNPGSRDFPAVPYSGWDFNDGKCKTGSGDIENYNDATQVRDCRLTGLLDLALEKDYVRSKIAEYMNHLIDIGVAGFRLDASKHMWPGDIKAILDKLHNLNSNWFPAGSKPFIYQEVIDLGGEPIKSSDYFGNGRVTEFKYGAKLGTVIRKWNGEKMSYLKNWGEGWGFVPSDRALVFVDNHDNQRGHGAGGASILTFWDARLYKMAVGFMLAHPYGFTRVMSSYRWPRQFQNGNDVNDWVGPPNNNGVIKEVTINPDTTCGNDWVCEHRWRQIRNMVIFRNVVDGQPFTNWYDNGSNQVAFGRGNRGFIVFNNDDWSFSLTLQTGLPAGTYCDVISGDKINGNCTGIKIYVSDDGKAHFSISNSAEDPFIAIHAESKL

SEQ ID NO: 786 - protein, 511 aa, Homo sapiens; identical to SEQ ID NO: 785

SEQ ID NO: 787 - protein, 209 aa, Homo sapiens
  SITE 1: note = misc_feature - Xaa can be any naturally occurring amino acid
XFFLLLFTIGFCWAQYSPNTQQGRTSIVHLFEWRWVDIALECERYLAPKGFGGVQVSPPNENVAIYNPFRPWWERYQPVSYKLCTRSGNEDEFRNMVTRCNNVGVRIYVDAVINHMCGNAVSAGTSSTCGSYFNPGSRDFPAVPYSGWDFNDGKCKTGSGDIENYNDATQVIDLGGEPIKSSDYFGNGRVTEFKYGAKLGTVIRKWNGE

SEQ ID NO: 788 - protein, 86 aa, Homo sapiens
MKFFLLLFTIGFCWAQYSPNTQQGRTSIVHLFEWRWVDIALECERYLAPKGFGGVQVSPPNENVAIHNPFRPWWERYQPVSYKLCT

SEQ ID NO: 789 - protein, 96 aa, Homo sapiens
MKFFLLLFTIGFCWAQYSPNTQQGRTSIVHLFEWRWVDIALECERYLAPKGFGGVQVSPPNENVAIHNPFRPWWERYQPVSYKLCTRSGNEDEFRN

SEQ ID NO: 790 - protein, 511 aa, Homo sapiens
MKFFLLLFTIGFCWAQYSPNTQQGRTSIVHLFEWRWVDIALECERYLAPKGFGGVQVSPPNENVAIHNPFRPWWERYQPVSYKLCTRSGNEDEFRNMVTRCNNVGVRIYVDAVINHMSGNAVSAGTSSTCGSYFNPGSRDFPAVPYSGWDFNDGKCKTGSGDIENYNDATQVRDCRLVGLLDLALEKDYVRSKIAEYMNHLIDIGVAGFRLDASKHMWPGDIKAILDKLHNLNSNWFPAGSKPFIYQEVIDLGGEPIKSSDYFGNGRVTEFKYGAKLGTVIRKWNGEKMSYLKNWGEGWGFMPSDRALVFVDNHDNQRGHGAGGASILTFWDARLYKMAVGFMLAHPYGFTRVMSSYRWPRQFQNGNDVNDWVGPPNNNGVIKEVTINPDTTCGNDWVCEHRWRQIRNMVNFRNVVDGQPFTNWYDNGSNQVAFGRGNRGFIVFNNDDWTFSLTLQTGLPAGTYCDVISGDKINGNCTGIKIYVSDDGKAHFSISNSAEDPFIAIHAESKL

SEQ ID NO: 791 - protein, 370 aa, Homo sapiens
MKFFLLLFTIGFCWAQYSPNTQQGRTSIVHLFEWRWVDIALECERYLAPKGFGGVQVSPPNENVAIHNPFRPWWERYQPVSYKLCTRSGNEDEFRNMVTRCNNVGVRIYVDAVINHMSGNAVSAGTSSTCGSYFNPGSRDFPAVPYSGWDFNDGKCKTGSGDIENYNDATQVRDCRLVGLLDLALEKDYVRSKIAEYMNHLIDIGVAGFRLDASKHMWPGDIKAILDKLHNLNSNWFPAGSKPFIYQEVIDLGGEPIKSSDYFGNGRVTEFKYGAKLGTVIRKWNGEKMSYLKNWGEGWGFMPSDRALVFVDNHDNQRGHGAGGASILTFWDARLYKMAVGFMLAHPYGFTRVMSSYRWPRQFQNGNEHG

SEQ ID NO: 792 - protein, 511 aa, Homo sapiens; identical to SEQ ID NO: 790

SEQ ID NO: 793 - protein, 147 aa, Homo sapiens
MVMGLGVLLLVFVLGLGLTPPTLAQDNSRYTHFLTQHYDAKPQGRDDRYCESIMRRRGLTSPCKDINTFIHGNKRSIKAICENKNGNPHRENLRISKSSFQVTTCKLHGGSPWPPCQYRATAGFRNVVVACENGLPVHLDQSIFRRP

SEQ ID NO: 794 - protein, 147 aa, Homo sapiens; identical to SEQ ID NO: 793

SEQ ID NO: 795 - protein, 129 aa, Homo sapiens
MAPRGPEQEECEGLLQQWREEGLSQVLSTASEGPLIDKGLAQSSLALLMDNPGEENAASEDRWSSRQLSDLRAAENLDEPFPEMLGEEPLLEVEGVEGSMWAAIPMQSEPQYADCAALPVGALATEQWE

SEQ ID NO: 796 - protein, 67 aa, Homo sapiens
MEGVTDTKPERPAGWAESVLEEDASELEPAFSRTVGTIQHCLHLTSVYTHFLPQRGRPEVTTMPLGL

SEQ ID NO: 797 - protein, 670 aa, Homo sapiens
MIASCLCYLLLPATRLFRALSDAFFTCRKNVLLANSSSPQVEGDFAMAPRGPEQEECEGLLQQWREEGLSQVLSTASEGPLIDKGLAQSSLALLMDNPGEENAASEDRWSSRQLSDLRAAENLDEPFPEMLGEEPLLEVEGVEGSMWAAIPMQSEPQYADCAALPVGALATEQWEEDPAVLAWSIAPEPVPQEEASIWPFEGLGQLQPPAVEIPYHEILWREWEDFSTQPDAQGLKAGDGPQFQFTLMSYNILAQDLMQQSSELYLHCHPDILNWNYRFVNLMQEFQHWDPDILCLQEVQEDHYWEQLEPSLRMMGFTCFYKRRTGCKTDGCAVCYKPTRFRLLCASPVEYFRPGLELLNRDNVGLVLLLQPLVPEGLGQVSVAPLCVANTHILYNPRRGDVKLAQMAILLAEVDKVARLSDGSHCPIILCGDLNSVPDSPLYNFIRDGELQYHGMPAWKVSGQEDFSHQLYQRKLQAPLWPSSLGITDCCQYVTSCHPKRSERRKYGRDFLLRFRFCSIACQRPVGLVLMEGVTDTKPERPAGWAESVLEEDASELEPAFSRTVGTIQHCLHLTSVYTHFLPQRGRPEVTTMPLGLGMTVDYIFFSAESCENGNRTDHRLYRDGTLKLLGRLSLLSEEILWAANGLPNPFCSSDHLCLLASFGMEVTAP

SEQ ID NO: 798 - protein, 235 aa, Homo sapiens
MSQNMGCYFLFLSWFPYSHPSFSTQVSGQEDFSHQLYQRKLQAPLWPSSLGITDCCQYVTSCHPKRSERRKYGRDFLLRFRFCSIACQRPVGLVLMEGVTDTKPERPAGWAESVLEEDASELEPAFSRTVGTIQHCLHLTSVYTHFLPQRGRPEVTTMPLGLGMTVDYIFFSAESCENGNRTDHRLYRDGTLKLLGRLSLLSEEILWAANGLPNPFCSSDHLCLLASFGMEVTAP

SEQ ID NO: 799 - protein, 298 aa, Homo sapiens
MEGKHKEELDTLKEEKENLQGLVTRQTYIIQELEKQLNRATTNNSVLQKQQLELMDTVHNLVNLCTKEGVLLKGGKREEEKPFRDCADVYQAGFNKSGIYTIYINNMPEPKKVFCNMDVNGGGWTVIQHREDGSLDFQRGWKEYKMGFGNPSGEYWLGNEFIFAITSQRQYMLRIELMDWEGNRAYSQYDRFHIGNEKQNYRLYLKGHTGTAGKQSSLILHGADFSTKDADNDNCMCKCALMLTGGWWFDACGPSNLNGMFYTAGQNHGKLNGIKWHYFKGPSYSLRSTTMMIRPLDF

SEQ ID NO: 800 - protein, 297 aa, Homo sapiens
MEGKHKEELDTLKEEKENLQGLVTRQTYIIQELEKQLNRATTNNSVLQKQQLELMDTVHNLVNLCTKEVLLKGGKREEEKPFRDCADVYQAGFNKSGIYTIYINNMPEPKKVFCNMDVNGGGWTVIQHREDGSLDFQRGWKEYKMGFGNPSGEYWLGNEFIFAITSQRQYMLRIELMDWEGNRAYSQYDRFHIGNEKQNYRLYLKGHTGTAGKQSSLILHGADFSTKDADNDNCMCKCALMLTGGWWFDACGPSNLNGMFYTAGQNHGKLNGIKWHYFKGPSYSLRSTTMMIRPLDF

SEQ ID NO: 801 - protein, 30 aa, Homo sapiens
MKSEMAQIQQNAVQNHTATMLEIGTSLLSQ

SEQ ID NO: 802 - protein, 497 aa, Homo sapiens
MTVFLSFAFLAAILTHIGCSNQRRSPENSGRRYNRIQHGQCAYTFILPEHDGNCRESTTDQYNTNALQRDAPHVEPDFSSQKLQHLEHVMENYTQWLQKLENYIVENMKSEMAQIQQNAVQNHTATMLEIGTSLLSQTAEQTRKLTDVETQVLNQTSRLEIQLLENSLSTYKLEKQLLQQTNEILKIHEKNSLLEHKILEMEGKHKEELDTLKEEKENLQGLVTRQTYIIQELEKQLNRATTNNSVLQKQQLELMDTVHNLVNLCTKEVLLKGGKREEEKPFRDCADVYQAGFNKSGIYTIYINNMPEPKKVFCNMDVNGGGWTVIQHREDGSLDFQRGWKEYKMGFGNPSGEYWLGNEFIFAITSQRQYMLRIELMDWEGNRAYSQYDRFHIGNEKQNYRLYLKGHTGTAGKQSSLILHGADFSTKDADNDNCMCKCALMLTGGWWFDACGPSNLNGMFYTAGQNHGKLNGIKWHYFKGPSYSLRSTTMMIRPLDF

SEQ ID NO: 803 - protein, 498 aa, Homo sapiens
MTVFLSFAFLAAILTHIGCSNQRRSPENSGRRYNRIQHGQCAYTFILPEHDGNCRESTTDQYNTNALQRDAPHVEPDFSSQKLQHLEHVMENYTQWLQKLENYIVENMKSEMAQIQQNAVQNHTATMLEIGTSLLSQTAEQTRKLTDVETQVLNQTSRLEIQLLENSLSTYKLEKQLLQQTNEILKIHEKNSLLEHKILEMEGKHKEELDTLKEEKENLQGLVTRQTYIIQELEKQLNRATTNNSVLQKQQLELMDTVHNLVNLCTKEGVLLKGGKREEEKPFRDCADVYQAGFNKSGIYTIYINNMPEPKKVFCNMDVNGGGWTVIQHREDGSLDFQRGWKEYKMGFGNPSGEYWLGNEFIFAITSQRQYMLRIELMDWEGNRAYSQYDRFHIGNEKQNYRLYLKGHTGTAGKQSSLILHGADFSTKDADNDNCMCKCALMLTGGWWFDACGPSNLNGMFYTAGQNHGKLNGIKWHYFKGPSYSLRSTTMMIRPLDF

SEQ ID NO: 804 - protein, 496 aa, Homo sapiens
MWQIVFFTLSCDLVLAAAYNNFRKSMDSIGKKQYQVQHGSCSYTFLLPEMDNCRSSSSPYVSNAVQRDAPLEYDDSVQRLQVLENIMENNTQWLMKLENYIQDNMKKEMVEIQQNAVQNQTAVMIEIGTNLLNQTAEQTRKLTDVEAQVLNQTTRLELQLLEHSLSTNKLEKQILDQTSEINKLQDKNSFLEKKVLAMEDKHIIQLQSIKEEKDQLQVLVSKQNSIIEELEKKIVTATVNNSVLQKQQHDLMETVNNLLTMMSTSNSAKDPTVAKEEQISFRDCAEVFKSGHTTNGIYTLTFPNSTEEIKAYCDMEAGGGGWTIIQRREDGSVDFQRTWKEYKVGFGNPSGEYWLGNEFVSQLTNQQRYVLKIHLKDWEGNEAYSLYEHFYLSSEELNYRIHLKGLTGTAGKISSISQPGNDFSTKDGDNDKCICKCSQMLTGGWWFDACGPSNLNGMYYPQRQNTNKFNGIKWYYWKGSGYSLKATTMMIRPADF

SEQ ID NO: 805 - protein, 459 aa, Homo sapiens
MWQIVFFTLSCDLVLAAAYNNFRKSMDSIGKKQYQVQHGSCSYTFLLPEMDNCRSSSSPYVSNAVQRDAPLEYDDSVQRLQVLENIMENNTQWLMKLENYIQDNMKKEMVEIQQNAVQNQTAVMIEIGTNLLNQTAEQTRKLTDVEAQVLNQTTRLELQLLEHSLSTNKLEKQILDQTSEINKLQDKNSFLEKKVLAMEDKHIIQLQSIKEEKDQLQVLVSKQNSIIEELEKKIVTATVNNSVLQKQQHDLMETVNNLLTMMSTSNSKDPTVAKEEQISFRDCAEVFKSGHTTNGIYTLTFPNSTEEIKAYCDMEAGGGGWTIIQRREDGSVDFQRTWKEYKVGFGNPSGEYWLGNEFVSQLTNQQRYVLKIHLKDWEGNEAYSLYEHFYLSSEELNYRIHLKGLTGTAGKISSISQPGNDFSTKDGDNDKCICKCSQMLTGGRDDFLSSYLYWQGMIS

SEQ ID NO: 806 - protein, 495 aa, Homo sapiens
MWQIVFFTLSCDLVLAAAYNNFRKSMDSIGKKQYQVQHGSCSYTFLLPEMDNCRSSSSPYVSNAVQRDAPLEYDDSVQRLQVLENIMENNTQWLMKLENYIQDNMKKEMVEIQQNAVQNQTAVMIEIGTNLLNQTAEQTRKLTDVEAQVLNQTTRLELQLLEHSLSTNKLEKQILDQTSEINKLQDKNSFLEKKVLAMEDKHIIQLQSIKEEKDQLQVLVSKQNSIIEELEKKIVTATVNNSVLQKQQHDLMETVNNLLTMMSTSNSKDPTVAKEEQISFRDCAEVFKSGHTTNGIYTLTFPNSTEEIKAYCDMEAGGGGWTIIQRREDGSVDFQRTWKEYKVGFGNPSGEYWLGNEFVSQLTNQQRYVLKIHLKDWEGNEAYSLYEHFYLSSEELNYRIHLKGLTGTAGKISSISQPGNDFSTKDGDNDKCICKCSQMLTGGWWFDACGPSNLNGMYYPQRQNTNKFNGIKWYYWKGSGYSLKATTMMIRPADF

SEQ ID NO: 807 - protein, 444 aa, Homo sapiens
MWQIVFFTLSCDLVLAAAYNNFRKSMDSIGKKQYQVQHGSCSYTFLLPEMDNCRSSSSPYVSNAVQRDAPLEYDDSVQRLQVLENIMENNTQWLMKVLNQTTRLELQLLEHSLSTNKLEKQILDQTSEINKLQDKNSFLEKKVLAMEDKHIIQLQSIKEEKDQLQVLVSKQNSIIEELEKKIVTATVNNSVLQKQQHDLMETVNNLLTMMSTSNSAKDPTVAKEEQISFRDCAEVFKSGHTTNGIYTLTFPNSTEEIKAYCDMEAGGGGWTIIQRREDGSVDFQRTWKEYKVGFGNPSGEYWLGNEFVSQLTNQQRYVLKIHLKDWEGNEAYSLYEHFYLSSEELNYRIHLKGLTGTAGKISSISQPGNDFSTKDGDNDKCICKCSQMLTGGWWFDACGPSNLNGMYYPQRQNTNKFNGIKWYYWKGSGYSLKATTMMIRPADF

SEQ ID NO: 808 - protein, 503 aa, Homo sapiens
MLSQLAMLQGSLLLVVATMSVAQQTRQEADRGCETLVVQHGHCSYTFLLPKSEPCPPGPEVSRDSNTLQRESLANPLHLGKLPTQQVKQLEQALQNNTQWLKKLERAIKTILRSKLEQVQQQMAQNQTAPMLELGTSLLNQTTAQIRKLTDMEAQLLNQTSRMDAQMPETFLSTNKLENQLLLQRQKLQQLQGQNSALEKRLQALETKQQEELASILSKKAKLLNTLSRQSAALTNIERGLRGVRHNSSLLQDQQHSLRQLLVLLRHLVQERANASAPAFIMAGEQVFQDCAEIQRSGASASGVYTIQVSNATKPRKVFCDLQSSGGRWTLIQRRENGTVNFQRNWKDYKQGFGDPAGEHWLGNEVVHQLTRRAAYSLRVELQDWEGHEAYAQYEHFHLGSENQLYRLSVVGYSGSAGRQSSLVLQNTSFSTLDSDNDHCLCKCAQVMSGGWWFDACGLSNLNGVYYHAPDNKYKMDGIRWHYFKGPSYSLRASRMMIRPLDI

SEQ ID NO: 809 - protein, 114 aa, Homo sapiens
MKTFTWTLGVLFFLLVDTGHCRGGQFKIKKINQRRYPRATDGKEEAKKCAYTFLVPEQRITGPICVNTKGQDASTIKDMITRMDLENLKDVLSRQKREIDVLQLVVDVDGNIVN

SEQ ID NO: 810 - protein, 491 aa, Homo sapiens
MKTFTWTLGVLFFLLVDTGHCRGGQFKIKKINQRRYPRATDGKEEAKKCAYTFLVPEQRITGPICVNTKGQDASTIKDMITRMDLENLKDVLSRQKREIDVLQLVVDVDGNIVNEVKLLRKESRNMNSRVTQLYMQLLHEIIRKRDNSLELSQLENKILNVTTEMLKMATRYRELEVKYASLTDLVNNQSVMITLLEEQCLRIFSRQDTHVSPPLVQVVPQHIPNSQQYTPGLLGGNEIQRDPGYPRDLMPPPDLATSPTKSPFKIPPVTFINEGPFKDCQQAKEAGHSVSGIYMIKPENSNGPMQLWCENSLDPGGWTVIQKRTDGSVNFFRNWENYKKGFGNIDGEYWLGLENIYMLSNQDNYKLLIELEDWSDKKVYAEYSSFRLEPESEFYRLRLGTYQGNAGDSMMWHNGKQFTTLDRDKDMYAGNCAHFHKGGWWYNACAHSNLNGVWYRGGHYRSKHQDGIFWAEYRGGSYSLRAVQMMIKPID

SEQ ID NO: 811 - protein, 491 aa, Homo sapiens; identical to SEQ ID NO: 810

SEQ ID NO: 812 - protein, 191 aa, Homo sapiens
MQVWCDQRHDPGGWTVIQRRLDGSVNFFRNWETYKQGFGNIDGEYWLGLENIYWLTNQGNYKLLVTMEDWSGRKVFAEYASFRLEPESEYYKLRLGRYHGNAGDSFTWHNGKQFTTLDRDHDVYTGNCAHYQKGGWWYNACAHSNLNGVWYRGGHYRSRYQDGVYWAEFRGGSYSLKKVVMMIRPNPNTFH

SEQ ID NO: 813 - protein, 493 aa, Homo sapiens
MRPLCVTCWWLGLLAAMGAVAGQEDGFEGTEEGSPREFIYLNRYKRAGESQDKCTYTFIVPQQRVTGAICVNSKEPEVLLENRVHKQELELLNNELLKQKRQIETLQQLVEVDGGIVSEVKLLRKESRNMNSRVTQLYMQLLHEIIRKRDNALELSQLENRILNQTADMLQLASKYKDLEHKYQHLATLAHNQSEIIAQLEEHCQRVPSARPVPQPPPAAPPRVYQPPTYNRIINQISTNEIQSDQNLKVLPPPLPTMPTLTSLPSSTDKPSGPWRDCLQALEDGHDTSSIYLVKPENTNRLMQVWCDQRHDPGGWTVIQRRLDGSVNFFRNWETYKQGFGNIDGEYWLGLENIYWLTNQGNYKLLVTMEDWSGRKVFAEYASFRLEPESEYYKLRLGRYHGNAGDSFTWHNGKQFTTLDRDHDVYTGNCAHYQKGGWWYNACAHSNLNGVWYRGGHYRSRYQDGVYWAEFRGGSYSLKKVVMMIRPNPNTFH

SEQ ID NO: 814 - protein, 460 aa, Homo sapiens
MFTIKLLLFIVPLVISSRIDQDNSSFDSLSPEPKSRFAMLDDVKILANGLLQLGHGLKDFVHKTKGQINDIFQKLNIFDQSFYDLSLQTSEIKEEEKELRRTTYKLQVKNEEVKNMSLELNSKLESLLEEKILLQQKVKYLEEQLTNLIQNQPETPEHPEVTSLKTFVEKQDNSIKDLLQTVEDQYKQLNQQHSQIKEIENQLRRTSIQEPTEISLSSKPRAPRTTPFLQLNEIRNVKHDGIPAECTTIYNRGEHTSGMYAIRPSNSQVFHVYCDVISGSPWTLIQHRIDGSQNFNETWENYKYGFGRLDGEFWLGLEKIYSIVKQSNYVLRIELEDWKDNKHYIEYSFYLGNHETNYTLHLVAITGNVPNAIPENKDLVFSTWDHKAKGHFNCPEGYSGGWWWHDECGENNLNGKYNKPRAKSKPERRRGLSWKSQNGRLYSIKSTKMLIHPTDSESFE

SEQ ID NO: 815 - protein, 86 aa, Homo sapiens
MSGAPTAGAALMLCAATAVLLSAQGGPVQSKSPRFASWDEMNVLAHGLLQLGQGLREHAERTRSQLSALERRLSACGSACQGTEGS

SEQ ID NO: 816 - protein, 96 aa, Homo sapiens
MSGAPTAGAALMLCAATAVLLSAQGGPVQSKSPRFASWDEMNVLAHGLLQLGQGLREHAERTRSQLSALERRLSACGSACQGTEGSTDLPLAPESR

SEQ ID NO: 817 - protein, 105 aa, Homo sapiens
MSGAPTAGAALMLCAATAVLLSAQGGPVQSKSPRFASWDEMNVLAHGLLQLGQGLREHAERTRSQLSALERRLSACGSACQGTEGSTDLPLAPESRVDPEVLHSL

SEQ ID NO: 818 - protein, 368 aa, Homo sapiens
MSGAPTAGAALMLCAATAVLLSAQGGPVQSKSPRFASWDEMNVLAHGLLQLGQGLREHAERTRSQLSALERRLSACGSACQGTEGSTDLPLAPESRVDPEVLHSLQTQLKAQNSRIQQLFHKVAQQQRHLEKQHLRIQHLQSQFGLLDHKHLDHEVAKPARRKRLPEMAQPVDPAHNVSRLHHGGWTVIQRRHDGSVDFNRPWEAYKAGFGDPHGEFWLGLEKVHSITGDRNSRLAVQLRDWDGNAELLQFSVHLGGEDTAYSLQLTAPVAGQLGATTVPPSGLSVPFSTWDQDHDLRRDKNCAKSLSGGWWFGTCSHSNLNGQYFRSIPQQRQKLKKGIFWKTWRGRYYPLQATTMLIQPMAAEAAS

SEQ ID NO: 819 - protein, 406 aa, Homo sapiens
MSGAPTAGAALMLCAATAVLLSAQGGPVQSKSPRFASWDEMNVLAHGLLQLGQGLREHAERTRSQLSALERRLSACGSACQGTEGSTDLPLAPESRVDPEVLHSLQTQLKAQNSRIQQLFHKVAQQQRHLEKQHLRIQHLQSQFGLLDHKHLDHEVAKPARRKRLPEMAQPVDPAHNVSRLHRLPRDCQELFQVGERQSGLFEIQPQGSPPFLVNCKMTSDGGWTVIQRRHDGSVDFNRPWEAYKAGFGDPHGEFWLGLEKVHSITGDRNSRLAVQLRDWDGNAELLQFSVHLGGEDTAYSLQLTAPVAGQLGATTVPPSGLSVPFSTWDQDHDLRRDKNCAKSLSGGWWFGTCSHSNLNGQYFRSIPQQRQKLKKGIFWKTWRGRYYPLQATTMLIQPMAAEAAS

SEQ ID NO: 820 - protein, 406 aa, Homo sapiens; identical to SEQ ID NO: 819

SEQ ID NO: 821 - protein, 128 aa, Homo sapiens
MSGAPTAGAALMLCAATAVLLSAQGGPVQSKSPRFASWDEMNVLAHGLLQLGQGLREHAERTRSQLSALERRLSACGSFTACRHNSRLRTAGSSNSSTRWPSSSGTWRSSTCEFSICKASLASWTTST

SEQ ID NO: 822 - protein, 129 aa, Homo sapiens
  SITE 1: note = misc_feature - Xaa can be any naturally occurring amino acid
XPVQSKSPRFASWDEMNVLAHGLLQLGQGLREHAERTRSQLSALERRLSACGSACQGTEGSTDLPLAPESRVDPEVLHSLQTQLKAQNSRIQQLFHKVAQQQRHLEKQHLRIQHLQSQTGLNGGLSHID

SEQ ID NO: 823 - protein, 192 aa, Homo sapiens
MMSPSQASLLFLNVCIFICGEAVQGNCVHHSTDSSVVNIVEDGSNAKDESKSNDTVCKEDCEESCDVKTKITREEKHFMCRNLQNSIVSYTRSTKKLLRNMMDEQQASLDYLSNQVMCDMDYRGGGRTVIQKRIDGIIDFQRLWCDYLDGFGDLLGEFWLGLKKIFYIVNQKNTSFMLYVALESEDDTLAYA

SEQ ID NO: 824 - protein, 388 aa, Homo sapiens
MMSPSQASLLFLNVCIFICGEAVQGNCVHHSTDSSVVNIVEDGSNAKDESKSNDTVCKEDCEESCDVKTKITREEKHFMCRNLQNSIVSYTRSTKKLLRNMMDEQQASLDYLSNQVNELMNRVLLLTTEVFRKQLDPFPHRPVQSHGLDCTDIKDTIGSVTKTPSGLYIIHPEGSSYPFEVMCDMDYRGGGRTVIQKRIDGIIDFQRLWCDYLDGFGDLLGEFWLGLKKIFYIVNQKNTSFMLYVALESEDDTLAYASYDNFWLEDETRFFKMHLGRYSGNAGDAFRGLKKEDNQNAMPFSTSDVDNDGCRPACLVNGQSVKSCSHLHNKTGWWFNECGLANLNGIHHFSGKLLATGIQWGTWTKNNSPVKIKSVSMKIRRMYNPYFK

SEQ ID NO: 825 - protein, 470 aa, Homo sapiens
MGKPWLRALQLLLLLGASWARAGAPRCTYTFVLPPQKFTGAVCWSGPASTRATPEAANASELAALRMRVGRHEELLRELQRLAAADGAVAGEVRALRKESRGLSARLGQLRAQLQHEAGPGAGPGADLGAEPAAALALLGERVLNASAEAQRAAARFHQLDVKFRELAQLVTQQSSLIARLERLCPGGAGGQQQVLPPPPLVPVVPVRLVGSTSDTSRMLDPAPEPQRDQTQRQQEPMASPMPAGHPAVPTKPVGPWQDCAEARQAGHEQSGVYELRVGRHVVSVWCEQQLEGGGWTVIQRRQDGSVNFFTTWQHYKAGFGRPDGEYWLGLEPVYQLTSRGDHELLVLLEDWGGRGARAHYDGFSLEPESDHYRLRLGQYHGDAGDSLSWHNDKPFSTVDRDRDSYSGNCALYQRGGWWYHACAHSNLNGVWHHGGHYRSRYQDGVYWAEFRGGAYSLRKAAMLIRPLKL

SEQ ID NO: 826 - protein, 470 aa, Homo sapiens; identical to SEQ ID NO: 825

SEQ ID NO: 827 - protein, 430 aa, Homo sapiens
MGKPWLRALQLLLLLGASWARAGAPRCTYTFVLPPQKFTGAVCWSGPASTRATPEAANASELAALRMRVGRHEELLRELQRLAAADGAVAGEVRALRKESRGLSARLGQLRAQLQHEAGPGAGPGADLGAEPAAALALLGERVLNASAEAQRAAARFHQLDVKFRELAQLVTQQSSLIARLERLCPGGAGGQQQVLPPPPLVPVVPVRLVGSTSDTSRMLDPAPEPQRDQTQRQQEPMASPMPAGHPAVPTKPVGPWQDCAEARQAGHEQSGVYELRAGFGRPDGEYWLGLEPVYQLTSRGDHELLVLLEDWGGRGARAHYDGFSLEPESDHYRLRLGQYHGDAGDSLSWHNDKPFSTVDRDRDSYSGNCALYQRGGWWYHACAHSNLNGVWHHGGHYRSRYQDGVYWAEFRGGAYSLRKAAMLIRPLKL

SEQ ID NO: 828 - protein, 346 aa, Homo sapiens
MLKKPLSAVTWLCIFIVAFVSHPAWLQKLSKHKTPAQPQLKAANCCEEVKELKAQVANLSSLLSELNKKQERDWVSVVMQVMELESNSKRMESRLTDAESKYSEMNNQIDIMQLQAAQTVTQTSADAIYDCSSLYQKNYRISGVYKLPPDDFLGSPELEVFCDMETSGGGWTIIQRRKSGLVSFYRDWKQYKQGFGSIRGDFWLGNEHIHRLSRQPTRLRVEMEDWEGNLRYAEYSHFVLGNELNSYRLFLGNYTGNVGNDALQYHNNTAFSTKDKDNDNCLDKCAQLRKGGYWYNCCTDSNLNGVYYRLGEHNKHLDGITWYGWHGSTYSLKRVEMKIRPEDFKP

SEQ ID NO: 829 - protein, 99 aa, Homo sapiens
MEEDILQLQAEATAEVLGEVAQAQKVLRDSVQRLEVQLRSAWLGPAYREFEVLKAHADKQSHILWALTGHVQRQRREMVAQQHRLRQIQERLHTAALPA

SEQ ID NO: 830 - protein, 198 aa, Homo sapiens
MPVPALCLLWALAMVTRPASAAPMGGPELAQHEELTLLFHGTLQLGQALNGVYRTTEGRLTKARNSLGLYGRTIELLGQEVSRGRDAAQELRASLLETQMEEDILQLQAEATAEVLGEVAQAQKVLRDSVQRLEVQLRSAWLGPAYREFEVLKAHADKQSHILWALTGHVQRQRREMVAQQHRLRQIQERLHTAALPA

SEQ ID NO: 831 - protein, 198 aa, Homo sapiens; identical to SEQ ID NO: 830

SEQ ID NO: 832 - protein, 58 aa, Homo sapiens
  SITE 1: note = misc_feature - Xaa can be any naturally occurring amino acid
XAQELRASLLETQAHADKQSHILWALTGHVQRQRREMVAQQHRLRQIQERLHTAALPA

SEQ ID NO: 833 - protein, 1897 aa, Homo sapiens
MAQAAKQLKKIKDIEAQALQEQKEKEESNRKRRNRSRDRKKKADAATSFLRAARSGNLDKALDHLRNGVDINTCNQNGLNGLHLASKEGHVKMVVELLHKEIILETTTKKGNTALHIAALAGQDEVVRELVNYGANVNAQSQKGFTPLYMAAQENHLEVVKFLLENGANQNVATEDGFTPLAVALQQGHENVVAHLINYGTKGKVRLPALHIAARNDDTRTAAVLLQNDPNPDVLSKTGFTPLHIAAHYENLNVAQLLLNRGASVNFTPQNGITPLHIASRRGNVIMVRLLLDRGAQIETKTKDELTPLHCAARNGHVRISEILLDHGAPIQAKTKNGLSPIHMAAQGDHLDCVRLLLQYDAEIDDITLDHLTPLHVAAHCGHHRVAKVLLDKGAKPNSRALNGFTPLHIACKKNHVRVMELLLKTGASIDAVTESGLTPLHVASFMGHLPIVKNLLQRGASPNVSNVKVETPLHMAARAGHTEVAKYLLQNKAKVNAKAKDDQTPLHCAARIGHTNMVKLLLENNANPNLATTAGHTPLHIAAREGHVETVLALLEKEASQACMTKKGFTPLHVAAKYGKVRVAELLLERDAHPNAAGKNGLTPLHVAVHHNNLDIVKLLLPRGGSPHSPAWNGYTPLHIAAKQNQVEVARSLLQYGGSANAESVQGVTPLHLAAQEGHAEMVALLLSKQANGNLGNKSGLTPLHLVAQEGHVPVADVLIKHGVMVDATTRMGYTPLHVASHYGNIKLVKFLLQHQADVNAKTKLGYSPLHQAAQQGHTDIVTLLLKNGASPNEVSSDGTTPLAIAKRLGYISVTDVLKVVTDETSFVLVSDKHRMSFPETVDEILDVSEDEGTAHITIMGEELISFKAERRDSRDVDEEKELLDFVPKLDQVVESPAIPRIPCAMPETVVIRSEEQEQASKEYDEDSLIPSSPATETSDNISPVASPVHTGFLVSFMVDARGGSMRGSRHNGLRVVIPPRTCAAPTRITCRLVKPQKLSTPPPLAEEEGLASRIIALGPTGAQFLSPVIVEIPHFASHGRGDRELVVLRSENGSVWKEHRSRYGESYLDQILNGMDEELGSLEELEKKRVCRIITTDFPLYFVIMSRLCQDYDTIGPEGGSLKSKLVPLVQATFPENAVTKRVKLALQAQPVPDELVTKLLGNQATFSPIVTVEPRRRKFHRPIGLRIPLPPSWTDNPRDSGEGDTTSLRLLCSVIGGTDQAQWEDITGTTKLVYANECANFTTNVSARFWLSDCPRTAEAVNFATLLYKELTAVPYMAKFVIFAKMNDPREGRLRCYCMTDDKVDKTLEQHENFVEVARSRDIEVLEGMSLFAELSGNLVPVKKAAQQRSFHFQSFRENRLAMPVKVRDSSREPGGSLSFLRKAMKYEDTQHILCHLNITMPPCAKGSGAEDRRRTPTPLALRYSILSESTPGSLSGTEQAEMKMAVISEHLGLSWAELARELQFSVEDINRIRVENPNSLLEQSVALLNLWVIREGQNANMENLYTALQSIDRGEIVNMLEGSGRQSRNLKPDRRHTDRDYSLSPSQMNGYSSLQDELLSPASLGCALSSPLRADQYWNEVAVLDAIPLAATEHDTMLEMSDMQVWSAGLTPSLVTAEDSSLECSKAEDSDATGHEWKLEGALSEEPRGPELGSLELVEDDTVDSDATNGLIDLLEQEEGQRSEEKLPGSKRQDDATGAGQDSENEVSLVSGHQRGQARITHSPTVSQVTERSQDRLQDWDADGSIVSYLQDAAQGSWQEEVTQGPHSFQGTSTMTEGLEPGGSQEYEKVLVSVSEHTWTEQPEAESSQADRDRRQQGQEEQVQEAKNTFTQVVQGNEFQNIPGEQVTEEQFTDEQGNIVTKKIIRKVVRQIDLSSADAAQEHEEDHTSTPNP

SEQ ID NO: 834 - protein, 1880 aa, Homo sapiens
MPYSVGFREADAATSFLRAARSGNLDKALDHLRNGVDINTCNQNGLNGLHLASKEGHVKMVVELLHKEIILETTTKKGNTALHIAALAGQDEVVRELVNYGANVNAQSQKGFTPLYMAAQENHLEVVKFLLENGANQNVATEDGFTPLAVALQQGHENVVAHLINYGTKGKVRLPALHIAARNDDTRTAAVLLQNDPNPDVLSKTGFTPLHIAAHYENLNVAQLLLNRGASVNFTPQNGITPLHIASRRGNVIMVRLLLDRGAQIETKTKDELTPLHCAARNGHVRISEILLDHGAPIQAKTKNGLSPIHMAAQGDHLDCVRLLLQYDAEIDDITLDHLTPLHVAAHCGHHRVAKVLLDKGAKPNSRALNGFTPLHIACKKNHVRVMELLLKTGASIDAVTESGLTPLHVASFMGHLPIVKNLLQRGASPNVSNVKVETPLHMAARAGHTEVAKYLLQNKAKVNAKAKDDQTPLHCAARIGHTNMVKLLLENNANPNLATTAGHTPLHIAAREGHVETVLALLEKEASQACMTKKGFTPLHVAAKYGKVRVAELLLERDAHPNAAGKNGLTPLHVAVHHNNLDIVKLLLPRGGSPHSPAWNGYTPLHIAAKQNQVEVARSLLQYGGSANAESVQGVTPLHLAAQEGHAEMVALLLSKQANGNLGNKSGLTPLHLVAQEGHVPVADVLIKHGVMVDATTRMGYTPLHVASHYGNIKLVKFLLQHQADVNAKTKLGYSPLHQAAQQGHTDIVTLLLKNGASPNEVSSDGTTPLAIAKRLGYISVTDVLKVVTDETSFVLVSDKHRMSFPETVDEILDVSEDEGEELISFKAERRDSRDVDEEKELLDFVPKLDQVVESPAIPRIPCAMPETVVIRSEEQEQASKEYDEDSLIPSSPATETSDNISPVASPVHTGFLVSFMVDARGGSMRGSRHNGLRVVIPPRTCAAPTRITCRLVKPQKLSTPPPLAEEEGLASRIIALGPTGAQFLSPVIVEIPHFASHGRGDRELVVLRSENGSVWKEHRSRYGESYLDQILNGMDEELGSLEELEKKRVCRIITTDFPLYFVIMSRLCQDYDTIGPEGGSLKSKLVPLVQATFPENAVTKRVKLALQAQPVPDELVTKLLGNQATFSPIVTVEPRRRKFHRPIGLRIPLPPSWTDNPRDSGEGDTTSLRLLCSVIGGTDQAQWEDITGTTKLVYANECANFTTNVSARFWLSDCPRTAEAVNFATLLYKELTAVPYMAKFVIFAKMNDPREGRLRCYCMTDDKVDKTLEQHENFVEVARSRDIEVLEGMSLFAELSGNLVPVKKAAQQRSFHFQSFRENRLAMPVKVRDSSREPGGSLSFLRKAMKYEDTQHILCHLNITMPPCAKGSGAEDRRRTPTPLALRYSILSESTPGSLSGTEQAEMKMAVISEHLGLSWAELARELQFSVEDINRIRVENPNSLLEQSVALLNLWVIREGQNANMENLYTALQSIDRGEIVNMLEGSGRQSRNLKPDRRHTDRDYSLSPSQMNGYSSLQDELLSPASLGCALSSPLRADQYWNEVAVLDAIPLAATEHDTMLEMSDMQVWSAGLTPSLVTAEDSSLECSKAEDSDATGHEWKLEGALSEEPRGPELGSLELVEDDTVDSDATNGLIDLLEQEEGQRSEEKLPGSKRQDDATGAGQDSENEVSLVSGHQRGQARITHSPTVSQVTERSQDRLQDWDADGSIVSYLQDAAQGSWQEEVTQGPHSFQGTSTMTEGLEPGGSQEYEKVLVSVSEHTWTEQPEAESSQADRDRRQQGQEEQVQEAKNTFTQVVQGNEFQNIPGEQVTEEQFTDEQGNIVTKKIIRKVVRQIDLSSADAAQEHEEVELRGSGLQPDLIEGRKGAQIVKRASLKRGKQ

SEQ ID NO: 835 - protein, 1881 aa, Homo sapiens
MPYSVGFREADAATSFLRAARSGNLDKALDHLRNGVDINTCNQNGLNGLHLASKEGHVKMVVELLHKEIILETTTKKGNTALHIAALAGQDEVVRELVNYGANVNAQSQKGFTPLYMAAQENHLEVVKFLLENGANQNVATEDGFTPLAVALQQGHENVVAHLINYGTKGKVRLPALHIAARNDDTRTAAVLLQNDPNPDVLSKTGFTPLHIAAHYENLNVAQLLLNRGASVNFTPQNGITPLHIASRRGNVIMVRLLLDRGAQIETKTKDELTPLHCAARNGHVRISEILLDHGAPIQAKTKNGLSPIHMAAQGDHLDCVRLLLQYDAEIDDITLDHLTPLHVAAHCGHHRVAKVLLDKGAKPNSRALNGFTPLHIACKKNHVRVMELLLKTGASIDAVTESGLTPLHVASFMGHLPIVKNLLQRGASPNVSNVKVETPLHMAARAGHTEVAKYLLQNKAKVNAKAKDDQTPLHCAARIGHTNMVKLLLENNANPNLATTAGHTPLHIAAREGHVETVLALLEKEASQACMTKKGFTPLHVAAKYGKVRVAELLLERDAHPNAAGKNGLTPLHVAVHHNNLDIVKLLLPRGGSPHSPAWNGYTPLHIAAKQNQVEVARSLLQYGGSANAESVQGVTPLHLAAQEGHAEMVALLLSKQANGNLGNKSGLTPLHLVAQEGHVPVADVLIKHGVMVDATTRMGYTPLHVASHYGNIKLVKFLLQHQADVNAKTKLGYSPLHQAAQQGHTDIVTLLLKNGASPNEVSSDGTTPLAIAKRLGYISVTDVLKVVTDETSFVLVSDKHRMSFPETVDEILDVSEDEGEELISFKAERRDSRDVDEEKELLDFVPKLDQVVESPAIPRIPCAMPETVVIRSEEQEQASKEYDEDSLIPSSPATETSDNISPVASPVHTGFLVSFMVDARGGSMRGSRHNGLRVVIPPRTCAAPTRITCRLVKPQKLSTPPPLAEEEGLASRIIALGPTGAQFLSPVIVEIPHFASHGRGDRELVVLRSENGSVWKEHRSRYGESYLDQILNGMDEELGSLEELEKKRVCRIITTDFPLYFVIMSRLCQDYDTIGPEGGSLKSKLVPLVQATFPENAVTKRVKLALQAQPVPDELVTKLLGNQATFSPIVTVEPRRRKFHRPIGLRIPLPPSWTDNPRDSGEGDTTSLRLLCSVIGGTDQAQWEDITGTTKLVYANECANFTTNVSARFWLSDCPRTAEAVNFATLLYKELTAVPYMAKFVIFAKMNDPREGRLRCYCMTDDKVDKTLEQHENFVEVARSRDIEVLEGMSLFAELSGNLVPVKKAAQQRSFHFQSFRENRLAMPVKVRDSSREPGGSLSFLRKAMKYEDTQHILCHLNITMPPCAKGSGAEDRRRTPTPLALRYSILSESTPGSLSGTEQAEMKMAVISEHLGLSWAELARELQFSVEDINRIRVENPNSLLEQSVALLNLWVIREGQNANMENLYTALQSIDRGEIVNMLEGSGRQSRNLKPDRRHTDRDYSLSPSQMNGYSSLQDELLSPASLGCALSSPLRADQYWNEVAVLDAIPLAATEHDTMLEMSDMQVWSAGLTPSLVTAEDSSLECSKAEDSDATGHEWKLEGALSEEPRGPELGSLELVEDDTVDSDATNGLIDLLEQEEGQRSEEKLPGSKRQDDATGAGQDSENEVSLVSGHQRGQARITHSPTVSQVTERSQDRLQDWDADGSIVSYLQDAAQGSWQEEVTQGPHSFQGTSTMTEGLEPGGSQEYEKVLVSVSEHTWTEQPEAESSQADRDRRQQGQEEQVQEAKNTFTQVVQGNEFQNIPGEQVTEEQFTDEQGNIVTKKIIRKVVRQIDLSSADAAQEHEEVTVEGPLEDPSELEVDIDYFMKHSKDHTSTPNP

SEQ ID NO: 836 - protein, 109 aa, Homo sapiens
MWTFVTQLLVTLVLLSFFLVSCQNVMHIVRGSLCFVLKHIHQELDKELGESEGLSDDEETISTRVVRRRVFLKGNEFQNIPGEQVTEEQFTDEQGNIVTKKDHTSTPNP

SEQ ID NO: 837 - protein, 131 aa, Homo sapiens
MWTFVTQLLVTLVLLSFFLVSCQNVMHIVRGSLCFVLKHIHQELDKELGESEGLSDDEETISTRVVRRRVFLKGNEFQNIPGEQVTEEQFTDEQGNIVTKKIIRKVVRQIDLSSADAAQEHEEDHTSTPNP

SEQ ID NO: 838 - protein, 155 aa, Homo sapiens
MWTFVTQLLVTLVLLSFFLVSCQNVMHIVRGSLCFVLKHIHQELDKELGESEGLSDDEETISTRVVRRRVFLKGNEFQNIPGEQVTEEQFTDEQGNIVTKKIIRKVVRQIDLSSADAAQEHEEVELRGSGLQPDLIEGRKGAQIVKRASLKRGKQ

SEQ ID NO: 839 - protein, 156 aa, Homo sapiens
MWTFVTQLLVTLVLLSFFLVSCQNVMHIVRGSLCFVLKHIHQELDKELGESEGLSDDEETISTRVVRRRVFLKGNEFQNIPGEQVTEEQFTDEQGNIVTKKIIRKVVRQIDLSSADAAQEHEEVTVEGPLEDPSELEVDIDYFMKHSKDHTSTPNP

SEQ ID NO: 840 - protein, 113 aa, Homo sapiens
MWTFVTQLLVTLVLLSFFLVSCQNVMHIVRGSLCFVLKHIHQELDKELGESEGLSDDEETISTRVVRRRVFLKGNEFQNIPGEQVTEEQFTDEQGNIVTKKVELRGSGLQPDL

SEQ ID NO: 841 - protein, 177 aa, Homo sapiens
  SITE 1: note = misc_feature - Xaa can be any naturally occurring amino acid
XEDTQHILCHLNITMPPCAKGSGAEDRRRTPTPLALRYSILSESTPGSLSGTEQAEMKMAVISEHLGLSWAELARELQFSVEDINRIRVENPNSLLEQSVALLNLWVIREGQNANMENLYTALQSIDRGEIVNMLEGSGRQSRNLKPDRRHTDRDYSLSPSQMNGGRSEVRREAARF

SEQ ID NO: 842 - protein, 1040 aa, Homo sapiens
  SITE 1: note = misc_feature - Xaa can be any naturally occurring amino acid
XIKHGVMVDATTRMGYTPLHVASHYGNIKLVKFLLQHQADVNAKTKLGYSPLHQAAQQGHTDIVTLLLKNGASPNEVSSDGTTPLAIAKRLGYISVTDVLKVVTDETSFVLVSDKHRMSFPETVDEILDVSEDEGTAHITIMGEELISFKAERRDSRDVDEEKELLDFVPKLDQVVESPAIPRIPCAMPETVVIRSEEQEQASKEYDEDSLIPSSPATETSDNISPVASPVHTGFLVSFMVDARGGSMRGSRHNGLRVVIPPRTCAAPTRITCRLVKPQKLSTPPPLAEEEGLASRIIALGPTGAQFLSPVIVEIPHFASHGRGDRELVVLRSENGSVWKEHRSRYGESYLDQILNGMDEELGSLEELEKKRVCRIITTDFPLYFVIMSRLCQDYDTIGPEGGSLKSKLVPLVQATFPENAVTKRVKLALQAQPVPDELVTKLLGNQATFSPIVTVEPRRRKFHRPIGLRIPLPPSWTDNPRDSGEGDTTSLRLLCSVIGGTDQAQWEDITGTTKLVYANECANFTTNVSARFWLSDCPRTAEAVNFATLLYKELTAVPYMAKFVIFAKMNDPREGRLRCYCMTDDKVDKTLEQHENFVEVARSRDIEVLEGMSLFAELSGNLVPVKKAAQQRSFHFQSFRENRLAMPVKVRDSSREPGGSLSFLRKAMKYEDTQHILCHLNITMPPCAKGSGAEDRRRTPTPLALRYSILSESTPGSLSGTEQAEMKMAVISEHLGLSWAELARELQFSVEDINRIRVENPNSLLEQSVALLNLWVIREGQNANMENLYTALQSIDRGEIVNMLEGSGRQSRNLKPDRRHTDRDYSLSPSQMNGHQRGQARITHSPTVSQVTERSQDRLQDWDADGSIVSYLQDAAQGSWQEEVTQGPHSFQGTSTMTEGLEPGGSQEYEKVLVSVSEHTWTEQPEAESSQADRDRRQQGQEEQVQEAKNTFTQVVQGNEFQNIPGEQVTEEQFTDEQGNIVTKKIIRKVVRQIDLSSADAAQEHEEVELRGSGLQPDLIEGRKGAQIVKRASLKRGKQ

SEQ ID NO: 843 - protein, 553 aa, Homo sapiens
  SITE 1: note = misc_feature - Xaa can be any naturally occurring amino acid
XTSLRLLCSVIGGTDQAQWEDITGTTKLVYANECANFTTNVSARFWLSDCPRTAEAVNFATLLYKELTAVPYMAKFVIFAKMNDPREGRLRCYCMTDDKVDKTLEQHENFVEVARSRDIEVLEGMSLFAELSGNLVPVKKAAQQRSFHFQSFRENRLAMPVKVRDSSREPGGSLSFLRKAMKYEDTQHILCHLNITMPPCAKGSGAEDRRRTPTPLALRYSILSESTPGSLSGTEQAEMKMAVISEHLGLSWAELARELQFSVEDINRIRVENPNSLLEQSVALLNLWVIREGQNANMENLYTALQSIDRGEIVNMLEGSGRQSRNLKPDRRHTDRDYSLSPSQMNGHQRGQARITHSPTVSQVTERSQDRLQDWDADGSIVSYLQDAAQGSWQEEVTQGPHSFQGTSTMTEGLEPGGSQEYEKVLVSVSEHTWTEQPEAESSQADRDRRQQGQEEQVQEAKNTFTQVVQGNEFQNIPGEQVTEEQFTDEQGNIVTKKIIRKVVRQIDLSSADAAQEHEEVTVEGPLEDPSELEVDIDYFMKHSKDHTSTPNP

SEQ ID NO: 844 - protein, 133 aa, Homo sapiens
IGRRVNTRARNHVGRVALHWAAGAGHEQAVRLLLEHEAAVDEEDAVGALTEEGNTALHLAAGRGHMAVLQRLVDIGLDLEEQNAEGLTALHSAAGGSHPDCVQLLLRAGSTVNALTQVARPSQDCGRLLAAEP

SEQ ID NO: 845 - protein, 423 aa, Homo sapiens
MNALLLSAWFGHLRILQILVNSGAKIHCESKDGLTLLHCAAQKGHVPVLAFIMEDLEDVALDHVDKLGRTAFHRAAEHGQLDALDFLVGSGCDHNVKDKEGNTALHLAAGRGHMAVLQRLVDIGLDLEEQNAEGLTALHSAAGGSHPDCVQLLLRAGSTVNALTQKNLSCLHYAALSGSEDVSRVLIHAGGCANVVDHQGASPLHLAVRHNFPALVRLLINSDSDVNAVDNRQQTPLHLAAEHAWQDIADMLLIAGVDLNLRDKQGKTALAVAVRSNHVSLVDMIIKADRFYRWEKDHPSDPSGKSLSFKQDHRQETQQLRSVLWRLASRYLQPREWKKLAYSWEFTEAHVDAIEQQWTGTRSYQEHGHRMLLIWLHGVATAGENPSKALFEGLVAIGRRDLAENIRKKANAAPSAPRRCTAM

SEQ ID NO: 846 - protein, 399 aa, Homo sapiens
MNALLLSAWFGHLRILQILVNSGAKIHCESKDGLTLLHCAAQKGHVPVLAFIMEDLEDVALDHVDKLGRTAFHRAAEHGQLDALDFLVGSGCDHNVKDKEGNTALHLAAGRGHMAVLQRLVDIGLDLEEQNAEGLTALHSAAGGSHPDCVQLLLRAGSTVNALTQKNLSCLHYAALSGSEDVSRVLIHAGGCANVVDHQGASPLHLAVRHNFPALVRLLINSDSDVNAVDNRQQTPLHLAAEHAWQDIADMLLIAGVDLNLRDKDHPSDPSGKSLSFKQDHRQETQQLRSVLWRLASRYLQPREWKKLAYSWEFTEAHVDAIEQQWTGTRSYQEHGHRMLLIWLHGVATAGENPSKALFEGLVAIGRRDLAGWSTMARSQLTATSASRVQMILVPQPPE

SEQ ID NO: 847 - protein, 423 aa, Homo sapiens; identical to SEQ ID NO: 845

SEQ ID NO: 848 - protein, 181 aa, Homo sapiens
MNALLLSAWFGHLRILQILVNSGAKIHCESKDGLTLLHCAAQKGHVPVLAFIMEDLEDVALDHVDKLGRTAFHRAAEHGQLDALDFLVGSGCDHNVKDKEGNTALHLAAGRGHMAVLQRLVDIGLDLEEQNAEGLTALHSAAGGSHPDCVQLLLRAGSTVNALTQVARPSQDCGRLLAAEP

SEQ ID NO: 849 - protein, 123 aa, Homo sapiens
MQEELAWETDGLLPLERQLHEAARQNNVGRMQELIGRRVNTRARNHVGRVALHWAAGAGHEQAVRLLLEHEAAVDEEDAFGMNALLLSAWFGHLRILQILVNSGAKIHCESKPKKAMCLCWRS

SEQ ID NO: 850 - protein, 522 aa, Homo sapiens
MQEELAWETDGLLPLERQLHEAARQNNVGRMQELIGRRVNTRARNHVGRVALHWAAGAGHEQAVRLLLEHEAAVDEEDAVGALTEARLCFGMNALLLSAWFGHLRILQILVNSGAKIHCESKDGLTLLHCAAQKGHVPVLAFIMEDLEDVALDHVDKLGRTAFHRAAEHGQLDALDFLVGSGCDHNVKDKEGNTALHLAAGRGHMAVLQRLVDIGLDLEEQNAEGLTALHSAAGGSHPDCVQLLLRAGSTVNALTQKNLSCLHYAALSGSEDVSRVLIHAGGCANVVDHQGASPLHLAVRHNFPALVRLLINSDSDVNAVDNRQQTPLHLAAEHAWQDIADMLLIAGVDLNLRDKQGKTALAVAVRSNHVSLVDMIIKADRFYRWEKDHPSDPSGKSLSFKQDHRQETQQLRSVLWRLASRYLQPREWKKLAYSWEFTEAHVDAIEQQWTGTRSYQEHGHRMLLIWLHGVATAGENPSKALFEGLVAIGRRDLAGWSTMARSQLTATSASRVQMILVPQPPE

SEQ ID NO: 851 - protein, 217 aa, Homo sapiens [sequence omitted]

SEQ ID NO: 852 - protein, 300 aa, Homo sapiens
MAAAAGDADDEPRSGHSSSEGECAVAPEPLTDAEGLFSFADFGSALGGGGAGLSGRASGGAQSPLRYLHVLWQQDAEPRDELRCKIPAGRLRRAARPHRRLGPTGKEVHALKRLRDSANANDVETVQQLLEDGADPCAADDKGRTALHFASCNGNDQIVQLLLDHGADPNQRDGLGNTPLHLAACTNHVPVITTLLRGGARVDALDRAGRTPLHLAKSKLNILQEGHAQCLEAVRLEVKQIIHMLREYLERLGQHEQRERLDDLCTRLQMTSTKEQVDEVTDLLASFTSLSLQMQSMEKR

SEQ ID NO: 853 - protein, 284 aa, Homo sapiens
MAAAAGDADDEPRSGHSSSEGECAVAPEPLTDAEGLFSFADFGSALGGGGAGLSGRASGGAQSPLRYLHVLWQQDAEPRDELRCKIPAGRLRRAARPHRRLGPTGKEVHVQQLLEDGADPCAADDKGRTALHFASCNGNDQIVQLLLDHGADPNQRDGLGNTPLHLAACTNHVPVITTLLRGGARVDALDRAGRTPLHLAKSKLNILQEGHAQCLEAVRLEVKQIIHMLREYLERLGQHEQRERLDDLCTRLQMTSTKEQVDEVTDLLASFTSLSLQMQSMEKR

SEQ ID NO: 854 - protein, 90 aa, Homo sapiens
MARIPVQLMTRAAQLYTLPHAMAMTRLLLLDHGADPNQRDGLGNTPLHLAACTNHVPVITTLLRGGARVDALDRAGRTPLHLAKSKLNIL

SEQ ID NO: 855 - protein, 156 aa, Homo sapiens
MARIPVQLMTRAAQLYTLPHAMAMTRLLLLDHGADPNQRDGLGNTPLHLAACTNHVPVITTLLRGGARVDALDRAGRTPLHLAKSKLNILQEGHAQCLEAVRLEVKQIIHMLREYLERLGQHEQRERLDDLCTRLQMTSTKEQVDEVTDLLASFTS

SEQ ID NO: 856 - protein, 107 aa, Homo sapiens
MPMMWKQCSCSWTMVLILTSEMGWGTRHCTWRPAPTTFLSSPHCYEEIIHMLREYLERLGQHEQRERLDDLCTRLQMTSTKEQVDEVTDLLASFTSLSLQMQSMEKR

SEQ ID NO: 857 - protein, 180 aa, Homo sapiens
MPMMWKQQLLEDGADPCAADDKGRTALHFASCNGNDQIVQLLLDHGADPNQRDGLGNTPLHLAACTNHVPVITTLLRGGARVDALDRAGRTPLHLAKSKLNILQEGHAQCLEAVRLEVKQIIHMLREYLERLGQHEQRERLDDLCTRLQMTSTKEQVDEVTDLLASFTSLSLQMQSMEKR

SEQ ID NO: 858 - protein, 208 aa, Homo sapiens
  SITE 1: note = misc_feature - Xaa can be any naturally occurring amino acid
XRDELRCKIPAGRLRRAARPHRRLGPTGKEVHALKRLRDSANANDVETVQQLLEDGADPCAADDKGRTALHFASCNGNDQIVQLLLDHGADPNQRDGLGNTPLHLECSPQLVPAGARVDALDRAGRTPLHLAKSKLNILQEGHAQCLEAVRLEVKQIIHMLREYLERLGQHEQRERLDDLCTRLQMTSTKEQVDEVTDLLASFTSLSL

SEQ ID NO: 859 - protein, 178 aa, Homo sapiens
  SITE 1: note = misc_feature - Xaa can be any naturally occurring amino acid
XRLRRPGPRGAVAMAAAAGDADDEPRSGHSSSEGECAVAPEPLTDAEGLFSFADFGSALGGGGAGLSGRASGGAQSPLRYLHVLWQQDAEPRDELRCKIPAGRLRRAARPHRRLGPTGKEVHALKRLRDSANANDVETVQQLLEDGADPCAADDKGRTALHFASCNGNDQIAAPGPWC

SEQ ID NO: 860 - protein, 345 aa, Homo sapiens
MTRGRAWGMRRAAAGAGGARAAGPTGGASRLHPNAGRRSGARAGAQGCGGPRVGSADSRALPAQPLACARGRSQRLVCDPKAASALPDLAPDVFVLRVRLEETGEMFRVANCRGDMTVRELKEELDLMVGIPFNLQRLQYLDEGVLMDDTTLKFHDVVPGGIISLCIWHHDGWTELVLAAVEGDPSKLSCLGLTEDSFYRTANSEHFEGEKWKHWTSQRAFVALYVASHRGHFDAVQYLLEHGASCLSRSPLGRTPLHVAAAMGRSDCIILLLQHGASIHDRDAKGETPISIAHRLNHTLSERQMVLLHRIAKSGIRDLNDLVMKNALQRVKSGFRSEKMTMTPH

SEQ ID NO: 861 - protein, 933 aa, Homo sapiens
MRMAATAWAGLQGPPLPTLCPAVRTGLYCRDQAHAERWAMTSETSSGSHCARSRMLRRRAQEEDSTVLIDVSPPEAEKRGSYGSTAHASEPGGQQAAACRAGSPAKPRIADFVLVWEEDLKLDRQQDSAARDRTDMHRTWRETFLDNLRAAGLCVDQQDVQDGNTTVHYALLSASWAVLCYYAEDLRLKLPLQELPNQASNWSAGLLAWLGIPNVLLEVVPDVPPEYYSCRFRVNKLPRFLGSDNQDTFFTSTKRHQILFEILAKTPYGHEKKNLLGIHQLLAEGVLSAAFPLHDGPFKTPPEGPQAPRLNQRQVLFQHWARWGKWNKYQPLDHVRRYFGEKVALYFAWLGFYTGWLLPAAVVGTLVFLVGCFLVFSDIPTQELCGSKDSFEMCPLCLDCPFWLLSSACALAQAGRLFDHGGTVFFSLFMALWAVLLLEYWKRKSATLAYRWDCSDYEDTEERPRPQFAASAPMTAPNPITGEDEPYFPERSRARRMLAGSVVIVVMVAVVVMCLVSIILYRAIMAIVVSRSGNTLLAAWASRIASLTGSVVNLVFILILSKIYVSLAHVLTRWEMHRTQTKFEDAFTLKVFIFQFVNFYSSPVYIAFFKGRFVGYPGNYHTLFGVRNEECAAGGCLIELAQELLVIMVGKQVINNMQEVLIPKLKGWWQKFRLRSKKRKAGASAGASQGPWEDDYELVPCEGLFDEYLEMVLQFGFVTIFVAACPLAPLFALLNNWVEIRLDARKFVCEYRRPVAERAQDIGIWFHILAGLTHLAVISNAFLLAFSSDFLPRAYYRWTRAHDLRGFLNFTLARAPSSFAAAHNRTCRYRAFRDDDGHYSQTYWNLLAIRLAFVIVFEHVVFSVGRLLDLLVPDIPESVEIKVKREYYLAKQALAENEVLFGTNGTKDEQPEGSELSSHWTPFTVPKASQLQQ

SEQ ID NO: 862 - protein, 883 aa, Homo sapiens
MRMAATAWAGLQGPPLPTLCPAVRTGLYCRDQAHAERWAMTSETSSGSHCARSRMLRRRAQEEDSTVLIDVSPPEAEKRGSYGSTAHASEPGGQQAAACRAGSPAKPRIDFVLVWEEDLKLDRQQDSAARDRTDMHRTWRETFLDNLRAAGLCVDQQDVQDGNTTVHYALLSASWAVLCYYAEDLRLKLPLQELPNQASNWSAGLLAWLGIPNVLLEVVPDVPPEYYSCRFRVNKLPRFLGSDNQDTFFTSTKRHQILFEILAKTPYGHEKKNLLGIHQLLAEGVLSAAFPLHDGPFKTPPEGPQAPRLNQRQVLFQHWARWGKWNKYQPLDHVRRYFGEKVALYFAWLGFYTGWLLPAAVVGTLVFLVGCFLVFSDIPTQELCGSKDSFEMCPLCLDCPFWLLSSACALAQAGRLFDHGGTVFFSLFMALWAVLLLEYWKRKSATLAYRWDCSDYEDTEERPRPQFAASAPMTAPNPITGEDEPYFPERSRARRMLAGSVVIVVMVAVVVMCLVSIILYRAIMAIVVSRSGNTLLAAWASRIASLTGSVVNLVFILILSKIYVSLAHVLTRWEMHRTQTKFEDAFTLKVFIFQFVNFYSSPVYIAFFKGRFVGYPGNYHTLFGVRNEECAAGGCLIELAQELLVIMVGKQVINNMQEVLIPKLKGWWQKFRLRSKKRKAGASAGASQGPWEDDYELVPCEGLFDEYLEMVLQFGFVTIFVAACPLAPLFALLNNWVEIRLDARKFVCEYRRPVAERAQDIGIWFHILAGLTHLAVISNAFLLAFSSDFLPRAYYRWTRAHDLRGFLNFTLARAPSSFAAAHNRTCRYRAFRDDDGHYSQTYWNLLAIRLAFVIVFEVAEAPAGSPIHGMRPRPCALPNSSTW

SEQ ID NO: 863 - protein, 179 aa, Homo sapiens
MRMAATAWAGLQGPPLPTLCPAVRTGLYCRDQAHAERWAMTSETSSGSHCARSRMLRRRAQEEDSTVLIDVSPPEAEKRGSYGSTAHASEPGGQQAAACRAGSPAKPRIDFVLVWEEDLKLDRQQDSAARDRTDMHRTWRETFLDNLRAAGLCVDQVRGGCHGQGPRPCIHSVTHDLAA

SEQ ID NO: 864 - protein, 186 aa, Homo sapiens
  SITE 1: note = misc_feature - Xaa can be any naturally occurring amino acid
XAGGAFRGLRADGGGEPGRDPLPAVLQFGFVTIFVAACPLAPLFALLNNWVEIRLDARKFVCEYRRPVAERAQDIGIWFHILAGLTHLAVISNAFLLAFSSDFLPRAYYRWTRAHDLRGFLNFTLARAPSSFAAAHNRTCRYRAFRDDDGHYSQTYWNLLAIRLAFVIVFEHVVFSVGRLLDLLVP

SEQ ID NO: 865 - protein, 680 aa, Homo sapiens
MVPGVPGAVLTLCLWLAASSGCLAAGPGAAAARRLDESLSAGSVQRARCASRCLSLQITRISAFFQHFQNNGSLVWCQNHKQCSKCLEPCKESGDLRKHQCQSFCEPLFPKKSYECLTSCEFLKYILLVKQGDCPAPEKASGFAAACVESCEVDNECSGVKKCCSNGCGHTCQVPKTLYKGVPLKPRKELRFTELQSGQLEVKWSSKFNISIEPVIYVVQRRWNYGIHPSEDDATHWQTVAQTTDERVQLTDIRPSRWYQFRVAAVNVHGTRGFTAPSKHFRSSKDPSAPPAPANLRLANSTVNSDGSVTVTIVWDLPEEPDIPVHHYKVFWSWMVSSKSLVPTKKKRRKTTDGFQNSVILEKLQPDCDYVVELQAITYWGQTRLKSAKVSLHFTSTHATNNKEQLVKTRKGGIQTQLPFQRRRPTRPLEVGAPFYQDGQLQVKVYWKKTEDPTVNRYHVRWFPEACAHNRTTGSEASSGMTHENYIILQDLSFSCKYKVTVQPIRPKSHSKAEAVFFTTPPCSALKGKSHKPVGCLGEAGHVLSKVLAKPENLSASFIVQDVNITGHFSWKMAKANLYQPMTGFQVTWAEVTTESRQNSLPNSIISQSQILPSDHYVLTVPNLRPSTLYRLEVQVLTPGGEGPATIKTFRTPELPPSSAHRSHLKHRHPHHYKPSPERY

SEQ ID NO: 866 - protein, 564 aa, Homo sapiens
MATAERRALGIGFQWLSLATLVLICAGQGGRREDGGPACYGGFDLYFILDKSGSVLHHWNEIYYFVEQLAHKFISPQLRMSFIVFSTRGTTLMKLTEDREQIRQGLEELQKVLPGGDTYMHEGFERASEQIYYENRQGYRTASVIIALTDGELHEDLFFYSEREANRSRDLGAIVYCVGVKDFNETQLARIADSKDHVFPVNDGFQALQGIIHSILKKSCIEILAAEPSTICAGESFQVVVRGNGFRHARNVDRVLCSFKINDSVTLNEKPFSVEDTYLLCPAPILKEVGMKAALQVSMNDGLSFISSSVIITTTHCSDGSILAIALLILFLLLALALLWWFWPLCCTVIIKEVPPPPAEESEEEDDDGLPKKKWPTVDASYYGGRGVGGIKRMEVRWGEKGSTEEGAKLEKAKNARVKMPEQEYEFPEPRNLNNNMRRPSSPRKWYSPIKGKLDALWVLLRKGYDRVSVMRPQPGDTGRCINFTRVKNNQPAKYPLNNAYHTSSPPPAPIYTPPPPAPHCPPPPPSAPTPPIPSPPSTLPPPPQAPPPNRAPPPSRPPPRPSV

SEQ ID NO: 867 - protein, 333 aa, Homo sapiens
MATAERRALGIGFQWLSLATLVLICAGQGGRREDGGPACYGGFDLYFILDKSGSVLHHWNEIYYFVEQLAHKFISPQLRMSFIVFSTRGTTLMKLTEDREQIRQGLEELQKVLPGGDTYMHEGFERASEQIYYENRQGYRTASVIIALTDGELHEDLFFYSEREANRSRDLGAIVYCVGVKDFNETQLARIADSKDHVFPVNDGFQALQGIIHSILKKSCIEILAAEPSTICAGESFQVVVRGNGFRHARNVDRVLCSFKINDSVTLNEKPFSVEDTYLLCPAPILKEVGMKAALQVSMNDGLSFISSSVIITTTHCSLHKIASGPTTAACME

SEQ ID NO: 868 - protein, 368 aa, Homo sapiens
MATAERRALGIGFQWLSLATLVLICAGQGGRREDGGPACYGGFDLYFILDKSGSVLHHWNEIYYFVEQLAHKFISPQLRMSFIVFSTRGTTLMKLTEDREQIRQGLEELQKVLPGGDTYMHEGFERASEQIYYENRQGYRTASVIIALTDGELHEDLFFYSEREANRSRDLGAIVYCVGVKDFNETQLARIADSKDHVFPVNDGFQALQGIIHSILKKSCIEILAAEPSTICAGESFQVVVRGNGFRHARNVDRVLCSFKINDSVTLNEKPFSVEDTYLLCPAPILKEVGMKAALQVSMNDGLSFISSSVIITTTHCSDGSILAIALLILFLLLALALLWWFWPLCCTVIIKEVPPPPAEESEENKIK

SEQ ID NO: 869 - protein, 179 aa, Homo sapiens
  SITE 1: note = misc_feature - Xaa can be any naturally occurring amino acid
XDLGAIVYCVGVKDFNETQLARIADSKDHVFPVNDGFQALQGIIHSILKKSCIEILAAEPSTICAGESFQVVVRGNGFRHARNVDRVLCSFKINDSVTLNEKPFSVEDTYLLCPAPILKEVGMKAALQVSMNDGLSFISSSVIITTTHCDGLWFYIQSLETVKDHRNIRVRNSDLKYCL

SEQ ID NO: 870 - protein, 52 aa, Homo sapiens
MQSPWKILTVAPLFLLLSLQSSASPANDDQSRPSLSNGHTCVASSAEKPQLS

SEQ ID NO: 871 - protein, 108 aa, Homo sapiens
MQSPWKILTVAPLFLLLSLQSSASPANDDQSRPSLSNGHTCVEKLFLKTTCYLVIDKFGSDIIKLLSADMNADVVCHTLEFCKQNTGQPLCHLYPLPKETWKFTLQKA

SEQ ID NO: 872 - protein, 543 aa, Homo sapiens
MQSPWKILTVAPLFLLLSLQSSASPANDDQSRPSLSNGHTCVEKLFLKTTCYLVIDKFGSDIIKLLSADMNADVVCHTLEFCKQNTGQPLCHLYPLPKETWKFTLQKARQIVKKSPILKYSRSGSDICSLPVLAKICQKIKLAMEQSVPFKDVDSDKYSVFPTLRGYHWRGRDCNDSDESVYPGRRPNNWDVHQDSNCNGIWGVDPKDGVPYEKKFCEGSQPRGIILLGDSAGAHFHISPEWITASQMSLNSFINLPTALTNELDWPQLSGATGFLDSTVGIKEKSIYLRLWKRNHCNHRDYQNISRNGASSRNLKKFIESLSRNKVLDYPAIVIYAMIGNDVCSGKSDPVPAMTTPEKLYSNVMQTLKHLNSHLPNGSHVILYGLPDGTFLWDNLHNRYHPLGQLNKDMTYAQLYSFLNCLQVSPCHGWMSSNKTLRTLTSERAEQLSNTLKKIAASEKFTNFNLFYMDFAFHEIIQEWQKRGGQPWQLIEPVDGFHPNEVALLLLADHFWKKVQLQWPQILGKENPFNPQIKQVFGDQGGH

SEQ ID NO: 873 - protein, 688 aa, Homo sapiens
MQSPWKILTVAPLFLLLSLQSSASPANDDQSRPSLSNGHTCVGCVLVVSVIEQLAQVHNSTVQASMERLCSYLPEKLFLKTTCYLVIDKFGSDIIKLLSADMNADVVCHTLEFCKQNTGQPLCHLYPLPKETWKFTLQKARQIVKKSPILKYSRSGSDICSLPVLAKICQKIKLAMEQSVPFKDVDSDKYSVFPTLRGYHWRGRDCNDSDESVYPGRRPNNWDVHQDSNCNGIWGVDPKDGVPYEKKFCEGSQPRGIILLGDSAGAHFHISPEWITASQMSLNSFINLPTALTNELDWPQLSGATGFLDSTVGIKEKSIYLRLWKRNHCNHRDYQNISRNGASSRNLKKFIESLSRNKVLDYPAIVIYAMIGNDVCSGKSDPVPAMTTPEKLYSNVMQTLKHLNSHLPNGSHVILYGLPDGTFLWDNLHNRYHPLGQLNKDMTYAQLYSFLNCLQVSPCHGWMSSNKTLRTLTSERAEQLSNTLKKIAASEKFTNFNLFYMDFAFHEIIQEWQKRGGQPWQLIEPVDGFHPNERKSILLKGILMTSQTLDNQEWTQLTSWIKGNLTCDSRTREWLCCCWRIISGKRCSSSGPKSWERRIRSTPRLNRCLETKAGTEPLRSMHPWGAQGGRGLGKLIPQTLWGLPRHRPKGLFFSSIFAKCLSLNEEHIWTTVQCCVLPGSVTLPLFLK

SEQ ID NO: 874 - protein, 575 aa, Homo sapiens
MQSPWKILTVAPLFLLLSLQSSASPANDDQSRPSLSNGHTCVGCVLVVSVIEQLAQVHNSTVQASMERLCSYLPEKLFLKTTCYLVIDKFGSDIIKLLSADMNADVVCHTLEFCKQNTGQPLCHLYPLPKETWKFTLQKARQIVKKSPILKYSRSGSDICSLPVLAKICQKIKLAMEQSVPFKDVDSDKYSVFPTLRGYHWRGRDCNDSDESVYPGRRPNNWDVHQDSNCNGIWGVDPKDGVPYEKKFCEGSQPRGIILLGDSAGAHFHISPEWITASQMSLNSFINLPTALTNELDWPQLSGATGFLDSTVGIKEKSIYLRLWKRNHCNHRDYQNISRNGASSRNLKKFIESLSRNKVLDYPAIVIYAMIGNDVCSGKSDPVPAMTTPEKLYSNVMQTLKHLNSHLPNGSHVILYGLPDGTFLWDNLHNRYHPLGQLNKDMTYAQLYSFLNCLQVSPCHGWMSSNKTLRTLTSERAEQLSNTLKKIAASEKFTNFNLFYMDFAFHEIIQEWQKRGGQPWQLIEPVDGFHPNEVALLLLADHFWKKVQLQWPQILGKENPFNPQIKQVFGDQGGH

SEQ ID NO: 875 - protein, 249 aa, Homo sapiens
MPALGWAVAAILMLQTAMAEPSPGTLPRKAGVFSDLSNQELKAVHSFLWSKKELRLQPSSTTTMAKNTVFLIEMLLPKKYHVLRFLDKGERHPVREARAVIFFGDQEHPNVTEFAVGPLPGPCYMRALSPRPGYQSSWASRPISTAEYALLYHTLQEATKPLHQFFLNTTGFSFQDCHDRCLAFTDVAPRGVASGQRRSWLIIQRYVEGYFLHPTGLELLVDHGSTDAGHWAVEQVWYNGKFYGSPEEL

SEQ ID NO: 876 - protein, 751 aa, Homo sapiens
MPALGWAVAAILMLQTAMAEPSPGTLPRKAGVFSDLSNQELKAVHSFLWSKKELRLQPSSTTTMAKNTVFLIEMLLPKKYHVLRFLDKGERHPVREARAVIFFGDQEHPNVTEFAVGPLPGPCYMRALSPRPGYQSSWASRPISTAEYALLYHTLQEATKPLHQFFLNTTGFSFQDCHDRCLAFTDVAPRGVASGQRRSWLIIQRYVEGYFLHPTGLELLVDHGSTDAGHWAVEQVWYNGKFYGSPEELARKYADGEVDVVVLEDPLPGGKGHDSTEEPPLFSSHKPRGDFPSPIHVSGPRLVQPHGPRFRLEGNAVLYGGWSFAFRLRSSSGLQVLNVHFGGERIAYEVSVQEAVALYGGHTPAGMQTKYLDVGWGLGSVTHELAPGIDCPETATFLDTFHYYDADDPVHYPRALCLFEMPTGVPLRRHFNSNFKGGFNFYAGLKGQVLVLRTTSTVYNYDYIWDFIFYPNGVMEAKMHATGYVHATFYTPEGLRHGTRLHTHLIGNIHTHLVHYRVDLDVAGTKNSFQTLQMKLENITNPWSPRHRVVQPTLEQTQYSWERQAAFRFKRKLPKYLLFTSPQENPWGHKRTYRLQIHSMADQVLPPGWQEEQAITWARYPLAVTKYRESELCSSSIYHQNDPWHPPVVFEQFLHNNENIENEDLVAWVTVGFLHIPHSEDIPNTATPGNSVGFLLRPFNFFPEDPSLASRDTVIVWPRDNGPNYVQRWIPEDRDCSMPPPFSYNGTYRPV

SEQ ID NO: 877 - protein, 770 aa, Homo sapiens
MPALGWAVAAILMLQTAMAEPSPGTLPRKAGVFSDLSNQELKAVHSFLWSKKELRLQPSSTTTMAKNTVFLIEMLLPKKYHVLRFLDKGERHPVREARAVIFFGDQEHPNVTEFAVGPLPGPCYMRALSPRPGYQSSWASRPISTAEYALLYHTLQEATKPLHQFFLNTTGFSFQDCHDRCLAFTDVAPRGVASGQRRSWLIIQRYVEGYFLHPTGLELLVDHGSTDAGHWAVEQVWYNGKFYGSPEELARKYADGEVDVVVLEDPLPGGKGHDSTEEPPLFSSHKPRGDFPSPIHVSGPRLVQPHGPRFRLEGNAVLYGGWSFAFRLRSSSGLQVLNVHFGGERIAYEVSVQEAVALYGGHTPAGMQTKYLDVGWGLGSVTHELAPGIDCPETATFLDTFHYYDADDPVHYPRALCLFEMPTGVPLRRHFNSNFKGGFNFYAGLKGQVLVLRTTSTVYNYDYIWDFIFYPNGVMEAKMHATGYVHATFYTPEGLRHGTRLHTHLIGNIHTHLVHYRVDLDVAGTKNSFQTLQMKLENITNPWSPRHRVVQPTLEQTQYSWERQAAFRFKRKLPKYLLFTSPQENPWGHKRTYRLQIHSMADQVLPPGWQEEQAITWARTEGGQPRALSQAASPVPGRYPLAVTKYRESELCSSSIYHQNDPWHPPVVFEQFLHNNENIENEDLVAWVTVGFLHIPHSEDIPNTATPGNSVGFLLRPFNFFPEDPSLASRDTVIVWPRDNGPNYVQRWIPEDRDCSMPPPFSYNGTYRPV

SEQ ID NO: 878 - protein, 751 aa, Homo sapiens; identical to SEQ ID NO: 876

SEQ ID NO: 879 - protein, 337 aa, Homo sapiens
MPALGWAVAAILMLQTAMAEPSPGTLPRKAGVFSDLSNQELKAVHSFLWSKKELRLQPSSTTTMAKNTVFLIEMLLPKKYHVLRFLDKGERHPVREARAVIFFGDQEHPNVTEFAVGPLPGPCYMRALSPRPGYQSSWASRPISTAEYALLYHTLQEATKPLHQFFLNTTGFSFQDCHDRCLAFTDVAPRGVASGQRRSWLIIQRYVEGYFLHPTGLELLVDHGSTDAGHWAVEQVWYNGKFYGSPEELARKYADGEVDVVVLEDPLPGGKGHDSTEEPPLFSSHKPRGDFPSPIHVSGPRLVQPHGPRFRLEGNAVLYGGWSFAFRLRSSSGLQVL

SEQ ID NO: 880 - protein, 751 aa, Homo sapiens; identical to SEQ ID NO: 876

SEQ ID NO: 881 - protein, 756 aa, Homo sapiens
MHLKIVLAFLALSLITIFALAYVLLTSPGGSSQPPHCPSVSHRAQPWPHPGQSQLFADLSREELTAVMRFLTQRLGPGLVDAAQAQPSDNCIFSVELQLPPKAAALAHLDRGSPPPAREALAIVLFGGQPQPNVSELVVGPLPHPSYMRDVTVERHGGPLPYHRRPVLRAEFTQMWRHLKEVELPKAPIFLSSTFNYNGSTLAAVHATPRGLRSGDRATWMALYHNISGVGLFLHPVGLELLLDHRALDPAHWTVQQVFYLGHYYADLGQLEREFKSGRLEVVRVPLPPPNGASSLRSRNSPGPLPPLQFSPQGSQYSVQGNLVVSSLWSFTFGHGVFSGLRIFDVRFQGERIAYEVSVQECVSIYGADSPKTMLTRYLDSSFGLGRNSRGLVRGVDCPYQATMVDIHILVGKGAVQLLPGAVCVFEEAQGLPLRRHHNYLQNHFYGGLASSALVVRSVSSVGNYDYIWDFVLYPNGALEGRVHATGYINTAFLKGGEEGLLFGNRVGERVLGTVHTHAFHFKLDLDVAGLKNWVVAEDVVFKPVAAPWNPEHWLQRPQLTRQVLGKEDLTAFSLGSPLPRYLYLASNQTNAWGHQRGYRIQIHSPLGIHIPLESDMERALSWGRYQLVVTQRKEEESQSSSIYHQNDIWTPTVTFADFINNETLLGEDLVAWVTASFLHIPHAEDIPNTVTLGNRVGFLLRPYNFFDEDPSIFSPGSVYFEKGQDAGLCSINPVACLPDLAACVPDLPPFSYHGF

SEQ ID NO: 882 - protein, 729 aa, Homo sapiens
MHLKIVLAFLALSLITIFALAYVLLTSPGGSSQPPHCPSVSHRAQPWPHPGQSQLFADLSREELTAVMRFLTQRLGPGLVDAAQAQPSDNCIFSVELQLPPKAAALAHLDRGSPPPAREALAIVLFGGQPQPNVSELVVGPLPHPSYMRDVTVERHGGPLPYHRRPVLRAEFTQMWRHLKEVELPKAPIFLSSTFNYNGSTLAAVHATPRGLRSGDRATWMALYHNISGVGLFLHPVGLELLLDHRALDPAHWTVQQVFYLGHYYADLGQLEREFKSGRLEVVRVPLPPPNGASSLRSRNSPGPLPPLQFSPQGSQYSVQGNLVVSSLWSFTFGHGVFSGLRIFDVRFQGERIAYEVSVQECVSIYGADSPKTMLTRYLDSSFGLGRNSRGLVRGVDCPYQATMVDIHILVGKGAVQLLPGAVCVFEEAQGLPLRRHHNYLQNHFYGGLASSALVVRSVSSVGNYDYIWDFVLYPNGALEGRVHATGYINTAFLKGGEEGLLFGNRVGERVLGTVHTHAFHFKLDLDVAGLKNWVVAEDVVFKPVAAPWNPEHWLQRPQLTRQVLGKEDLTAFSLGSPLPRYLYLASNQTNAWGHQRGYQLVVTQRKEEESQSSSIYHQNDIWTPTVTFADFINNETLLGEDLVAWVTASFLHIPHAEDIPNTVTLGNRVGFLLRPYNFFDEDPSIFSPGSVYFEKGQDAGLCSINPVACLPDLAACVPDLPPFSYHGF

SEQ ID NO: 883 - protein, 763 aa, Homo sapiens
MNQKTILVLLILAVITIFALVCVLLVGRGGDGGEPSQLPHCPSVSPSAQPWTHPGQSQLFADLSREELTAVMRFLTQRLGPGLVDAAQARPSDNCVFSVELQLPPKAAALAHLDRGSPPPAREALAIVFFGRQPQPNVSELVVGPLPHPSYMRDVTVERHGGPLPYHRRPVLFQEYLDIDQMIFNRELPQASGLLHHCCFYKHRGRNLVTMTTAPRGLQSGDRATWFGLYYNISGAGFFLHHVGLELLVNHKALDPARWTIQKVFYQGRYYDSLAQLEAQFEAGLVNVVLIPDNGTGGSWSLKSPVPPGPAPPLQFYPQGPRFSVQGSRVASSLWTFSFGLGAFSGPRIFDVRFQGERLVYEISLQEALAIYGGNSPAAMTTRYVDGGFGMGKYTTPLTRGVDCPYLATYVDWHFLLESQAPKTIRDAFCVFEQNQGLPLRRHHSDLYSHYFGGLAETVLVVRSMSTLLNYDYVWDTVFHPSGAIEIRFYATGYISSAFLFGATGKYGNQVSEHTLGTVHTHSAHFKVDLDVAGLENWVWAEDMVFVPMAVPWSPEHQLQRLQVTRKLLEMEEQAAFLVGSATPRYLYLASNHSNKWGHPRGYRIQMLSFAGEPLPQNSSMARGFSWERYQLAVTQRKEEEPSSSSVFNQNDPWAPTVDFSDFINNETIAGKDLVAWVTAGFLHIPHAEDIPNTVTVGNGVGFFLRPYNFFDEDPSFYSADSIYFRGDQDAGACEVNPLACLPQAAACAPDLPAFSHGGFSHN

SEQ ID NO: 884 - protein, 634 aa, Homo sapiens
MNQKTILVLLILAVITIFALVCVLLVGRGGDGGEPSQLPHCPSVSPSAQPWTHPGQSQLFADLSREELTAVMRFLTQRLGPGLVDAAQARPSDNCVFSVELQLPPKAAALAHLDRGSPPPAREALAIVFFGRQPQPNVSELVVGPLPHPSYMRDVTVERHGGPLPYHRRPVLFQEYLDIDQMIFNRELPQASGLLHHCCFYKHRGRNLVTMTTAPRGLQSGDRATWFGLYYNISGAGFFLHHVGLELLVNHKALDPARWTIQKVFYQGRYYDSLAQLEAQFEAGLVNVVLIPDNGTGGSWSLKSPVPPGPAPPLQFYPQGPRFSVQGSRVASSLWTFSFGLGAFSGPRIFDVRFQGERLVYEISLQEALAIYGGNSPAAMTTRYVDGGFGMGKYTTPLTRGVDCPYLATYVDWHFLLESQAPKTIRDAFCVFEQNQGLPLRRHHSDLYSHYFGGLAETVLVVRSMSTLLNYDYVWDTVFHPSGAIEIRFYATGYISSAFLFGATGKYGNQVSEHTLGTVHTHSAHFKVDLDVAGLENWVWAEDMVFVPMAVPWSPEHQLQRLQVTRKLLEMEEQAAFLVGSATPRYLYLASNHSNKWGHPRGYRIQMLSFAGEPLPQNSSMARGFSWERIWWPG

SEQ ID NO: 885 - protein, 112 aa, Homo sapiens
MVFVPMAVPWSPEHQLQRLQVTRKLLEMEEQAAFLVGSATPRYLYLASNHSNKWGHPRGYRIQMLSFAGEPLPQNSSMARGFSWERYQLAVTQRKEEEPSSSSVFNQNDPWA

SEQ ID NO: 886 - protein, 152 aa, Homo sapiens
MVFVPMAVPWSPEHQLQRLQVTRKLLEMEEQAAFLVGSATPRYLYLASNHSNKWGHPRGYRIQMLSFAGEPLPQNSSMARGFSWERYQLAVTQRKEEEPSSSSVFNQNDPWAPTVDFSDFINNETIAGKDLVAWVTAGFLHIPHAEDIPNTV

SEQ ID NO: 887 - protein, 220 aa, Homo sapiens
MVFVPMAVPWSPEHQLQRLQVTRKLLEMEEQAAFLVGSATPRYLYLASNHSNKWGHPRGYRIQMLSFAGEPLPQNSSMARGFSWERYQLAVTQRKEEEPSSSSVFNQNDPWAPTVDFSDFINNETIAGKDLVAWVTAGFLHIPHAEDIPNTVTVGNGVGFFLRPYNFFDEDPSFYSADSIYFRGDQDAGACEVNPLACLPQAAACAPDLPAFSHGGFSHN

SEQ ID NO: 888 - protein, 220 aa, Homo sapiens; identical to SEQ ID NO: 887

SEQ ID NO: 889 - protein, 144 aa, Homo sapiens
  SITE 1: note = misc_feature - Xaa can be any naturally occurring amino acid
XYDYVWDTVFHPSGAIEIRFYATGYISSAFLFGATGKYGNQVSEHTLGTVHTHSAHFKVDLDVAGDPEAAGDGGAGRLPRGKRHPSLPVPGQQPQQQVGSPPGLPHPDAQLCWRAAAPKQLHGERLQLGEVPAGCDPAEGGGAQ

SEQ ID NO: 890 - protein, 164 aa, Homo sapiens
MSVLTPLLLRGLTGSARRLPVPRAKIHSLPPEGKLGIMGKENGIGSRRICNHHRELWEAGKMEPNQCVGWRCGSGAAGLSYRSQVRRPGVPAPATGLEAHSLTTPKGIPLLGLLPRRGNEEGLASGRTAIGNPEAVGSAALFKDGGGGTSAAEAGAAGQRLRRC

SEQ ID NO: 891 - protein, 235 aa, Homo sapiens
MLKCHVFRCEAPAKNIATSLHEICSKIMAERRNARCLVNGLSLDHSKLVDVPFQVEFPAPKNELVQKFQVYYLGNVPVAKPVGVDVINGALESVLSSSSREQWTPSHVSVAPATLTILHQQTEAVLGECRVRFLSFLAVGRDVHTFAFIMAAGPASFCCHMFWCEPNAASLSEAVQAACMLRYQKCLDARSQASTSCLPAPPAESVARRVGWTVRRGVQSLWGSLKPKRLGAHTP

SEQ ID NO: 892 - protein, 87 aa, Homo sapiens
MRVQDTSGTYYWHIPTGTTQWEPPGRASPSQGSSPQEESQLTWTGFAHGEGFEDGEFWKDEPSDEAPMELGLKEPEEGTLTFPAQSL

SEQ ID NO: 893 - protein, 262 aa, Homo sapiens
MRVQDTSGTYYWHIPTGTTQWEPPGRASPSQGSSPQEESQLTWTGFAHGEGFEDGEFWKDEPSDEAPMELGLKEPEEGTLTFPAQSLSPEPLPQEEEKLPPRNTNPGIKCFAVRSLGWVEMTEEELAPGRSSVAVNNCIRQLSYHKNNLHDPMSGGWGEGKDLLLQLEDETLKLVEPQSQALLHAQPIISIRVWGVGRDSGRDFAYVARDKLTQMLKCHVFRCEAPAKNIATSLHEICSKIMAERRNARCLVNGLSLDHSKL

SEQ ID NO: 894 - protein, 451 aa, Homo sapiens
MRVQDTSGTYYWHIPTGTTQWEPPGRASPSQGSSPQEESQLTWTGFAHGEGFEDGEFWKDEPSDEAPMELGLKEPEEGTLTFPAQSLSPEPLPQEEEKLPPRNTNPGIKCFAVRSLGWVEMTEEELAPGRSSVAVNNCIRQLSYHKNNLHDPMSGGWGEGKDLLLQLEDETLKLVEPQSQALLHAQPIISIRVWGVGRDSGRERDFAYVARDKLTQMLKCHVFRCEAPAKNIATSLHEICSKIMAERRNARCLVNGLSLDHSKLVDVPFQVEFPAPKNELVQKFQVYYLGNVPVAKPVGVDVINGALESVLSSSSREQWTPSHVSVAPATLTILHQQTEAVLGECRVRFLSFLAVGRDVHTFAFIMAAGPASFCCHMFWCEPNAASLSEAVQAACMLRYQKCLDARSQASTSCLPAPPAESVARRVGWTVRRGVQSLWGSLKPKRLGAHTP

SEQ ID NO: 895 - protein, 451 aa, Homo sapiens; identical to SEQ ID NO: 894

SEQ ID NO: 896 - protein, 451 aa, Homo sapiens; identical to SEQ ID NO: 894

SEQ ID NO: 897 - protein, 451 aa, Homo sapiens [sequence omitted]

SEQ ID NO: 898 - protein, 451 aa, Homo sapiens [sequence omitted]

SEQ ID NO: 899 - protein, 488 aa, Homo sapiens
MSAMFSQDFFLAIILQDSSADSFWNPNAFETDSDLPAGWMRVQDTSGTYYWHIPTGTTQWEPPGRASPSQGSSPQEESQLTWTGFAHGEGFEDGEFWKDEPSDEAPMELGLKEPEEGTLTFPAQSLSPEPLPQEEEKLPPRNTNPGIKCFAVRSLGWVEMTEEELAPGRSSVAVNNCIRQLSYHKNNLHDPMSGGWGEGKDLLLQLEDETLKLVEPQSQALLHAQPIISIRVWGVGRDSGRDFAYVARDKLTQMLKCHVFRCEAPAKNIATSLHEICSKIMAERRNARCLVNGLSLDHSKLVDVPFQVEFPAPKNELVQKFQVYYLGNVPVAKPVGVDVINGALESVLSSSSREQWTPSHVSVAPATLTILHQQTEAVLGECRVRFLSFLAVGRDVHTFAFIMAAGPASFCCHMFWCEPNAASLSEAVQAACMLRYQKCLDARSQASTSCLPAPPAESVARRVGWTVRRGVQSLWGSLKPKRLGAHTP

SEQ ID NO: 900 - protein, 490 aa, Homo sapiens
MSAMFSQDFFLAIILQDSSADSFWNPNAFETDSDLPAGWMRVQDTSGTYYWHIPTGTTQWEPPGRASPSQGSSPQEESQLTWTGFAHGEGFEDGEFWKDEPSDEAPMELGLKEPEEGTLTFPAQSLSPEPLPQEEEKLPPRNTNPGIKCFAVRSLGWVEMTEEELAPGRSSVAVNNCIRQLSYHKNNLHDPMSGGWGEGKDLLLQLEDETLKLVEPQSQALLHAQPIISIRVWGVGRDSGRERDFAYVARDKLTQMLKCHVFRCEAPAKNIATSLHEICSKIMAERRNARCLVNGLSLDHSKLVDVPFQVEFPAPKNELVQKFQVYYLGNVPVAKPVGVDVINGALESVLSSSSREQWTPSHVSVAPATLTILHQQTEAVLGECRVRFLSFLAVGRDVHTFAFIMAAGPASFCCHMFWCEPNAASLSEAVQAACMLRYQKCLDARSQASTSCLPAPPAESVARRVGWTVRRGVQSLWGSLKPKRLGAHTP

SEQ ID NO: 901 - protein, 708 aa, Homo sapiens
MSVPSSLSQSAINANSHGGPALSLPLPLHAAHNQLLNAKLQATAVGPKDLRSAMGEGGGPEPGPANAKWLKEGQNQLRRAATAHRDQNRNVTLTLAEEASQEPEMAPLGPKGLIHLYSELELSAHNAANRGLRGPGLIISTQEQGPDEGEEKAAGEAEEEEEDDDDEEEEEDLSSPPGLPEPLESVEAPPRPQALTDGPREHSKSASLLFGMRNSAASDEDSSWATLSQGSPSYGSPEDTDSFWNPNAFETDSDLPAGWMRVQDTSGTYYWHIPTGTTQWEPPGRASPSQGSSPQEESQLTWTGFAHGEGFEDGEFWKDEPSDEAPMELGLKEPEEGTLTFPAQSLSPEPLPQEEEKLPPRNTNPGIKCFAVRSLGWVEMTEEELAPGRSSVAVNNCIRQLSYHKNNLHDPMSGGWGEGKDLLLQLEDETLKLVEPQSQALLHAQPIISIRVWGVGRDSGRDFAYVARDKLTQMLKCHVFRCEAPAKNIATSLHEICSKIMAERRNARCLVNGLSLDHSKLVDVPFQVEFPAPKNELVQKFQVYYLGNVPVAKPVGVDVINGALESVLSSSSREQWTPSHVSVAPATLTILHQQTEAVLGECRVRFLSFLAVGRDVHTFAFIMAAGPASFCCHMFWCEPNAASLSEAVQAACMLRYQKCLDARSQASTSCLPAPPAESVARRVGWTVRRGVQSLWGSLKPKRLGAHTP

SEQ ID NO: 902 - protein, 708 aa, Homo sapiens; identical to SEQ ID NO: 901

SEQ ID NO: 903 - protein, 710 aa, Homo sapiens [sequence omitted]

SEQ ID NO: 904 - protein, 710 aa, Homo sapiens
MSVPSSLSQSAINANSHGGPALSLPLPLHAAHNQLLNAKLQATAVGPKDLRSAMGEGGGPEPGPANAKWLKEGQNQLRRAATAHRDQNRNVTLTLAEEASQEPEMAPLGPKGLIHLYSELELSAHNAANRGLRGPGLIISTQEQGPDEGEEKAAGEAEEEEEDDDDEEEEEDLSSPPGLPEPLESVEAPPRPQALTDGPREHSKSASLLFGMRNSAASDEDSSWATLSQGSPSYGSPEDTDSFWNPNAFETDSDLPAGWMRVQDTSGTYYWHIPTGTTQWEPPGRASPSQGSSPQEESQLTWTGFAHGEGFEDGEFWKDEPSDEAPMELGLKEPEEGTLTFPAQSLSPEPLPQEEEKLPPRNTNPGIKCFAVRSLGWVEMTEEELAPGRSSVAVNNCIRQLSYHKNNLHDPMSGGWGEGKDLLLQLEDETLKLVEPQSQALLHAQPIISIRVWGVGRDSGRERDFAYVARDKLTQMLKCHVFRCEAPAKNIATSLHEICSKIMAERRNARCLVNGLSLDHSKLVDVPFQVEFPAPKNELVQKFQVYYLGNVPVAKPVGVDVINGALESVLSSSSREQWTPSHVSVAPATLTILHQQTEAVLGECRVRFLSFLAVGRDVHTFAFIMAAGPASFCCHMFWCEPNAASLSEAVQAACMLRYQKCLDARSQASTSCLPAPPAESVARRVGWTVRRGVQSLWGSLKPKRLGAHTP

SEQ ID NO: 905 - protein, 707 aa, Homo sapiens
MSVPSSLSQSAINANSHGGPALSLPLPLHAAHNQLLNAKLQATAVGPKDLRSAMGEGGGPEPGPANAKWLKEGQNQLRRAATAHRDQNRNVTLTLAEEASQEPEMAPLGPKGLIHLYSELELSAHNAANRGLRGPGLIISTQEQGPDEGEEKAAGEAEEEEEDDDDEEEEEDLSSPPGLPEPLESVEAPPRPQALTDGPREHSKSASLLFGMRNSAASDEDSSWATLSQGSPSYGSPEDTDSFWNPNAFETDSDLPAGWMRVQDTSGTYYWHIPTGTTQWEPPGRASPSQGSSPQEESQLTWTGFAHGEGFEDGEFWKDEPSDEAPMELGLKEPEEGTLTFPAQSLSPEPLPQEEEKLPPRNTNPGIKCFAVRSLGWVEMTEEELAPGRSSVAVNNCIRQLSYHKNNLHDPMSGGWGEGKDLLLQLEDETLKLVEPQSQALLHAQPIISIRVWGVGRDSGRERDFAYVARDKLTQMLKCHVFRCEAPAKNIATSLHEICSKIMAERRNARCLVNGLSLDHSKLVDVPFQVEFPAPKNELVQKFQVYYLGNVPVAKPVGVDVINGALESVLSSSSREQWTPSHVSVAPATLTILHQQTEAVLGECRVRFLSFLAVGRDVHTFAFIMAAGPASFCCHMFWCEPNAASLSEAVQAACMVEQEELVQARPHPPGPSRGRRRKGLVQAWVPSPCSMGTSAVLISLIKSVCTA

SEQ ID NO: 906 - protein, 475 aa, Homo sapiens
MTQMRDSFWNPNAFETDSDLPAGWMRVQDTSGTYYWHIPTGTTQWEPPGRASPSQGSSPQEESQLTWTGFAHGEGFEDGEFWKDEPSDEAPMELGLKEPEEGTLTFPAQSLSPEPLPQEEEKLPPRNTNPGIKCFAVRSLGWVEMTEEELAPGRSSVAVNNCIRQLSYHKNNLHDPMSGGWGEGKDLLLQLEDETLKLVEPQSQALLHAQPIISIRVWGVGRDSGRERDFAYVARDKLTQMLKCHVFRCEAPAKNIATSLHEICSKIMAERRNARCLVNGLSLDHSKLVDVPFQVEFPAPKNELVQKFQVYYLGNVPVAKPVGVDVINGALESVLSSSSREQWTPSHVSVAPATLTILHQQTEAVLGECRVRFLSFLAVGRDVHTFAFIMAAGPASFCCHMFWCEPNAASLSEAVQAACMLRYQKCLDARSQASTSCLPAPPAESVARRVGWTVRRGVQSLWGSLKPKRLGAHTP

SEQ ID NO: 907 - protein, 475 aa, Homo sapiens [sequence omitted]

SEQ ID NO: 908 - protein, 22 aa, Homo sapiens
MSWPRRLLLRYLFPALLLHAVK

SEQ ID NO: 909 - protein, 61 aa, Homo sapiens
MSWPRRLLLRYLFPALLLHEPRPCLHRLSDHLSVRRAPPSHPAPKGRPDHRPARGVGEPAL

SEQ ID NO: 910 - protein, 184 aa, Homo sapiens
MSWPRRLLLRYLFPALLLHGLGEGSALLHPDSRSHPRSLEKSAWRAFKESQCHHMLKHLHNGARITVQMPPTIEGHWVSTGCEVRSGPEFITRSYRFYHNNTFKAYQFYYGSNRCTNPTYTLIIRGKIRLRQASWIIRGGTEADYQLHNVQGHGRHRVRVQSESHEGHPHGCGHSLTAQRLQRE

SEQ ID NO: 911 - protein, 514 aa, Homo sapiens
MSWPRRLLLRYLFPALLLHGLGEGSALLHPDSRSHPRSLEKSAWRAFKESQCHHMLKHLHNGARITVQMPPTIEGHWVSTGCEVRSGPEFITRSYRFYHNNTFKAYQFYYGSNRCTNPTYTLIIRGKIRLRQASWIIRGGTEADYQLHNVQVICHTEAVAEKLGQQVNRTCPGFLADGGPWVQDVAYDLWREENGCECTKAVNFAMHELQLIRVEKQYLHHNLDHLVEELFLGDIHTDATQRMFYRPSSYQPPLQNAKNHDHACIACRIIYRSDEHHPPILPPKADLTIGLHGEWVSQRCEVRPEVLFLTRHFIFHDNNNTWEGHYYHYSDPVCKHPTFSIYARGRYSRGVLSSRVMGGTEFVFKVNHMKVTPMDAATASLLNVFNGNECGAEGSWQVGIQQDVTHTNGCVALGIKLPHTEYEIFKMEQDARGRYLLFNGQRPSDGSSPDRPEKRATSYQMPLVQCASSSPRAEDLAEDSGSSLYGRAPGRHTWSLLLAALACLVPLLHWNIRR

SEQ ID NO: 912 - protein, 94 aa, Homo sapiens
PEDVLPALQLPAPSAECQVEMGFHHVGQDGLQLPTSSDPPALASQSAGITGVSHRPPGRHLSNDLRTTTMPASPVGSSIGQTSTTLPSCPQRQT

SEQ ID NO: 913 - protein, 227 aa, Homo sapiens
  SITE 1: note = misc_feature - Xaa can be any naturally occurring amino acid
XDVAYDLWREENGCECTKAVNFAMHELQLIRVEKQYLHHNLDHLVEELFLGDIHTDATQRMFYRPSSYQPPLQNAKCAAESSGSFQILPQDSSEKEQNGLSHWCLSRPGHQKDWALCAHAGPATAGCPSCLWPPAETGRKAGRTSSKTVHACPGEAGTSSFELFYFPNCWSIETKLKISLNAKLSFKPRASAPLETGHRVKIETLSQLVFLSFIQLCCEVQSPLANK

SEQ ID NO: 914 - protein, 223 aa, Homo sapiens
MNKPLLWISVLTSLLEAFAHTDLSGKVFVFPRESVTDHVNLITPLEKPLQNFTLCFRAYSDLSRAYSLFSYNTQGRDNELLVYKERVGEYSLYIGRHKVTSKVIEKFPAPVHICVSWESSSGIAEFWINGTPLVKKGLRQGYFVEAQPKIVLGQEQDSYGGKFDRSQSFVGEIGDLYMWDSVLPPENILSAYQGTPLPANILDWQALNYEIRGYVIIKPLVWV

SEQ ID NO: 915 - protein, 54 aa, Homo sapiens
MRFQQFLFAFFIFIMSLLLISGQRPVNLTMRRKLRKHNCLQRRCMPLHSRVPFP

SEQ ID NO: 916 - protein, 54 aa, Homo sapiens; identical to SEQ ID NO: 915

SEQ ID NO: 917 - protein, 54 aa, Homo sapiens; identical to SEQ ID NO: 915

SEQ ID NO: 918 - protein, 77 aa, Homo sapiens
MNLRLCVQALLLLWLSLTAVCGGSLMPLPDGNGLEDGNVRHLVQPRGSRNGPGPWQGGRRKFRRQRPRLSHKGPMPF

SEQ ID NO: 919 - protein, 158 aa, Homo sapiens
MAATGTAAAAATGRLLLLLLALAANAGTGFAVAEPQIAMFCGKLNMHVNIQTGKWEPDPTGTKSCFETKEEVLQYCQEMYPELQITNVMEANQRVSIDNWCRRDKKQCKSRFVTPFKCLVGEFVSDVLLVPEKCQFFHKERMEVCENHQHWHTVVKEV

SEQ ID NO: 920 - protein, 35 aa, Homo sapiens
MAATGTAAAAATGRLLLLLLVGLTAPALALAGYIE

SEQ ID NO: 921 - protein, 116 aa, Homo sapiens
MAATGTAAAAATGRLLLLLLVGLTAPALALAGYIEALAANAGTGFAVAEPQIAMFCGKLNMHVNIQTGKWEPDPTGTKSCFETKEEVLQYCQEMYPELQITNSGWRCVRITSTGTR

SEQ ID NO: 922 - protein, 763 aa, Homo sapiens
MAATGTAAAAATGRLLLLLLVGLTAPALALAGYIEALAANAGTGFAVAEPQIAMFCGKLNMHVNIQTGKWEPDPTGTKSCFETKEEVLQYCQEMYPELQITNVMEANQRVSIDNWCRRDKKQCKSRFVTPFKCLVGEFVSDVLLVPEKCQFFHKERMEVCENHQHWHTVVKEACLTQGMTLYSYGMLLPCGVDQFHGTEYVCCPQTKIIGSVSKEEEEEDEEEEEEEDEEEDYDVYKSEFPTEADLEDFTEAAVDEDDEDEEEGEEVVEDRDYYYDTFKGDDYNEENPTEPGSDGTMSDKEITHDVKAVCSQEAMTGPCRAVMPRWYFDLSKGKCVRFIYGGCGGNRNNFESEDYCMAVCKAMIPPTPLPTNDVDVYFETSADDNEHARFQKAKEQLEIRHRNRMDRVKKEWEEAELQAKNLPKAERQTLIQHFQAMVKALEKEAASEKQQLVETHLARVEAMLNDRRRMALENYLAALQSDPPRPHRILQALRRYVRAENKDRLHTIRHYQHVLAVDPEKAAQMKSQVMTHLHVIEERRNQSLSLLYKVPYVAQEIQEEIDELLQEQRADMDQFTASISETPVDVRVSSEESEEIPPFHPFHPFPALPENEDTQPELYHPMKKGSGVGEQDGGLIGAEEKVINSKNKVDENMVIDETLDVKEMIFNAERVGGLEEERESVGPLREDFSLSSSALIGLLVIAVAIATVIVISLVMLRKRQYGTISHGIVEVDPMLTPEERHLNKMQNHGYENPTYKYLEQMQI

SEQ ID NO: 923 - protein, 751 aa, Homo sapiens
MAATGTAAAAATGRLLLLLLVGLTAPALALAGYIEALAANAGTGFAVAEPQIAMFCGKLNMHVNIQTGKWEPDPTGTKSCFETKEEVLQYCQEMYPELQITNVMEANQRVSIDNWCRRDKKQCKSRFVTPFKCLVGEFVSDVLLVPEKCQFFHKERMEVCENHQHWHTVVKEACLTQGMTLYSYGMLLPCGVDQFHGTEYVCCPQTKIIGSVSKEEEEEDEEEEEEEDEEEDYDVYKSEFPTEADLEDFTEAAVDEDDEDEEEGEEVVEDRDYYYDTFKGDDYNEENPTEPGSDGTMSDKEITHDVKAVCSQEAMTGPCRAVMPRWYFDLSKGKCVRFIYGGCGGNRNNFESEDYCMAVCKAMIPPTPLPTNDVDVYFETSADDNEHARFQKAKEQLEIRHRNRMDRVKKEWEEAELQAKNLPKAERQTLIQHFQAMVKALEKEAASEKQQLVETHLARVEAMLNDRRRMALENYLAALQSDPPRPHRILQALRRYVRAENKDRLHTIRHYQHVLAVDPEKAAQMKSQVMTHLHVIEERRNQSLSLLYKVPYVAQEIQEEIDELLQEQRADMDQFTASISETPVDVRVSSEESEEIPPFHPFHPFPALPENEGSGVGEQDGGLIGAEEKVINSKNKVDENMVIDETLDVKEMIFNAERVGGLEEERESVGPLREDFSLSSSALIGLLVIAVAIATVIVISLVMLRKRQYGTISHGIVEVDPMLTPEERHLNKMQNHGYENPTYKYLEQMQI

SEQ ID NO: 924 - protein, 695 aa, Homo sapiens
MAATGTAAAAATGRLLLLLLVGLTAPALALAGYIEALAANAGTGFAVAEPQIAMFCGKLNMHVNIQTGKWEPDPTGTKSCFETKEEVLQYCQEMYPELQITNVMEANQRVSIDNWCRRDKKQCKSRFVTPFKCLVGEFVSDVLLVPEKCQFFHKERMEVCENHQHWHTVVKEACLTQGMTLYSYGMLLPCGVDQFHGTEYVCCPQTKIIGSVSKEEEEEDEEEEEEEDEEEDYDVYKSEFPTEADLEDFTEAAVDEDDEDEEEGEEVVEDRDYYYDTFKGDDYNEENPTEPGSDGTMSDKEITHDVKVPPTPLPTNDVDVYFETSADDNEHARFQKAKEQLEIRHRNRMDRVKKEWEEAELQAKNLPKAERQTLIQHFQAMVKALEKEAASEKQQLVETHLARVEAMLNDRRRMALENYLAALQSDPPRPHRILQALRRYVRAENKDRLHTIRHYQHVLAVDPEKAAQMKSQVMTHLHVIEERRNQSLSLLYKVPYVAQEIQEEIDELLQEQRADMDQFTASISETPVDVRVSSEESEEIPPFHPFHPFPALPENEGSGVGEQDGGLIGAEEKVINSKNKVDENMVIDETLDVKEMIFNAERVGGLEEERESVGPLREDFSLSSSALIGLLVIAVAIATVIVISLVMLRKRQYGTISHGIVEVDPMLTPEERHLNKMQNHGYENPTYKYLEQMQI

SEQ ID NO: 925 - protein, 522 aa, Homo sapiens
MAATGTAAAAATGRLLLLLLVGLTAPALALAGYIEALAANAGTGFAVAEPQIAMFCGKLNMHVNIQTGKWEPDPTGTKSCFETKEEVLQYCQEMYPELQITNVMEANQRVSIDNWCRRDKKQCKSRFVTPFKCLVPPTPLPTNDVDVYFETSADDNEHARFQKAKEQLEIRHRNRMDRVKKEWEEAELQAKNLPKAERQTLIQHFQAMVKALEKEAASEKQQLVETHLARVEAMLNDRRRMALENYLAALQSDPPRPHRILQALRRYVRAENKDRLHTIRHYQHVLAVDPEKAAQMKSQVMTHLHVIEERRNQSLSLLYKVPYVAQEIQEEIDELLQEQRADMDQFTASISETPVDVRVSSEESEEIPPFHPFHPFPALPENEGSGVGEQDGGLIGAEEKVINSKNKVDENMVIDETLDVKEMIFNAERVGGLEEERESVGPLREDFSLSSSALIGLLVIAVAIATVIVISLVMLRKRQYGTISHGIVEVDPMLTPEERHLNKMQNHGYENPTYKYLEQMQI

SEQ ID NO: 926 - protein, 159 aa, Homo sapiens [sequence omitted]

SEQ ID NO: 927 - protein, 39 aa, Homo sapiens
MAATGTAAAAATGRLLLLLLVGLTAPALALAGYIEWVNL

SEQ ID NO: 928 - protein, 761 aa, Homo sapiens
MLRAPGELPRQAARCSLCRLGPGRGRAFFKWRCLPASVDRGNPLWALAANAGTGFAVAEPQIAMFCGKLNMHVNIQTGKWEPDPTGTKSCFETKEEVLQYCQEMYPELQITNVMEANQRVSIDNWCRRDKKQCKSRFVTPFKCLVGEFVSDVLLVPEKCQFFHKERMEVCENHQHWHTVVKEACLTQGMTLYSYGMLLPCGVDQFHGTEYVCCPQTKIIGSVSKEEEEEDEEEEEEEDEEEDYDVYKSEFPTEADLEDFTEAAVDEDDEDEEEGEEVVEDRDYYYDTFKGDDYNEENPTEPGSDGTMSDKEITHDVKAVCSQEAMTGPCRAVMPRWYFDLSKGKCVRFIYGGCGGNRNNFESEDYCMAVCKAMIPPTPLPTNDVDVYFETSADDNEHARFQKAKEQLEIRHRNRMDRVKKEWEEAELQAKNLPKAERQTLIQHFQAMVKALEKEAASEKQQLVETHLARVEAMLNDRRRMALENYLAALQSDPPRPHRILQALRRYVRAENKDRLHTIRHYQHVLAVDPEKAAQMKSQVMTHLHVIEERRNQSLSLLYKVPYVAQEIQEEIDELLQEQRADMDQFTASISETPVDVRVSSEESEEIPPFHPFHPFPALPENEGSGVGEQDGGLIGAEEKVINSKNKVDENMVIDETLDVKEMIFNAERVGGLEEERESVGPLREDFSLSSSALIGLLVIAVAIATVIVISLVMLRKRQYGTISHGIVEVDPMLTPEERHLNKMQNHGYENPTYKYLEQMQI

SEQ ID NO: 929 - protein, 267 aa, Homo sapiens
MKAAVLTLAVLFLTGSQARHFWQQDEPPQSPWDRVKDLATVYVDVLKDSGRDYVSQFEGSALGKQLNLKLLDNWDSVTSTFSKLREQLGPVTQEFWDNLEKETEGLRQEMSKDLEEVKAKVQPYLDDFQKKWQEEMELYRQKVEPLRAELQEGARQKLHELQEKLSPLGEEMRDRARAHVDALRTHLAPYSDELRQRLAARLEALKENGGARLAEYHAKATEHLSTLSEKAKPALEDLRQGLLPVLESFKVSFLSALEEYTKKLNTQ

SEQ ID NO: 930 - protein, 267 aa, Homo sapiens; identical to SEQ ID NO: 929

SEQ ID NO: 931 - protein, 267 aa, Homo sapiens; identical to SEQ ID NO: 929

SEQ ID NO: 932 - protein, 267 aa, Homo sapiens; identical to SEQ ID NO: 929

SEQ ID NO: 933 - protein, 245 aa, Homo sapiens
MSGGARGFCMLKAPHSARPFFSSRSPTALQDESCGADLGRALPDGLKLLDNWDSVTSTFSKLREQLGPVTQEFWDNLEKETEGLRQEMSKDLEEVKAKVQPYLDDFQKKWQEEMELYRQKVEPLRAELQEGARQKLHELQEKLSPLGEEMRDRARAHVDALRTHLAPYSDELRQRLAARLEALKENGGARLAEYHAKATEHLSTLSEKAKPALEDLRQGLLPVLESFKVSFLSALEEYTKKLNTQ

SEQ ID NO: 934 - protein, 133 aa, Homo sapiens
MCEQHPKRPGLQLWRGREPGWNGQQAALPTVTNMKLLAATVLLLTICSLEGALVRRQAKEPCVESLVSQYFQTVTDYGKDLMEKVKSPELQAEAKSYFEKSKEQLTPLIKKAGTELVNFLSYFVELGTQPATQ

SEQ ID NO: 935 - protein, 52 aa, Homo sapiens
MEKVKSPELQAEAKSYFEKSKEQLTPLIKKAGTELVNFLSYFVELGTQPATQ

SEQ ID NO: 936 - protein, 52 aa, Homo sapiens; identical to SEQ ID NO: 935

SEQ ID NO: 937 - protein, 66 aa, Homo sapiens
MKLLAATVLLLTICSLEGALVRRQAKEPCVESLVSQYFQTVTDYGKDLMEKVKSPELQAEAKSYFE

SEQ ID NO: 938 - protein, 95 aa, Homo sapiens
MKLLAATVLLLTICSLEGALVRRQAKEPCVESLVSQYFQTVTDYGKDLMEKVKSPELQAEAKSYFEKSKEQLTPLIKKAGTELVNFLSYFVELGT

SEQ ID NO: 939 - protein, 100 aa, Homo sapiens
MKLLAATVLLLTICSLEGALVRRQAKEPCVESLVSQYFQTVTDYGKDLMEKVKSPELQAEAKSYFEKSKEQLTPLIKKAGTELVNFLSYFVELGTQPATQ

SEQ ID NO: 940 - protein, 82 aa, Homo sapiens
MKLLAATVLLLTICSLEGALVRRQAKEPCVESLVSQYFQTVTDYGKDLMEKVKSPELQAEAKSYFENFLSYFVELGTQPATQ

SEQ ID NO: 941 - protein, 72 aa, Homo sapiens
MKLLAATVLLLTICSLEGLATKGLKRKIIPSLKPRKPIQRSGWIPFWGGGRELGWVLAEVWQEARIHCCGPS

SEQ ID NO: 942 - protein, 27 aa, Homo sapiens
MKLLAATVLLLTICSLEGLTLKSQRSS

SEQ ID NO: 943 - protein, 396 aa, Homo sapiens
MFLKAVVLTLALVAVAGARAEVSADQVATVMWDYFSQLSNNAKEAVEHLQKSELTQQLNALFQDKLGEVNTYAGDLQKKLVPFATELHERLAKDSEKLKEEIGKELEELRARLLPHANEVSQKIGDNLRELQQRLEPYADQLRTQVSTQAEQLRRQLTPYAQRMERVLRENADSLQASLRPHADELKAKIDQNVEELKGRLTPYADEFKVKIDQTVEELRRSLAPYAQDTQEKLNHQLEGLTFQMKKNAEELKARISASAEELRQRLAPLAEDVRGNLRGNTEGLQKSLAELGGHLDQQVEEFRRRVEPYGENFNKALVQQMEQLRQKLGPHAGDVEGHLSFLEKDLRDKVNSFFSTFKEKESQDKTLSLPELEQQQEQQQEQQQEQVQMLAPLES

SEQ ID NO: 944 - protein, 162 aa, Homo sapiens
MASMAAVLTWALALLSAFSATQARKGFWDYFSQTSGDKGRVEQIHQQKMAREPATLKDSLEQDLNNMNKFLEKLRPLSGSEAPRLPQDPVGMRRQLQEELEEVKARLQPYMAEAHELVGWNLEGLRQQLKPYTMDLMEQVALRVQELQEQLRVVGEDTKAQL

SEQ ID NO: 945 - protein, 366 aa, Homo sapiens
MASMAAVLTWALALLSAFSATQARKGFWDYFSQTSGDKGRVEQIHQQKMAREPATLKDSLEQDLNNMNKFLEKLRPLSGSEAPRLPQDPVGMRRQLQEELEEVKARLQPYMAEAHELVGWNLEGLRQQLKPYTMDLMEQVALRVQELQEQLRVVGEDTKAQLLGGVDEAWALLQGLQSRVVHHTGRFKELFHPYAESLVSGIGRHVQELHRSVAPHAPASPARLSRCVQVLSRKLTLKAKALHARIQQNLDQLREELSRAFAGTGTEEGAGPDPQMLSEEVRQRLQAFRQDTYLQIAAFTRAIDQETEEVQQQLAPPPPGHSAFAPEFQQTDSGKVLSKLQARLDDLWEDITHSLHDQGHSHLGDP

SEQ ID NO: 946 - protein, 366 aa, Homo sapiens; identical to SEQ ID NO: 945

SEQ ID NO: 947 - protein, 4563 aa, Homo sapiens
MDPPRPALLALLALPALLLLLLAGARAEEEMLENVSLVCPKDATRFKHLRKYTYNYEAESSSGVPGTADSRSATRINCKVELEVPQLCSFILKTSQCTLKEVYGFNPEGKALLKKTKNSEEFAAAMSRYELKLAIPEGKQVFLYPEKDEPTYILNIKRGIISALLVPPETEEAKQVLFLDTVYGNCSTHFTVKTRKGNVATEISTERDLGQCDRFKPIRTGISPLALIKGMTRPLSTLISSSQSCQYTLDAKRKHVAEAICKEQHLFLPFSYKNKYGMVAQVTQTLKLEDTPKINSRFFGEGTKKMGLAFESTKSTSPPKQAEAVLKTLQELKKLTISEQNIQRANLFNKLVTELRGLSDEAVTSLLPQLIEVSSPITLQALVQCGQPQCSTHILQWLKRVHANPLLIDVVTYLVALIPEPSAQQLREIFNMARDQRSRATLYALSHAVNNYHKTNPTGTQELLDIANYLMEQIQDDCTGDEDYTYLILRVIGNMGQTMEQLTPELKSSILKCVQSTKPSLMIQKAAIQALRKMEPKDKDQEVLLQTFLDDASPGDKRLAAYLMLMRSPSQADINKIVQILPWEQNEQVKNFVASHIANILNSEELDIQDLKKLVKEALKESQLPTVMDFRKFSRNYQLYKSVSLPSLDPASAKIEGNLIFDPNNYLPKESMLKTTLTAFGFASADLIEIGLEGKGFEPTLEALFGKQGFFPDSVNKALYWVNGQVPDGVSKVLVDHFGYTKDDKHEQDMVNGIMLSVEKLIKDLKSKEVPEARAYLRILGEELGFASLHDLQLLGKLLLMGARTLQGIPQMIGEVIRKGSKNDFFLHYIFMENAFELPTGAGLQLQISSSGVIAPGAKAGVKLEVANMQAELVAKPSVSVEFVTNMGIIIPDFARSGVQMNTNFFHESGLEAHVALKAGKLKFIIPSPKRPVKLLSGGNTLHLVSTTKTEVIPPLIENRQSWSVCKQVFPGLNYCTSGAYSNASSTDSASYYPLTGDTRLELELRPTGEIEQYSVSATYELQREDRALVDTLKFVTQAEGAKQTEATMTFKYNRQSMTLSSEVQIPDFDVDLGTILRVNDESTEGKTSYRLTLDIQNKKITEVALMGHLSCDTKEERKIKGVISIPRLQAEARSEILAHWSPAKLLLQMDSSATAYGSTVSKRVAWHYDEEKIEFEWNTGTNVDTKKMTSNFPVDLSDYPKSLHMYANRLLDHRVPQTDMTFRHVGSKLIVAMSSWLQKASGSLPYTQTLQDHLNSLKEFNLQNMGLPDFHIPENLFLKSDGRVKYTLNKNSLKIEIPLPFGGKSSRDLKMLETVRTPALHFKSVGFHLPSREFQVPTFTIPKLYQLQVPLLGVLDLSTNVYSNLYNWSASYSGGNTSTDHFSLRARYHMKADSVVDLLSYNVQGSGETTYDHKNTFTLSCDGSLRHKFLDSNIKFSHVEKLGNNPVSKGLLIFDASSSWGPQMSASVHLDSKKKQHLFVKEVKIDGQFRVSSFYAKGTYGLSCQRDPNTGRLNGESNLRFNSSYLQGTNQITGRYEDGTLSLTSTSDLQSGIIKNTASLKYENYELTLKSDTNGKYKNFATSNKMDMTFSKQNALLRSEYQADYESLRFFSLLSGSLNSHGLELNADILGTDKINSGAHKATLRIGQDGISTSATTNLKCSLLVLENELNAELGLSGASMKLTTNGRFREHNAKFSLDGKAALTELSLGSAYQAMILGVDSKNIFNFKVSQEGLKLSNDMMGSYAEMKFDHTNSLNIAGLSLDFSSKLDNIYSSDKFYKQTVNLQLQPYSLVTTLNSDLKYNALDLTNNGKLRLEPLKLHVAGNLKGAYQNNEIKHIYAISSAALSASYKADTVAKVQGVEFSHRLNTDIAGLASAIDMSTNYNSDSLHFSNVFRSVMAPFTMTIDAHTNGNGKLALWGEHTGQLYSKFLLKAEPLAFTFSHDYKGSTSHHLVSRKSISAALEHKVSALLTPAEQTGTWKLKTQFNNNEYSQDLDAYNTKDKIGVELTGRTLADLTLLDSPIKVPLLLSEPINIIDALEMRDAVEKPQEFTIVAFVKYDKNQDVHSINLPFFETLQEYFERNRQTIIVVLENVQRNLKHINIDQFVRKYRAALGKLPQQANDYLNSFNWERQVSHAKEKLTALTKKYRITENDIQIALDDAKINFNEKLSQLQTYMIQFDQYIKDSYDLHDLKIAIANIIDEIIEKLKSLDEHYHIRVNLVKTIHDLHLFIENIDFNKSGSSTASWIQNVDTKYQIRIQIQEKLQQLKRHIQNIDIQHLAGKLKQHIEAIDVRVLLDQLGTTISFERINDILEHVKHFVINLIGDFEVAEKINAFRAKVHELIERYEVDQQIQVLMDKLVELAHQYKLKETIQKLSNVLQQVKIKDYFEKLVGFIDDAVKKLNELSFKTFIEDVNKFLDMLIKKLKSFDYHQFVDETNDKIREVTQRLNGEIQALELPQKAEALKLFLEETKATVAVYLESLQDTKITLIINWLQEALSSASLAHMKAKFRETLEDTRDRMYQMDIQQELQRYLSLVGQVYSTLVTYISDWWTLAAKNLTDFAEQYSIQDWAKRMKALVEQGFTVPEIKTILGTMPAFEVSLQALQKATFQTPDFIVPLTDLRIPSVQINFKDLKNIKIPSRFSTPEFTILNTFHIPSFTIDFVEMKVKIIRTIDQMLNSELQWPVPDIYLRDLKVEDIPLARITLPDFRLPEIAIPEFIIPTLNLNDFQVPDLHIPEFQLPHISHTIEVPTFGKLYSILKIQSPLFTLDANADIGNGTTSANEAGIAASITAKGESKLEVLNFDFQANAQLSNPKINPLALKESVKFSSKYLRTEHGSEMLFFGNAIEGKSNTVASLHTEKNTLELSNGVIVKINNQLTLDSNTKYFHKLNIPKLDFSSQADLRNEIKTLLKAGHIAWTSSGKGSWKWACPRFSDEGTHESQISFTIEGPLTSFGLSNKINSKHLRVNQNLVYESGSLNFSKLEIQSQVDSQHVGHSVLTAKGMALFGEGKAEFTGRHDAHLNGKVIGTLKNSLFFSAQPFEITASTNNEGNLKVRFPLRLTGKIDFLNNYALFLSPSAQQASWQVSARFNQYKYNQNFSAGNNENIMEAHVGINGEANLDFLNIPLTIPEMRLPYTIITTPPLKDFSLWEKTGLKEFLKTTKQSFDLSVKAQYKKNKHRHSITNPLAVLCEFISQSIKSFDRHFEKNRNNALDFVTKSYNETKIKFDKYKAEKSHDELPRTFQIPGYTVPVVNVEVSPFTIEMSAFGYVFPKAVSMPSFSILGSDVRVPSYTLILPSLELPVLHVPRNLKLSLPDFKELCTISHIFIPAMGNITYDFSFKSSVITLNTNAELFNQSDIVAHLLSSSSSVIDALQYKLEGTTRLTRKRGLKLATALSLSNKFVEGSHNSTVSLTTKNMEVSVATTTKAQIPILRMNFKQELNGNTKSKPTVSSSMEFKYDFNSSMLYSTAKGAVDHKLSLESLTSYFSIESSTKGDVKGSVLSREYSGTIASEANTYLNSKSTRSSVKLQGTSKIDDIWNLEVKENFAGEATLQRIYSLWEHSTKNHLQLEGLFFTNGEHTSKATLELSPWQMSALVQVHASQPSSFHDFPDLGQEVALNANTKNQKIRWKNEVRIHSGSFQSQVELSNDQEKAHLDIAGSLEGHLRFLKNIILPVYDKSLWDFLKLDVTTSIGRRQHLRVSTAFVYTKNPNGYSFSIPVKVLADKFIIPGLKLNDLNSVLVMPTFHVPFTDLQVPSCKLDFREIQIYKKLRTSSFALNLPTLPEVKFPEVDVLTKYSQPEDSLIPFFEITVPESQLTVSQFTLPKSVSDGIAALDLNAVANKIADFELPTIIVPEQTIEIPSIKFSVPAGIVIPSFQALTARFEVDSPVYNATWSASLKNKADYVETVLDSTCSSTVQFLEYELNVLGTHKIEDGTLASKTKGTFAHRDFSAEYEEDGKYEGLQEWEGKAHLNIKSPAFTDLHLRYQKDKKGISTSAASPAVGTVGMDMDEDDDFSKWNFYYSPQSSPDKKLTIFKTELRVRESDEETQIKVNWEEEAASGLLTSLKDNVPKATGVLYDYVNKYHWEHTGLTLREVSSKLRRNLQNNAEWVYQGAIRQIDDIDVRFQKAASGTTGTYQEWKDKAQNLYQELLTQEGQASFQGLKDNVFDGLVRVTQEFHMKVKHLIDSLIDFLNFPRFQFPGKPGIYTREELCTMFIREVGTVLSQVYSKVHNGSEILFSYFQDLVITLPFELRKHKLIDVISMYRELLKDLSKEAQEVFKAIQSLKTTEVLRNLQDLLQFIFQLIEDNIKQLKEMKFTYLINYIQDEINTIFSDYIPYVFKLLKENLCLNLHKFNEFIQNELQEASQELQQIHQYIMALREEYFDPSIVGWTVKYYELEEKIVSLIKNLLVALKDFHSEYIVSASNFTSQLSSQVEQFLHRNIQEYLSILTDPDGKGKEKIAELSATAQEIIKSQAIATKKIISDYHQQFRYKLQDFSDQLSDYYEKFIAESKRLIDLSIQNYHTFLIYITELLKKLQSTTVMNPYMKLAPGELTIIL

SEQ ID NO: 948 - protein, 828 aa, Homo sapiens
MDPPRPALLALLALPALLLLLLAGARAEEEMLENVSLVCPKDATRFKHLRKYTYNYEAESSSGVPGTADSRSATRINCKVELEVPQLCSFILKTSQCTLKEVYGFNPEGKALLKKTKNSEEFAAAMSRYELKLAIPEGKQVFLYPEKDEPTYILNIKRGIISALLVPPETEEAKQVLFLDTVYGNCSTHFTVKTRKGNVATEISTERDLGQCDRFKPIRTGISPLALIKGMTRPLSTLISSSQSCQYTLDAKRKHVAEAICKEQHLFLPFSYKNKYGMVAQVTQTLKLEDTPKINSRFFGEGTKKMGLAFESTKSTSPPKQAEAVLKTLQELKKLTISEQNIQRANLFNKLVTELRGLSDEAVTSLLPQLIEVSSPITLQALVQCGQPQCSTHILQWLKRVHANPLLIDVVTYLVALIPEPSAQQLREIFNMARDQRSRATLYALSHAVNNYHKTNPTGTQELLDIANYLMEQIQDDCTGDEDYTYLILRVIGNMGQTMEQLTPELKSSILKCVQSTKPSLMIQKAAIQALRKMEPKDKDQEVLLQTFLDDASPGDKRLAAYLMLMRSPSQADINKIVQILPWEQNEQVKNFVASHIANILNSEELDIQDLKKLVKEALKESQLPTVMDFRKFSRNYQLYKSVSLPSLDPASAKIEGNLIFDPNNYLPKESMLKTTLTAFGFASADLIEIGLEGKGFEPTLEALFGKQGFFPDSVNKALYWVNGQVPDGVSKVLVDHFGYTKDDKHEQDMVNGIMLSVEKLIKDLKSKEVPEARAYLRILGEELGFASLHDLQLLGKLLLMDRPDSLTIPAAQARKDACTFFRDGGLP

SEQ ID NO: 949 - protein, 54 aa, Homo sapiens
MRLFLSLPVLVVVLSIVLEGPAPAQGTPDVSSALDKLKEFGNTLEDKARELISR

SEQ ID NO: 950 - protein, 83 aa, Homo sapiens
MRLFLSLPVLVVVLSIVLEGPAPAQGTPDVSSALDKLKEFGNTLEDKARELISRIKQSELSAKMREDDISPCCPGWSRTPDLK

SEQ ID NO: 951 - protein, 77 aa, Homo sapiens
MRLFLSLPVLVVVLSIVLEGPAPAQGTPDVSSALDKLKEFGNTLEDKARELISRIKQSELSAKMREWFSETFQKVKE

SEQ ID NO: 952 - protein, 83 aa, Homo sapiens
MRLFLSLPVLVVVLSIVLEGPAPAQGTPDVSSALDKLKEFGNTLEDKARELISRIKQSELSAKMREWFSETFQKVKEKLKIDS

SEQ ID NO: 953 - protein, 83 aa, Homo sapiens; identical to SEQ ID NO: 952

SEQ ID NO: 954 - protein, 92 aa, Homo sapiens
MRLFLSLPVLVVVLSIVLEGPAPAQGTPDVSSALDKLKEFGNTLEDKARELISRIKQSELSAKMRLEPFPGHGRAGGVVFRDISESEGETQD

SEQ ID NO: 955 - protein, 129 aa, Homo sapiens
MRLFLSLPVLVVVLSIVLEGPAPAQGTPDVSSALDKLKEFGNTLEDKARELISRIKQSELSAKMRLEPFPGHGRAGVCFWVEPWQMVQDEQIEKKTSPGEADNIPLVTQLDLKGVVFRDISESEGETQD

SEQ ID NO: 956 - protein, 29 aa, Homo sapiens
MRLFLSLPVLVVVLSIVLEGSGFQRHFRK

SEQ ID NO: 957 - protein, 39 aa, Homo sapiens
MRLFLSLPVLVVVLSIVLEGSPRLSPAGAKSAQESTSNR

SEQ ID NO: 958 - protein, 87 aa, Homo sapiens
MGTRLLPALFLVLLVLGFEVQGTQQPQQDEMPSPTFLTQVKESLSSYWESAKTAAQNLDLYSKSTAAMSTYTGIFTDQVLSVLKGEE

SEQ ID NO: 959 - protein, 72 aa, Homo sapiens
MGTRLLPALFLVLLVLGFEVQGTQQPQQDEMPSPTFLTQVKESLSSYWESAKTAAQNLYEKTYLPAVDEKLR

SEQ ID NO: 960 - protein, 101 aa, Homo sapiens
MGTRLLPALFLVLLVLGFEVQGTQQPQQDEMPSPTFLTQVKESLSSYWESAKTAAQNLYEKTYLPAVDEKLRDLYSKSTAAMSTYTGIFTDQVLSVLKGEE

SEQ ID NO: 961 - protein, 101 aa, Homo sapiens; identical to SEQ ID NO: 960

SEQ ID NO: 962 - protein, 47 aa, Homo sapiens
MGTRLLPALFLVLLVLGFGEGISLQLLGVSKDSRPEPVREDIPARCR

SEQ ID NO: 963 - protein, 117 aa, Homo sapiens
MGTWGAPHRTLPCRNRGAMQPRVLLVVALLALLASARASEAEDASLLSFMQGYMKHATKTAKDALSSVQESQVAQQARGWVTDGFSSLKDYWSTVKDKFSEFWDLDPEVRPTSAVAA

SEQ ID NO: 964 - protein, 117 aa, Homo sapiens; identical to SEQ ID NO: 963

SEQ ID NO: 965 - protein, 55 aa, Homo sapiens
MQPRVLLVVALLALLASARASEAEDASLLSFMQGYMKHATKTAKDALSSVQESQV

SEQ ID NO: 966 - protein, 99 aa, Homo sapiens
MQPRVLLVVALLALLASARASEAEDASLLSFMQGYMKHATKTAKDALSSVQESQVAQQARGWVTDGFSSLKDYWSTVKDKFSEFWDLDPEVRPTSAVAA

SEQ ID NO: 967 - protein, 73 aa, Homo sapiens
MSLLRNRLQALPALCLCVLVLACIGACQPEAQEGTLSPPPKLKMSRWSLVRGRMKELLETVVNRTRDGWQWFW

SEQ ID NO: 968 - protein, 127 aa, Homo sapiens
MSLLRNRLQALPALCLCVLVLACIGACQPEAQEGTLSPPPKLKMSRWSLVRGRMKELLETVVNRTRDGWQWFWSPSTFRGFMQTYYDDHLRDLGPLTKAWFLESKDSLLKKTHSLCPRLVCGDKDQG

SEQ ID NO: 969 - protein, 178 aa, Homo sapiens
MSLLRNRLQALPALCLCVLVLACIGACQPEAQEGTLSPPPKLKMSRWSLVRGRMKELLETVVNRTRDGWQWFWSLDTMGTRLLPALFLVLLVLGFEVQGTQQPQQDEMPSPTFLTQVKESLSSYWESAKTAAQNLYEKTYLPAVDEKLRDLYSKSTAAMSTYTGIFTDQVLSVLKGEE

SEQ ID NO: 970 - protein, 127 aa, Homo sapiens; identical to SEQ ID NO: 968

SEQ ID NO: 971 - protein, 215 aa, Homo sapiens
MFKQLSCISLPSSCDYSSRSLLQPPSPKMVMLLLLLSALAGLFGAAEGQAFHLGKCPNPPVQENFDVNKYLGRWYEIEKIPTTFENGRCIQANYSLMENGKIKVLNQELRADGTVNQIEGEATPVNLTEPAKLEVKFSWFMPSAPYWILATDYENYALVYSCTCIIQLFHVDFAWILARNPNLPPETVDSLKNILTSNNIDVKKMTVTDQVNCPK

SEQ ID NO: 972 - protein, 108 aa, Homo sapiens
MVMLLLLLSALAGLFGAAEGQAFHLGKCPNPPVQENFDVNKTESHFVTQGGVQHHHLGSLQPPPPGFKQFSCLSLPSSWDYSISEDGTKLRRSQQPLRMDAASRPTTH

SEQ ID NO: 973 - protein, 149 aa, Homo sapiens
MVMLLLLLSALAGLFGAAEGQAFHLGKCPNPPVQENFDVNKYLGRWYEIEKIPTTFENGRCIQANYSLMENGKIKVLNQELRADGTVNQIEGEATPVNLTEPAKLEVKFSWFMPSAPYWILATDYENYALVYSCTCIIQLFHVDFAWIL

SEQ ID NO: 974 - protein, 189 aa, Homo sapiens
MVMLLLLLSALAGLFGAAEGQAFHLGKCPNPPVQENFDVNKYLGRWYEIEKIPTTFENGRCIQANYSLMENGKIKVLNQELRADGTVNQIEGEATPVNLTEPAKLEVKFSWFMPSAPYWILATDYENYALVYSCTCIIQLFHVDFAWILARNPNLPPETVDSLKNILTSNNIDVKKMTVTDQVNCPKLS

SEQ ID NO: 975 - protein, 216 aa, Homo sapiens
MKVLWAALLVTFLAGCQAKVEQAVETEPEPELRQQTEWQSGQRWELALGRFWDYLRWVQTLSEQVQEELLSSQVTQELRALMDETMKELKAYKSELEEQLTPVAEETRARLSKELQAAQARLGADMEDVCGRLVQYRGEVQAMLGQSTEELRVRLASHLRKLRKRLLRDADDLQKRLAVYQAGAREGAERGLSAIRERLGPLVEQGRVRAATVGSL

SEQ ID NO: 976 - protein, 219 aa, Homo sapiens
MKVLWAALLVTFLAGCQAKVEQAVETEPEPELRQQTEWQSGQRWELALGRFWDYLRWVQTLSEQVQEELLSSQVTQELRALMDETMKELKAYKSELEEQLTPVAEETRARLSKELQAAQARLGADMEDVCGRLVQYRGEVQAMLGQSTEELRVRLASHLRKLRKRLLRDADDLQKRLAVYQAGAREGAERGLSAIRERLGPLVEQGRVRAATVGSLAGQ

SEQ ID NO: 977 - protein, 317 aa, Homo sapiens [sequence omitted]

SEQ ID NO: 978 - protein, 269 aa, Homo sapiens
MSSGASRKSWDPGNPWPPDWPITGRKMKVLWAALLVTFLAGCQAKVEQAVETEPEPELRQQTEWQSGQRWELALGRFWDYLRWVQTLSEQVQEELLSSQVTQELRALMDETMKELKAYKSELEEQLTPVAEETRARLSKELQAAQARLGADMEDVCGRLVQYRGEVQAMLGQSTEELRVRLASHLRKLRKRLLRDADDLQKRLAVYQAGAREGAERGLSAIRERLGPLVEQGRVRAATVGSLAGQPLQERAQAWGERLRARMEEMGSRT

SEQ ID NO: 979 - protein, 326 aa, Homo sapiens
MTGLCGYSAPDMRGLRLIMIPVELLLCYLLLHPVDATSYGKQTNVLMHFPLSLESQTPSSDPLSCQFLHPKSLPGFSHMAPLPKFLVSLALRNALEEAGCQADVWALQLQLYRQGGVNATQVLIQHLRGLQKGRSTERNVSVEALASALQLLAREQQSTGRVGRSLPTEDCENEKEQAVHNVVQLLPGVGTFYNLGTALYYATQNCLGKARERGRDGAIDLGYDLLMTMAGMSGGPMGLAISAALKPALRSGVQQLIQYYQDQKDANISQPETTKEGLRAISDVSDLEETTTLASFISEVVSSAPYWGWAIIKSYDLDPGAGSLEI

SEQ ID NO: 980 - protein, 181 aa, Homo sapiens
MISPVLILFSSFLCHVAIAGRTCPKPDDLPFSTVVPLKTFYEPGEEITYSCKPGYVSRGGMRKFICPLTGLWPINTLKCTPRVCPFAGILENGAVRYTTFEYPNTISFSCNTGFYLNGADSAKCTEEGKWSPELPVCAPIICPPPSIPTFATLRVYKPSAGNNSLYRDTAVFECLPQHAMF

SEQ ID NO: 981 - protein, 345 aa, Homo sapiens
MISPVLILFSSFLCHVAIAGRTCPKPDDLPFSTVVPLKTFYEPGEEITYSCKPGYVSRGGMRKFICPLTGLWPINTLKCTPRVCPFAGILENGAVRYTTFEYPNTISFSCNTGFYLNGADSAKCTEEGKWSPELPVCAPIICPPPSIPTFATLRVYKPSAGNNSLYRDTAVFECLPQHAMFGNDTITCTTHGNWTKLPECREVKCPFPSRPDNGFVNYPAKPTLYYKDKATFGCHDGYSLDGPEEIECTKLGNWSAMPSCKASCKVPVKKATVVYQGERVKIQEKFKNGMLHGDKVSFFCKNKEKKCSYTEDAQCIDGTIEVPKCFKEHSSLAFWKTDASDVKPC

SEQ ID NO: 982 - protein, 200 aa, Homo sapiens
MRKFICPLTGLWPINTLKCTPRVCPFAGILENGAVRYTTFEYPNTISFSCNTGFYLNGADSAKCTEEGKWSPELPVCAPIICPPPSIPTFATLRVYKPSAGNNSLYRDTAVFECLPQHAMFGNDTITCTTHGNWTKLPECREVKCPFPSRPDNGFVNYPAKPTLYYKDKATFGCHDGYSLDGPEEIECTKLGNWSAMPSC

SEQ ID NO: 983 - protein, 104 aa, Homo sapiens
  SITE 1: note = misc_feature - Xaa can be any naturally occurring amino acid
XQHAMFGNDTITCTTHGNWTKLPECREVKCPFPSRPDNGFVNYPAKPTLYYKDKATFGCHDGYSLDGPEEIECTKLGNWSAMPSCKEHSSLAFWKTDASDVKPC

SEQ ID NO: 984 - protein, 160 aa, Homo sapiens
MEGAALLRVSVLCIWMSALFLGVGVRAEEAGARVQQNVPSGTDTGDPQSKPLGDWAAGTMDPESSIFIEDAIKYFKEKVSTQNLLLLLTDNEAWNGFVAAAELPRNEADELRKALDNLARQMIMKDKNWHDKGQQYRNWFLKEFPRLKSELEDNIRRLRA

SEQ ID NO: 985 - protein, 398 aa, Homo sapiens
MEGAALLRVSVLCIWMSALFLGVGVRAEEAGARVQQNVPSGTDTGDPQSKPLGDWAAGTMDPESSIFIEDAIKYFKEKVSTQNLLLLLTDNEAWNGFVAAAELPRNEADELRKALDNLARQMIMKDKNWHDKGQQYRNWFLKEFPRLKSELEDNIRRLRALADGVQKVHKGTTIANVVSGSLSISSGILTLVGMGLAPFTEGGSLVLLEPGMELGITAALTGITSSTMDYGKKWWTQAQAHDLVIKSLDKLKEVREFLGENISNFLSLAGNTYQLTRGIGKDIRALRRARANLQSVPHASASRPRVTEPISAESGEQVERVNEPSILEMSRGVKLTDVAPVSFFLVLDVVYLVYESKHLHEGAKSETAEELKKVAQELEEKLNILNNNYKILQADQEL

SEQ ID NO: 986 - protein, 398 aa, Homo sapiens; identical to SEQ ID NO: 985

SEQ ID NO: 987 - protein, 398 aa, Homo sapiens; identical to SEQ ID NO: 985

SEQ ID NO: 988 - protein, 141 aa, Homo sapiens
MEGAALLRVSVLCIWMSALFLGVGVRAEEAGARVQQNVPSGTDTGDPQSKPLGDWAAGTMDPGPAGSRGDSGEPCTLRPACRGQRQHGGASRISAEGPAPMPRRRTPSTAHLRVPKTSRRNLLCMRAVSLLRMPLSISRKK

SEQ ID NO: 989 - protein, 141 aa, Homo sapiens; identical to SEQ ID NO: 988

SEQ ID NO: 990 - protein, 142 aa, Homo sapiens
MEGAALLRVSVLCIWMSALFLGVGVRAEEAGARVQQNVPSGTDTGDPQSKPLGDWAAGTMDPGPAGSRGDSGEPCTLRPACRGQRQHGGASRISAEGPAPMPRRRTPSTAHLRVPKTSRRNLLCMVVVLNAVEFETLFLNFK

SEQ ID NO: 991 - protein, 380 aa, Homo sapiens
MEGAALLRVSVLCIWVQQNVPSGTDTGDPQSKPLGDWAAGTMDPESSIFIEDAIKYFKEKVSTQNLLLLLTDNEAWNGFVAAAELPRNEADELRKALDNLARQMIMKDKNWHDKGQQYRNWFLKEFPRLKSELEDNIRRLRALADGVQKVHKGTTIANVVSGSLSISSGILTLVGMGLAPFTEGGSLVLLEPGMELGITAALTGITSSTMDYGKKWWTQAQAHDLVIKSLDKLKEVREFLGENISNFLSLAGNTYQLTRGIGKDIRALRRARANLQSVPHASASRPRVTEPISAESGEQVERVNEPSILEMSRGVKLTDVAPVSFFLVLDVVYLVYESKHLHEGAKSETAEELKKVAQELEEKLNILNNNYKILQADQEL

SEQ ID NO: 992 - protein, 123 aa, Homo sapiens
MEGAALLRVSVLCIWVQQNVPSGTDTGDPQSKPLGDWAAGTMDPGPAGSRGDSGEPCTLRPACRGQRQHGGASRISAEGPAPMPRRRTPSTAHLRVPKTSRRNLLCMRAVSLLRMPLSISRKK

SEQ ID NO: 993 - protein, 414 aa, Homo sapiens
MRFKSHTVELRRPCSDMEGAALLRVSVLCIWMSALFLGVGVRAEEAGARVQQNVPSGTDTGDPQSKPLGDWAAGTMDPESSIFIEDAIKYFKEKVSTQNLLLLLTDNEAWNGFVAAAELPRNEADELRKALDNLARQMIMKDKNWHDKGQQYRNWFLKEFPRLKSELEDNIRRLRALADGVQKVHKGTTIANVVSGSLSISSGILTLVGMGLAPFTEGGSLVLLEPGMELGITAALTGITSSTMDYGKKWWTQAQAHDLVIKSLDKLKEVREFLGENISNFLSLAGNTYQLTRGIGKDIRALRRARANLQSVPHASASRPRVTEPISAESGEQVERVNEPSILEMSRGVKLTDVAPVSFFLVLDVVYLVYESKHLHEGAKSETAEELKKVAQELEEKLNILNNNYKILQADQEL

SEQ ID NO: 994 - protein, 118 aa, Homo sapiens
MRFKSHTVELRSTLSQPLFSCSRRRPCSDMEGAALLRVSVLCIWMSALFLGVGVRAEEAGARVQQNVPSGTDTGDPQSKPLGDWAAGTMDPESSIFIEDAIKYFKEKVSTQNLLLLLT

SEQ ID NO: 995 - protein, 331 aa, Homo sapiens
MDSEKKRFTEEATKYFRERVSPVHLQILLTNNEAWKRFVTAAELPRDEADALYEALKKLRTYAAIEDEYVQQKDEQFREWFLKEFPQVKRKIQESIEKLRALANGIEEVHRGCTISNVVSSSTGAASGIMSLAGLVLAPFTAGTSLALTAAGVGLGAASAVTGITTSIVEHSYTSSAEAEASRLTATSIDRLKVFKEVMRDITPNLLSLLNNYYEATQTIGSEIRAIRQARARARLPVTTWRISAGSGGQAERTIAGTTRAVSRGARILSATTSGIFLALDVVNLVYESKHLHEGAKSASAEELRRQAQELEENLMELTQIYQRLNPCHTH

SEQ ID NO: 996 - protein, 402 aa, Homo sapiens
MGLGQGWGWEASCFACLIRSCCQVVTFTFPFGFQGISQSLENVSGYYADARLEVGSTQLRTAGSCSHSFKRSFLEKKRFTEEATKYFRERVSPVHLQILLTNNEAWKRFVTAAELPRDEADALYEALKKLRTYAAIEDEYVQQKDEQFREWFLKEFPQVKRKIQESIEKLRALANGIEEVHRGCTISNVVSSSTGAASGIMSLAGLVLAPFTAGTSLALTAAGVGLGAASAVTGITTSIVEHSYTSSAEAEASRLTATSIDRLKVFKEVMRDITPNLLSLLNNYYEATQTIGSEIRAIRQARARARLPVTTWRISAGSGGQAERTIAGTTRAVSRGARILSATTSGIFLALDVVNLVYESKHLHEGAKSASAEELRRQAQELEENLMELTQIYQRLNPCHTH

SEQ ID NO: 997 - protein, 97 aa, Homo sapiens
MGLGQGWGWEASCFACLIRSCCQVVTFTFPFGFQGISQSLENVSGYYADARLEVGSTQLRTAGSCSHSFKRSFLGLRKKTNPSSQVSDWRAPWKVSQ

SEQ ID NO: 998 - protein, 82 aa, Homo sapiens
MGLGQGWGWEASCFACLIRSCCQVVTFTFPFGFQGISQSLENVSGYYADARLEVGSTQLRTAGSCSHSFKRSFLGQKDPALV

SEQ ID NO: 999 - protein, 82 aa, Homo sapiens; identical to SEQ ID NO: 998

SEQ ID NO: 1000 - protein, 202 aa, Homo sapiens
MSLAGLVLAPFTAGTSLALTAAGVGLGAASAVTGITTSIVEHSYTSSAEAEASRLTATSIDRLKVFKEVMRDITPNLLSLLNNYYEATQTIGSEIRAIRQARARARLPVTTWRISAGSGGQAERTIAGTTRAVSRGARILSATTSGIFLALDVVNLVYESKHLHEGAKSASAEELRRQAQELEENLMELTQIYQRLNPCHTH

SEQ ID NO: 1001 - protein, 202 aa, Homo sapiens; identical to SEQ ID NO: 1000

SEQ ID NO: 1002 - protein, 202 aa, Homo sapiens; identical to SEQ ID NO: 1000

SEQ ID NO: 1003 - protein, 40 aa, Homo sapiens
SQSLENVSGYYADARLEVGSTQLRTAGSCSHSFKRSFLGE

SEQ ID NO: 1004 - protein, 39 aa, Homo sapiens
  SITE 1: note = misc_feature - Xaa can be any naturally occurring amino acid
XYADARLEVGSTQLRTAGSCSHSFKRSFLAWLPQPPRFL

SEQ ID NO: 1005 - protein, 86 aa, Homo sapiens
  SITE 1: note = misc_feature - Xaa can be any naturally occurring amino acid
XYADARLEVGSTQLRTAGSCSHSFKRSFLAWWYVPVGTTTWEVEAEASLAARTYRQKQGGQRVSSTAPVNSPRQTLGHRVQDTDLE

SEQ ID NO: 1006 - protein, 33 aa, Homo sapiens
  SITE 1: note = misc_feature - Xaa can be any naturally occurring amino acid
XYADARLEVGSTQLRTAGSCSHSFKRSFLEMSI

SEQ ID NO: 1007 - protein, 52 aa, Homo sapiens
  SITE 1: note = misc_feature - Xaa can be any naturally occurring amino acid
XYADARLEVGSTQLRTAGSCSHSFKRSFLGLRKKTNPSSQVSDWRAPWKVSQ

SEQ ID NO: 1008 - protein, 52 aa, Homo sapiens; identical to SEQ ID NO: 1007
  SITE 1: note = misc_feature - Xaa can be any naturally occurring amino acid

SEQ ID NO: 1009 - protein, 37 aa, Homo sapiens
  SITE 1: note = misc_feature - Xaa can be any naturally occurring amino acid
XYADARLEVGSTQLRTAGSCSHSFKRSFLGQKDPALV

SEQ ID NO: 1010 - protein, 116 aa, Homo sapiens
MAAGSAPMQLHLRATIRMKDGLCVPRKWIYHLTEGSTDLRTEGRPDMKTELFSSSCPGGIMLNETGQGYQRFLLYNRSPHPPEKCVEEFKSLTSCLDSKAFLLTPRNQEACELSNN

SEQ ID NO: 1011 - protein, 129 aa, Homo sapiens
MAAGSAPMQLHLRATIRMKDGLCVPRKWIYHLTEGSTDLRTEGRPDMKTELFSSSCPGGIMLNETGQGYQRFLLYNRSPHPPEKCVEEFKSLTSCLDSKAFLLTPRNQGKGLKSHKTGLGLTKSSGVTG

SEQ ID NO: 1012 - protein, 188 aa, Homo sapiens
MFHQIWAALLYFYGIILNSIYQCPEHSQLTTLGVDGKEFPEVHLGQWYFIAGAAPTKEELATFDPVDNIVFNMAAGSAPMQLHLRATIRMKDGLCVPRKWIYHLTEGSTDLRTEGRPDMKTELFSSSCPGGIMLNETGQGYQRFLLYNRSPHPPEKCVEEFKSLTSCLDSKAFLLTPRNQEACELSNN

SEQ ID NO: 1013 - protein, 268 aa, Homo sapiens
MAAIRMGKLTTMPAGLIYASVSVHAAKQEESKKQLVKPEQLPIYTAPPLQSKYVEEQPGHLQMGFASIRTATGCYIGWCKGVYVFVKNGIMDTVQFGKDAYVYLKNPPRDFLPKMGVITVSGLAGLVSARKGSKFKKITYPLGLATLGATVCYPVQSVIIAKVTAKKVYATSQQIFGAVKSLWTKSSKEESLPKPKEKTKLGSSSEIEVPAKTTHVLKHSVPLPTELSSEAKTKSESTSGATQFMPDPKLMDHGQSHPEDIDMYSTRS

SEQ ID NO: 1014 - protein, 263 aa, Homo sapiens [sequence omitted]

SEQ ID NO: 1015 - protein, 268 aa, Homo sapiens [sequence omitted]

SEQ ID NO: 1016 - protein, 552 aa, Homo sapiens
MAECNLVAILISSIDNPLDKNLDNGGNSCLDFRPLNSFSQPQVLLAAAVCTKAGKAIVSRQFVEMTRTRIEGLLAAFPKLMNTGKQHTFVETESVRYVYQPMEKLYMVLITTKNSNILEDLETLRLFSRVIPEYCRALEENEISEHCFDLIFAFDEIVALGYRENVNLAQIRTFTEMDSHEEKVFRAVRETQEREAKAEMRRKAKELQQARRDAERQGKKAPGFGGFGSSAVSGGSTAAMITETIIETDKPKVAPAPARPSGPSKALKLGAKGKEVDNFVDKLKSEGETIMSSSMGKRTSEATKMHAPPINMESVHMKIEEKITLTCGRDGGLQNMELHGMIMLRISDDKYGRIRLHVENEDKKGVQLQTHPNVDKKLFTAESLIGLKNPEKSFPVNSDVGVLKWRLQTTEESFIPLTINCWPSESGNGCDVNIEYELQEDNLELNDVVITIPLPSGVGAPVIGEIDGEYRHDSRRNTLEWCLPVIDAKNKSGSLEFSIAGQPNDFFPVQVSFVSKKNYCNIQVTKVTQVDGNSPVRFSTETTFLVDKYEIL

SEQ ID NO: 1017 - protein, 423 aa, Homo sapiens
MIPEYCRALEENEISEHCFDLIFAFDEIVALGYRENVNLAQIRTFTEMDSHEEKVFRAVRETQEREAKAEMRRKAKELQQARRDAERQGKKAPGFGGFGSSAVSGGSTAAMITETIIETDKPKVAPAPARPSGPSKALKLGAKGKEVDNFVDKLKSEGETIMSSSMGKRTSEATKMHAPPINMESVHMKIEEKITLTCGRDGGLQNMELHGMIMLRISDDKYGRIRLHVENEDKKGVQLQTHPNVDKKLFTAESLIGLKNPEKSFPVNSDVGVLKWRLQTTEESFIPLTINCWPSESGNGCDVNIEYELQEDNLELNDVVITIPLPSGVGAPVIGEIDGEYRHDSRRNTLEWCLPVIDAKNKSGSLEFSIAGQPNDFFPVQVSFVSKKNYCNIQVTKVTQVDGNSPVRFSTETTFLVDKYEIL

SEQ ID NO: 1018 - protein, 83 aa, Homo sapiens
MVLLAAAVCTKAGKAIVSRQFVEMTRTRIEGLLAAFPKLMNTGKQHTFVETESIRMSSVLFPYQFIPSSLCQVVFLSGPVLPV

SEQ ID NO: 1019 - protein, 189 aa, Homo sapiens
MVLLAAAVCTKAGKAIVSRQFVEMTRTRIEGLLAAFPKLMNTGKQHTFVETESVRYVYQPMEKLYMVLITTKNSNILEDLETLRLFSRVIPEYCRALEENEISEHCFDLIFAFDEIVALGYRENVNLAQIRTFTEMDSHEEKVFRAVRETQEREAKAEMRRKAKELQQAQSVGITGMSHHAQLLLYFNP

SEQ ID NO: 1020 - protein, 511 aa, Homo sapiens
MVLLAAAVCTKAGKAIVSRQFVEMTRTRIEGLLAAFPKLMNTGKQHTFVETESVRYVYQPMEKLYMVLITTKNSNILEDLETLRLFSRVIPEYCRALEENEISEHCFDLIFAFDEIVALGYRENVNLAQIRTFTEMDSHEEKVFRAVRETQEREAKAEMRRKAKELQQARRDAERQGKKAPGFGGFGSSAVSGGSTAAMITETIIETDKPKVAPAPARPSGPSKALKLGAKGKEVDNFVDKLKSEGETIMSSSMGKRTSEATKMHAPPINMESVHMKIEEKITLTCGRDGGLQNMELHGMIMLRISDDKYGRIRLHVENEDKKGVQLQTHPNVDKKLFTAESLIGLKNPEKSFPVNSDVGVLKWRLQTTEESFIPLTINCWPSESGNGCDVNIEYELQEDNLELNDVVITIPLPSGVGAPVIGEIDGEYRHDSRRNTLEWCLPVIDAKNKSGSLEFSIAGQPNDFFPVQVSFVSKKNYCNIQVTKVTQVDGNSPVRFSTETTFLVDKYEIL

SEQ ID NO: 1021 - protein, 256 aa, Homo sapiens
MKPALCLVAMGALVMDSSPQCTKQLLSERFGRGSRTVDLELELQIELLRETKRKYESVLQLGRALTAHLYSLLQTQHALGDAFADLSQKSPELQEEFGYNAETQKLLCKNGETLLGAVNFFVSSINTLVTKTMEDTLMTVKQYEAARLEYDAYRTDLEELSLGPRDAGTRGRLESAQATFQAHRDKYEKLRGDVAIKLKFLEENKIKVMHKQLLLFHNAVSAYFAGNQKQLEQTLQQFNIKLRPPGAEKPSWLEEQ

SEQ ID NO: 1022 - protein, 374 aa, Homo sapiens
MTDGILGKAATMEIPIHGNGEARQLPEDDGLEQDLQQVMVSGPNLNETSIVSGGYGGSGDGLIPTGKSISCARREVWVGPQRCLVYLREAGVRELDPLGSGRHPSHSTTPSGPGDEVARGIAGEKFDIVKKWGINTYKCTKQLLSERFGRGSRTVDLELELQIELLRETKRKYESVLQLGRALTAHLYSLLQTQHALGDAFADLSQKSPELQEEFGYNAETQKLLCKNGETLLGAVNFFVSSINTLVTKTMEDTLMTVKQYEAARLEYDAYRTDLEELSLGPRDAGTRGRLESAQATFQAHRDKYEKLRGDVAIKLKFLEENKIKVMHKQLLLFHNAVSAYFAGNQKQLEQTLQQFNIKLRPPGAEKPSWLEEQ

SEQ ID NO: 1023 - protein, 159 aa, Homo sapiens
MTDGILGKAATMEIPIHGNGEARQLPEDDGLEQDLQQVMVSGPNLNETSIVSGGYGGSGDGLIPTGSGRHPSHSTTPSGPGDEVARGIAGEKFDIVKKWGINTYKCTKQLLSERFGRGSRTVDLELELQIELLRETKRKRNLATMQRHRNYYARMGKRC

SEQ ID NO: 1024 - protein, 341 aa, Homo sapiens
MTDGILGKAATMEIPIHGNGEARQLPEDDGLEQDLQQVMVSGPNLNETSIVSGGYGGSGDGLIPTGSGRHPSHSTTPSGPGDEVARGIAGEKFDIVKKWGINTYKCTKQLLSERFGRGSRTVDLELELQIELLRETKRKYESVLQLGRALTAHLYSLLQTQHALGDAFADLSQKSPELQEEFGYNAETQKLLCKNGETLLGAVNFFVSSINTLVTKTMEDTLMTVKQYEAARLEYDAYRTDLEELSLGPRDAGTRGRLESAQATFQAHRDKYEKLRGDVAIKLKFLEENKIKVMHKQLLLFHNAVSAYFAGNQKQLEQTLQQFNIKLRPPGAEKPSWLEEQ

SEQ ID NO: 1025 - protein, 341 aa, Homo sapiens; identical to SEQ ID NO: 1024

SEQ ID NO: 1026 - protein, 202 aa, Homo sapiens
MTDGILGKAATMEIPIHGNGEARQLPEDDGLEQDLQQVMVSGPNLNETSIVSGGYGGSGDGLIPTGSGRHPSHSTTPSGPGDEVARGIAGEKFDIVKKWGINTYKCTKQLLSERFGRGSRTVDLELELQIELLRETKRKYESVLQLGRALTAHLYSLLQTQHALGDAFADLSQKSPELQPTGRTPSGWAQPYPQQHSPVEAA

SEQ ID NO: 1027 - protein, 303 aa, Homo sapiens
MVSGPNLNETSIVSGGYGGSGDGLIPTGSGRHPSHSTTPSGPGDEVARGIAGEKFDIVKKWGINTYKCTKQLLSERFGRGSRTVDLELELQIELLRETKRKYESVLQLGRALTAHLYSLLQTQHALGDAFADLSQKSPELQEEFGYNAETQKLLCKNGETLLGAVNFFVSSINTLVTKTMEDTLMTVKQYEAARLEYDAYRTDLEELSLGPRDAGTRGRLESAQATFQAHRDKYEKLRGDVAIKLKFLEENKIKVMHKQLLLFHNAVSAYFAGNQKQLEQTLQQFNIKLRPPGAEKPSWLEEQ

SEQ ID NO: 1028 - protein, 535 aa, Homo sapiens
MAWILDCLFASAFEPRPRRVSVLGGAPGHNPDRRTKMVSIHSLSELERLKLQETAYHELVARHFLSEFKPDRALPIDRPNTLDKWFLILRGQQRAVSHKTFGISLEEVLVNEFTRRKHLELTATMQVEEATGQAAGRRRGNVVRRVFGRIRRFFSRRRNEPTLPREFTRRGRRGAVSVDSLAELEDGALLLQTLQLSKISFPIGQRLLGSKRKMSLNPIAKQIPQVVEACCQFIEKHGLSAVGIFTLEYSVQRVRQLREEFDQGLDVVLDDNQNVHDVAALLKEFFRDMKDSLLPDDLYMSFLLTATLKPQDQLSALQLLVYLMPPCHSDTLERLLKALHKITENCEDSIGIDGQLVPGNRMTSTNLALVFGSALLKKGKFGKRESRKTKLGIDHYVASVNVVRAMIDNWDVLFQVPPHIQRQVAKRVWKSSPEALDFIRRRNLRKIQSARIKMEEDALLSDPVETSAEARAAVLAQSKPSDEGSSEEPAVPSGTARSHDDEEGAGNPPIPEQDRPLLRVPREKEAKTGVSYFFP

SEQ ID NO: 1029 - protein, 547 aa, Homo sapiens
MGGCIPFLKAARALCPRIMPPLLLLSAFIFLVSVLGGAPGHNPDRRTKMVSIHSLSELERLKLQETAYHELVARHFLSEFKPDRALPIDRPNTLDKWFLILRGQQRAVSHKTFGISLEEVLVNEFTRRKHLELTATMQVEEATGQAAGRRRGNVVRRVFGRIRRFFSRRRNEPTLPREFTRRGRRGAVSVDSLAELEDGALLLQTLQLSKISFPIGQRLLGSKRKMSLNPIAKQIPQVVEACCQFIEKHGLSAVGIFTLEYSVQRVRQLREEFDQGLDVVLDDNQNVHDVAALLKEFFRDMKDSLLPDDLYMSFLLTATLKPQDQLSALQLLVYLMPPCHSDTLERLLKALHKITENCEDSIGIDGQLVPGNRMTSTNLALVFGSALLKKGKFGKRESRKTKLGIDHYVASVNVVRAMIDNWDVLFQVPPHIQRQVAKRVWKSSPEALDFIRRRNLRKIQSARIKMEEDALLSDPVETSAEARAAVLAQSKPSDEGSSEEPAVPSGTARSHDDEEGAGNPPIPEQDRPLLRVPREKEAKTGVSYFFP

SEQ ID NO: 1030 - protein, 411 aa, Homo sapiens
MQVEEATGQAAGRRRGNVVRRVFGRIRRFFSRRRNEPTLPREFTRRGRRGAVSVDSLAELEDGALLLQTLQLSKISFPIGQRLLGSKRKMSLNPIAKQIPQVVEACCQFIEKHGLSAVGIFTLEYSVQRVRQLREEFDQGLDVVLDDNQNVHDVAALLKEFFRDMKDSLLPDDLYMSFLLTATLKPQDQLSALQLLVYLMPPCHSDTLERLLKALHKITENCEDSIGIDGQLVPGNRMTSTNLALVFGSALLKKGKFGKRESRKTKLGIDHYVASVNVVRAMIDNWDVLFQVPPHIQRQVAKRVWKSSPEALDFIRRRNLRKIQSARIKMEEDALLSDPVETSAEARAAVLAQSKPSDEGSSEEPAVPSGTARSHDDEEGAGNPPIPEQDRPLLRVPREKEAKTGVSYFFP

SEQ ID NO: 1031 - protein, 411 aa, Homo sapiens; identical to SEQ ID NO: 1030

SEQ ID NO: 1032 - protein, 516 aa, Homo sapiens
MSVLGGAPGHNPDRRTKMVSIHSLSELERLKLQETAYHELVARHFLSEFKPDRALPIDRPNTLDKWFLILRGQQRAVSHKTFGISLEEVLVNEFTRRKHLELTATMQVEEATGQAAGRRRGNVVRRVFGRIRRFFSRRRNEPTLPREFTRRGRRGAVSVDSLAELEDGALLLQTLQLSKISFPIGQRLLGSKRKMSLNPIAKQIPQVVEACCQFIEKHGLSAVGIFTLEYSVQRVRQLREEFDQGLDVVLDDNQNVHDVAALLKEFFRDMKDSLLPDDLYMSFLLTATLKPQDQLSALQLLVYLMPPCHSDTLERLLKALHKITENCEDSIGIDGQLVPGNRMTSTNLALVFGSALLKKGKFGKRESRKTKLGIDHYVASVNVVRAMIDNWDVLFQVPPHIQRQVAKRVWKSSPEALDFIRRRNLRKIQSARIKMEEDALLSDPVETSAEARAAVLAQSKPSDEGSSEEPAVPSGTARSHDDEEGAGNPPIPEQDRPLLRVPREKEAKTGVSYFFP

SEQ ID NO: 1033 - protein, 218 aa, Homo sapiens
MVSIHSLSELERLKLQETAYHELVARHFLSEFKPDRALPIDRPNTLDKWFLILRGQQRAVSHKTFGISLEEVLVNEFTRRKHLELTATMQVEEATGQAAGRRRGNVVRRVFGRIRRFFSRRRNEPTLPREFTRRGRRGAVSVDSLAELEDGALLLQTLQLSKISFPIGQRLLGSKRKMSLNPIAKQIPQVVEACCQFIEKHGLSAVGIFTLEYSVQRV

SEQ ID NO: 1034 - protein, 78 aa, Homo sapiens
GRQDGSESEAVAVALAGRLRELLRDLPPENRASLQYLLRHLRRPASSRLSSSTTAWSSRRSRRRPPGARTSHPTSELR

SEQ ID NO: 1035 - protein, 1019 aa, Homo sapiens
MCICGTAHPVLDEGPVRCRAGPRDLLEARRPRAHECLGEALRVMHQIISKYPLLNTVETLTAAGTLIAKVKAFHYESNNDLEKQEFEKALETIAVAFSSTVSEFLMGEVDSSTLLAVPPGDSSQSMESLYGPGSEGTPPSLEDCDAGCLPAEEVDVLLQRCEGGVDAALLYAKNMAKYMKDLISYLEKRTTLEMEFAKGLQKIAHNCRQSVMQEPHMPLLSIYSLALEQDLEFGHSMVQAVGTLQTQTFMQPLTLRRLEHEKRRKEIKEAWHRAQRKLQEAESNLRKAKQGYVQRCEDHDKARFLVAKAEEEQAGSAPGAGSTATKTLDKRRRLEEEAKNKAEEAMATYRTCVADAKTQKQELEDTKVTALRQIQEVIRQSDQTIKSATISYYQMMHMQTAPLPVHFQMLCESSKLYDPGQQYASHVRQLQRDQEPDVHYDFEPHVSANAWSPVMRARKSSFNVSDVARPEAAGSPPEEGGCTEGTPAKDHRAGRGHQVHKSWPLSISDSDSGLDPGPGAGDFKKFERTSSSGTMSSTEELVDPDGGAGASAFEQADLNGMTPELPVAVPSGPFRHEGLSKAARTHRLRKLRTPAKCRECNSYVYFQGAECEECCLACHKKCLETLAIQCGHKKLQGRLQLFGQDFSHAARSAPDGVPFIVKKCVCEIERRALRTKGIYRVNGVKTRVEKLCQAFENGKELVELSQASPHDISNVLKLYLRQLPEPLISFRLYHELVGLAKDSLKAEAEAKAASRGRQDGSESEAVAVALAGRLRELLRDLPPENRASLQYLLRHLRRIVEVEQDNKMTPGNLGIVFGPTLLRPRPTEATVSLSSLVDYPHQARVIETLIVHYGLVFEEEPEETPGGQDESSNQRAEVVVQVPYLEAGEAVVYPLQEAAADGCRESRVVSNDSDSDLEEASELLSSSEASALGHLSFLEQQQSEASLEVASGSHSGSEEQLEATAREDGDGDEDGPAQQLSGFNTNQSNNVLQAPLPPMRLRGGRMTLGSCRERQPEFV

SEQ ID NO: 1036 - protein, 1136 aa, Homo sapiens
MFSRKKRELMKTPSISKKNRAGSPSPQPSGELPRKDGADAVFPGPSLEPPAGSSGVKATGTLKRPTSLSRHASAAGFPLSGAASWTLGRSHRSPLTAASPGELPTEGAGPDVVEDISHLLADVARFAEGLEKLKECVLRDDLLEARRPRAHECLGEALRVMHQIISKYPLLNTVETLTAAGTLIAKVKAFHYESNNDLEKQEFEKALETIAVAFSSTVSEFLMGEVDSSTLLAVPPGDSSQSMESLYGPGSEGTPPSLEDCDAGCLPAEEVDVLLQRCEGGVDAALLYAKNMAKYMKDLISYLEKRTTLEMEFAKGLQKIAHNCRQSVMQEPHMPLLSIYSLALEQDLEFGHSMVQAVGTLQTQTFMQPLTLRRLEHEKRRKEIKEAWHRAQRKLQEAESNLRKAKQGYVQRCEDHDKARFLVAKAEEEQAGSAPGAGSTATKTLDKRRRLEEEAKNKAEEAMATYRTCVADAKTQKQELEDTKVTALRQIQEVIRQSDQTIKSATISYYQMMHMQTAPLPVHFQMLCESSKLYDPGQQYASHVRQLQRDQEPDVHYDFEPHVSANAWSPVMRARKSSFNVSDVARPEAAGSPPEEGGCTEGTPAKDHRAGRGHQVHKSWPLSISDSDSGLDPGPGAGDFKKFERTSSSGTMSSTEELVDPDGGAGASAFEQADLNGMTPELPVAVPSGPFRHEGLSKAARTHRLRKLRTPAKCRECNSYVYFQGAECEECCLACHKKCLETLAIQCGHKKLQGRLQLFGQDFSHAARSAPDGVPFIVKKCVCEIERRALRTKGIYRVNGVKTRVEKLCQAFENGKELVELSQASPHDISNVLKLYLRQLPEPLISFRLYHELVGLAKDSLKAEAEAKAASRGRQDGSESEAVAVALAGRLRELLRDLPPENRASLQYLLRHLRRIVEVEQDNKMTPGNLGIVFGPTLLRPRPTEATVSLSSLVDYPHQARVIETLIVHYGLVFEEEPEETPGGQDESSNQRAEVVVQVPYLEAGEAVVYPLQEAAADGCRESRVVSNDSDSDLEEASELLSSSEASALGHLSFLEQQQSEASLEVASGSHSGSEEQLEATAREDGDGDEDGPAQQLSGFNTNQSNNVLQAPLPPMRLRGGRMTLGSCRERQPEFV

SEQ ID NO: 1037 - protein, 1163 aa, Homo sapiens
MFSRKKRELMKTPSISKKNRAGSPSPQPSGPHFISGETEAVSRPENPFNELPSDLPKELPRKDGADAVFPGPSLEPPAGSSGVKATGTLKRPTSLSRHASAAGFPLSGAASWTLGRSHRSPLTAASPGELPTEGAGPDVVEDISHLLADVARFAEGLEKLKECVLRDDLLEARRPRAHECLGEALRVMHQIISKYPLLNTVETLTAAGTLIAKVKAFHYESNNDLEKQEFEKALETIAVAFSSTVSEFLMGEVDSSTLLAVPPGDSSQSMESLYGPGSEGTPPSLEDCDAGCLPAEEVDVLLQRCEGGVDAALLYAKNMAKYMKDLISYLEKRTTLEMEFAKGLQKIAHNCRQSVMQEPHMPLLSIYSLALEQDLEFGHSMVQAVGTLQTQTFMQPLTLRRLEHEKRRKEIKEAWHRAQRKLQEAESNLRKAKQGYVQRCEDHDKARFLVAKAEEEQAGSAPGAGSTATKTLDKRRRLEEEAKNKAEEAMATYRTCVADAKTQKQELEDTKVTALRQIQEVIRQSDQTIKSATISYYQMMHMQTAPLPVHFQMLCESSKLYDPGQQYASHVRQLQRDQEPDVHYDFEPHVSANAWSPVMRARKSSFNVSDVARPEAAGSPPEEGGCTEGTPAKDHRAGRGHQVHKSWPLSISDSDSGLDPGPGAGDFKKFERTSSSGTMSSTEELVDPDGGAGASAFEQADLNGMTPELPVAVPSGPFRHEGLSKAARTHRLRKLRTPAKCRECNSYVYFQGAECEECCLACHKKCLETLAIQCGHKKLQGRLQLFGQDFSHAARSAPDGVPFIVKKCVCEIERRALRTKGIYRVNGVKTRVEKLCQAFENGKELVELSQASPHDISNVLKLYLRQLPEPLISFRLYHELVGLAKDSLKAEAEAKAASRGRQDGSESEAVAVALAGRLRELLRDLPPENRASLQYLLRHLRRIVEVEQDNKMTPGNLGIVFGPTLLRPRPTEATVSLSSLVDYPHQARVIETLIVHYGLVFEEEPEETPGGQDESSNQRAEVVVQVPYLEAGEAVVYPLQEAAADGCRESRVVSNDSDSDLEEASELLSSSEASALGHLSFLEQQQSEASLEVASGSHSGSEEQLEATAREDGDGDEDGPAQQLSGFNTNQSNNVLQAPLPPMRLRGGRMTLGSCRERQPEFV

SEQ ID NO: 1038 - protein, 60 aa, Homo sapiens
MFSRKKRELMKTPSISKKNRAGSPSPQPSGTSLRPAARGPTSAWVRLCVSCIRSSPSTRC

SEQ ID NO: 1039 - protein, 771 aa, Homo sapiens
MGVGRKGGAGETESHPRIGLELASWLPHPQQEAESNLRKAKQGYVQRCEDHDKARFLVAKAEEEQAGSAPGAGSTATKTLDKRRRLEEEAKNKAEEAMATYRTCVADAKTQKQELEDTKVTALRQIQEVIRQSDQTIKSATISYYQMMHMQTAPLPVHFQMLCESSKLYDPGQQYASHVRQLQRDQEPDVHYDFEPHVSANAWSPVMRARKSSFNVSDVARPEAAGSPPEEGGCTEGTPAKDHRAGRGHQVHKSWPLSISDSDSGLDPGPGAGDFKKFERTSSSGTMSSTEELVDPDGGAGASAFEQADLNGMTPELPVAVPSGPFRHEGLSKAARTHRLRKLRTPAKCRECNSYVYFQGAECEECCLACHKKCLETLAIQCGHKKLQGRLQLFGQDFSHAARSAPDGVPFIVKKCVCEIERRALRTKGIYRVNGVKTRVEKLCQAFENGKELVELSQASPHDISNVLKLYLRQLPEPLISFRLYHELVGLAKDSLKAEAEAKAASRGRQDGSESEAVAVALAGRLRELLRDLPPENRASLQYLLRHLRRIVEVEQDNKMTPGNLGIVFGPTLLRPRPTEATVSLSSLVDYPHQARVIETLIVHYGLVFEEEPEETPGGQDESSNQRAEVVVQVPYLEAGEAVVYPLQEAAADGCRESRVVSNDSDSDLEEASELLSSSEASALGHLSFLEQQQSEASLEVASGSHSGSEEQLEATAREDGDGDEDGPAQQLSGFNTNQSNNVLQAPLPPMRLRGGRMTLGSCRERQPEFV

SEQ ID NO: 1040 - protein, 1140 aa, Homo sapiens
MLGRRLGARASYSPYRAGRQGPQQRGRDPGIQLTELPRKDGADAVFPGPSLEPPAGSSGVKATGTLKRPTSLSRHASAAGFPLSGAASWTLGRSHRSPLTAASPGELPTEGAGPDVVEDISHLLADVARFAEGLEKLKECVLRDDLLEARRPRAHECLGEALRVMHQIISKYPLLNTVETLTAAGTLIAKVKAFHYESNNDLEKQEFEKALETIAVAFSSTVSEFLMGEVDSSTLLAVPPGDSSQSMESLYGPGSEGTPPSLEDCDAGCLPAEEVDVLLQRCEGGVDAALLYAKNMAKYMKDLISYLEKRTTLEMEFAKGLQKIAHNCRQSVMQEPHMPLLSIYSLALEQDLEFGHSMVQAVGTLQTQTFMQPLTLRRLEHEKRRKEIKEAWHRAQRKLQEAESNLRKAKQGYVQRCEDHDKARFLVAKAEEEQAGSAPGAGSTATKTLDKRRRLEEEAKNKAEEAMATYRTCVADAKTQKQELEDTKVTALRQIQEVIRQSDQTIKSATISYYQMMHMQTAPLPVHFQMLCESSKLYDPGQQYASHVRQLQRDQEPDVHYDFEPHVSANAWSPVMRARKSSFNVSDVARPEAAGSPPEEGGCTEGTPAKDHRAGRGHQVHKSWPLSISDSDSGLDPGPGAGDFKKFERTSSSGTMSSTEELVDPDGGAGASAFEQADLNGMTPELPVAVPSGPFRHEGLSKAARTHRLRKLRTPAKCRECNSYVYFQGAECEECCLACHKKCLETLAIQCGHKKLQGRLQLFGQDFSHAARSAPDGVPFIVKKCVCEIERRALRTKGIYRVNGVKTRVEKLCQAFENGKELVELSQASPHDISNVLKLYLRQLPEPLISFRLYHELVGLAKDSLKAEAEAKAASRGRQDGSESEAVAVALAGRLRELLRDLPPENRASLQYLLRHLRRIVEVEQDNKMTPGNLGIVFGPTLLRPRPTEATVSLSSLVDYPHQARVIETLIVHYGLVFEEEPEETPGGQDESSNQRAEVVVQVPYLEAGEAVVYPLQEAAADGCRESRVVSNDSDSDLEEASELLSSSEASALGHLSFLEQQQSEASLEVASGSHSGSEEQLEATAREDGDGDEDGPAQQLSGFNTNQSNNVLQAPLPPMRLRGGRMTLGSCRERQPEFV

SEQ ID NO: 1041 - protein, 1152 aa, Homo sapiens
MSRGQRVLKGLLGWVCTWTWAWRARLGARGCGLHVLCPRDLPLPPEELPRKDGADAVFPGPSLEPPAGSSGVKATGTLKRPTSLSRHASAAGFPLSGAASWTLGRSHRSPLTAASPGELPTEGAGPDVVEDISHLLADVARFAEGLEKLKECVLRDDLLEARRPRAHECLGEALRVMHQIISKYPLLNTVETLTAAGTLIAKVKAFHYESNNDLEKQEFEKALETIAVAFSSTVSEFLMGEVDSSTLLAVPPGDSSQSMESLYGPGSEGTPPSLEDCDAGCLPAEEVDVLLQRCEGGVDAALLYAKNMAKYMKDLISYLEKRTTLEMEFAKGLQKIAHNCRQSVMQEPHMPLLSIYSLALEQDLEFGHSMVQAVGTLQTQTFMQPLTLRRLEHEKRRKEIKEAWHRAQRKLQEAESNLRKAKQGYVQRCEDHDKARFLVAKAEEEQAGSAPGAGSTATKTLDKRRRLEEEAKNKAEEAMATYRTCVADAKTQKQELEDTKVTALRQIQEVIRQSDQTIKSATISYYQMMHMQTAPLPVHFQMLCESSKLYDPGQQYASHVRQLQRDQEPDVHYDFEPHVSANAWSPVMRARKSSFNVSDVARPEAAGSPPEEGGCTEGTPAKDHRAGRGHQVHKSWPLSISDSDSGLDPGPGAGDFKKFERTSSSGTMSSTEELVDPDGGAGASAFEQADLNGMTPELPVAVPSGPFRHEGLSKAARTHRLRKLRTPAKCRECNSYVYFQGAECEECCLACHKKCLETLAIQCGHKKLQGRLQLFGQDFSHAARSAPDGVPFIVKKCVCEIERRALRTKGIYRVNGVKTRVEKLCQAFENGKELVELSQASPHDISNVLKLYLRQLPEPLISFRLYHELVGLAKDSLKAEAEAKAASRGRQDGSESEAVAVALAGRLRELLRDLPPENRASLQYLLRHLRRIVEVEQDNKMTPGNLGIVFGPTLLRPRPTEATVSLSSLVDYPHQARVIETLIVHYGLVFEEEPEETPGGQDESSNQRAEVVVQVPYLEAGEAVVYPLQEAAADGCRESRVVSNDSDSDLEEASELLSSSEASALGHLSFLEQQQSEASLEVASGSHSGSEEQLEATAREDGDGDEDGPAQQLSGFNTNQSNNVLQAPLPPMRLRGGRMTLGSCRERQPEFV

SEQ ID NO: 1042 - protein, 170 aa, Homo sapiens
MVGSTPHFGDPCAGSPGPGGRGDPDGRGDPDGQGPELPRKDGADAVFPGPSLEPPAGSSGVKATGTLKRPTSLSRHASAAGFPLSGAASWTLGRSHRSPLTAASPGELPTEGAGPDVVEDISHLLADVARFAEGLEKLKECVLRDDLLEARRPRAHECLGEALRVMHQII

SEQ ID NO: 1043 - protein, 601 aa, Homo sapiens
LELYDLQILGTKPPMNSDTHRNFDPTATLRNQGDFTWNSMSGRSVRLRSVPIQSLSELERARLQEVAFYQLQQDCDLSCQITIPKDGQKRKKSLRKKLDSLGKEKNKDKEFIPQAFGMPLSQVIANDRAYKLKQDLQRDEQKDASDFVASLLPFGNKRQNKELSSSNSSLSSTSETPNESTSPNTPEPAPRARRRGAMSVDSITDLDDNQSRLLEALQLSLPAEAQSKKEKARDKKLSLNPIYRQVPRLVDSCCQHLEKHGLQTVGIFRVGSSKKRVRQLREEFDRGIDVSLEEEHSVHDVAALLKEFLRDMPDPLLTRELYTAFINTLLLEPEEQLGTLQLLIYLLPPCNCDTLHRLLQFLSIVARHADDNISKDGQEVTGNKMTSLNLATIFGPNLLHKQKSSDKEFSVQSSARAEESTAIIAVVQKMIENYEALFMVPPDLQNEVLISLLETDPDVVDYLLRRKASQSSSPDMLQSEVSFSVGGRHSSTDSNKASSGDISPYDNNSPVLSERSLLAMQEDAAPGGSEKLYRVPGQFMLVGHLSSSKSRESSPGPRLGKGNWSLASRRWPKQATLLLLHVAWCGALRTFSSSLPYLMFL

SEQ ID NO: 1044 - protein, 974 aa, Homo sapiens
MSAQSLLHSVFSCSSPASSSAASAKGFSKRKLRQTRSLDPALIGGCGSDEAGAEGSARGATAGRLYSPSLPAESLGPRLASSSRGPPPRATRLPPPGPLCSSFSTPSTPQEKSPSGSFHFDYEVPLGRGGLKKSMAWDLPSVLAGPASSRSASSILCSSGGGPNGIFASPRRWLQQRKFQSPPDSRGHPYVVWKSEGDFTWNSMSGRSVRLRSVPIQSLSELERARLQEVAFYQLQQDCDLSCQITIPKDGQKRKKSLRKKLDSLGKEKNKDKEFIPQAFGMPLSQVIANDRAYKLKQDLQRDEQKDASDFVASLLPFGNKRQNKELSSSNSSLSSTSETPNESTSPNTPEPAPRARRRGAMSVDSITDLDDNQSRLLEALQLSLPAEAQSKKEKARDKKLSLNPIYRQVPRLVDSCCQHLEKHGLQTVGIFRVGSSKKRVRQLREEFDRGIDVSLEEEHSVHDVAALLKEFLRDMPDPLLTRELYTAFINTLLLEPEEQLGTLQLLIYLLPPCNCDTLHRLLQFLSIVARHADDNISKDGQEVTGNKMTSLNLATIFGPNLLHKQKSSDKEFSVQSSARAEESTAIIAVVQKMIENYEALFMVPPDLQNEVLISLLETDPDVVDYLLRRKASQSSSPDMLQSEVSFSVGGRHSSTDSNKASSGDISPYDNNSPVLSERSLLAMQEDAAPGGSEKLYRVPGQFMLVGHLSSSKSRESSPGPRLGKDLSEEPFDIWGTWHSTLKSGSKDPGMTGSSGDIFESSSLRAGPCSLSQGNLSPNWPRWQGSPAELDSDTQGARRTQAAAPATEGRAHPAVSRACSTPHVQVAGKAERPTARSEQYLTLSGAHDLSESELDVAGLQSRATPQCQRPHGSGRDDKRPPPPYPGPGKPAAAAAWIQGPPEGVETPTDQGGQAAEREQQVTQKKLSSANSLPAGEQDSPRLGDAGWLDWQRERWQIWELLSTDNPDALPETLV

SEQ ID NO: 1045 - protein, 765 aa, Homo sapiens
MSAQSLLHSVFSCSSPASSSAASAKGFSKRKLRQTRSLDPALIGGCGSDEAGAEGSARGATAGRLYSPSLPAESLGPRLASSSRGPPPRATRLPPPGPLCSSFSTPSTPQEKSPSGSFHFDYEVPLGRGGLKKSMAWDLPSVLAGPASSRSASSILCSSGGGPNGIFASPRRWLQQRKFQSPPDSRGHPYVVWKSEGDFTWNSMSGRSVRLRSVPIQSLSELERARLQEVAFYQLQQDCDLSCQITIPKDGQKRKKSLRKKLDSLGKEKNKDKEFIPQAFGMPLSQVIANDRAYKLKQDLQRDEQKDASDFVASLLPFGNKRQNKELSSSNSSLSSTSETPNESTSPNTPEPAPRARRRGAMSVDSITDLDDNQSRLLEALQLSLPAEAQSKKEKARDKKLSLNPIYRQVPRLVDSCCQHLEKHGLQTVGIFRVGSSKKRVRQLREEFDRGIDVSLEEEHSVHDVAALLKEFLRDMPDPLLTRELYTAFINTLLLEPEEQLGTLQLLIYLLPPCNCDTLHRLLQFLSIVARHADDNISKDGQEVTGNKMTSLNLATIFGPNLLHKQKSSDKEFSVQSSARAEESTAIIAVVQKMIENYEALFMVPPDLQNEVLISLLETDPDVVDYLLRRKASQSSSPDMLQSEVSFSVGGRHSSTDSNKASSGDISPYDNNSPVLSERSLLAMQEDAAPGGSEKLYRVPGQFMLVGHLSSSKSRESSPGPRLGKGNWSLASRRWPKQATLLLLHVAWCGALRTFSSSLPYLMFL

SEQ ID NO: 1046 - protein, 690 aa, Homo sapiens
MSAQSLLHSVFSCSSPASSSAASAKGFSKRKLRQTRSLDPALIGGCGSDEAGAEGSARGATAGRLYSPSLPAESLGPRLASSSRGPPPRATRLPPPGPLCSSFSTPSTPQEKSPSGSFHFDYEVPLGRGGLKKSMAWDLPSVLAGPASSRSASSILCSSGGGPNGIFASPRRWLQQRKFQSPPDSRGHPYVVWKSELELYDLQILGTKPPMNSDTHRNFDPTATLRNQGDFTWNSMSGRSVRLRSVPIQSLSELERARLQEVAFYQLQQDCDLSCQITIPKDGQKRKKSLRKKLDSLGKEKNKDKEFIPQAFGMPLSQVIANDRAYKLKQDLQRDEQKDASDFVASLLPFGNKRQNKELSSSNSSLSSTSETPNESTSPNTPEPAPRARRRGAMSVDSITDLDDNQSRLLEALQLSLPAEAQSKKEKARDKKLSLNPIYRQVPRLVDSCCQHLEKHGLQTVGIFRVGSSKKRVRQLREEFDRGIDVSLEEEHSVHDVAALLKEFLRDMPDPLLTRELYTAFINTLLLEPEEQLGTLQLLIYLLPPCNCDTLHRLLQFLSIVARHADDNISKDGQEVTGNKMTSLNLATIFGPNLLHKQKSSDKEFSVQSSARAEESTAIIAVVQKMIENYEALFMVPPDLQNEVLISLLETDPDVVDYLLRRKASQSSTSSVLPAAVQACPQYPASMFTP

SEQ ID NO: 1047 - protein, 771 aa, Homo sapiens
MSGRSVRLRSVPIQSLSELERARLQEVAFYQLQQDCDLSCQITIPKDGQKRKKSLRKKLDSLGKEKNKDKEFIPQAFGMPLSQVIANDRAYKLKQDLQRDEQKDASDFVASLLPFGNKRQNKELSSSNSSLSSTSETPNESTSPNTPEPAPRARRRGAMSVDSITDLDDNQSRLLEALQLSLPAEAQSKKEKARDKKLSLNPIYRQVPRLVDSCCQHLEKHGLQTVGIFRVGSSKKRVRQLREEFDRGIDVSLEEEHSVHDVAALLKEFLRDMPDPLLTRELYTAFINTLLLEPEEQLGTLQLLIYLLPPCNCDTLHRLLQFLSIVARHADDNISKDGQEVTGNKMTSLNLATIFGPNLLHKQKSSDKEFSVQSSARAEESTAIIAVVQKMIENYEALFMVPPDLQNEVLISLLETDPDVVDYLLRRKASQSSSPDMLQSEVSFSVGGRHSSTDSNKASSGDISPYDNNSPVLSERSLLAMQEDAAPGGSEKLYRVPGQFMLVGHLSSSKSRESSPGPRLGKDLSEEPFDIWGTWHSTLKSGSKDPGMTGSSGDIFESSSLRAGPCSLSQGNLSPNWPRWQGSPAELDSDTQGARRTQAAAPATEGRAHPAVSRACSTPHVQVAGKAERPTARSEQYLTLSGAHDLSESELDVAGLQSRATPQCQRPHGSGRDDKRPPPPYPGPGKPAAAAAWIQGPPEGVETPTDQGGQAAEREQQVTQKKLSSANSLPAGEQDSPRLGDAGWLDWQRERWQIWELLSTDNPDALPETLV

SEQ ID NO: 1048 - protein, 771 aa, Homo sapiens; identical to SEQ ID NO: 1047

SEQ ID NO: 1049 - protein, 1816 aa, Homo sapiens
MLSVVHFLRSFFKTPEPGAHLPGEGEIEDNQLPTSPAEQVEQGWNQQTDRDDSETLSQQSESGSDTKTDPFESASDTESLSGYLPRGVFHPLRGTPVDIEAPWEYPDVSATGPPQEQHLTSVPGLHAKEELDLSPSLEDDSCKNGWRAFATVAGEQEAGHLWDCATSLERESLLAGVPRHTGCCLQRATDSSGPEPVQGVAVQDLRGLSSVSLQKSRSESYLGIPVVWPFLLWCCELGRSWPHIHNRARALVLPSRGPLDNTAPLGTRTKKESTLGPAGDTELLWSQPHSDVPCQPPLRTSCLLRTNRHHSAPETTGDKNRASPRLNCGHMRALVRAHSIAGFSPECPEDPVGQNVVKSGTHVKEGAKNERDPRIQNIPSPAPTQLSGPIPAFQSGAPHLQGPCKPGGFRLQRASQDTPSAGLLGENQLRQDSRSCLVASCLTSELVKLSAEEVPEPAECKSEQSPESRTQEPQGTQLAPRAADERETQKHLWGISVQAGNQTSNYTSKYVLSEESKSPTRAKFPRQPSSEGTQVWSGDLMGCLEVSDSSDAPETTQKSSAIDTSKAAEEAMVLDPNYREQALQGLSEFKAATVSHCGPGAEEGEQGPGGAGGRQLEPKAGGEASRGRGALIIVAVEQKGLQASRSNAGPVPETLPRDFPKERPESPLSTGETPCESPTRGKTPAGNECELPAAPIQGAGDGALQRVAQAAELGRVLVPQAASEETPSTEEPPGERLRGESRSSGSGERGPEEAPEGGAAAARGQRPRVPALEPPQPPRGLRKGAQEPGKRPTFSKVTSFRKGRPLATESPGGVPAPTTEGRRWGSSGPEGLPRENPPAAAGRDAPPLHHGDASAWPEFVPQAAGDRTAGPAGAGHTGTSGDLGSRGPSSESCNAKRLKTTEKKLRARLALAHKTFSNFIESIVLEKENTHERSPSSPKGEKEKSRLRQGSWRAFLKSKDAGSPKKPTLVSLPLGPEVLSPAETDSHCEERAEDKEGYVFSDHWAPPLASTPLSSSLVSPEHRRKSEPTIKCTATQEGGRYLPSGIFPEKSWLASPGSPRAQQAGIAHTLPSSSACCLAYENPGTPCRPTSPKPLSPRPSAQRMGLHYPGRGSAISMVSLGSYSYVDSSSGDPERPKIPKGQTSFLLSLQTLNQDEQKEESREGGQGPRGLGTVPWLRDLPGSENHMPWEEPAGEKPSCSHSQKAFHMEPAQKPCFTTDMVTWALLCISAETVRGEAPSQPRGIPHRSPVSVDDLWLEKTQRKKLQKQAHVERRLHIGAVHKDGVKCWRKTIITSPESLNLPRRSHPLSQSAPTGLNHMGWPEHTPGTAMPDGALDTAVCADEVGSEEDLYDDLHSSSHHYSHPGGGGEQLAINELISDGSVVCAEALWDHVTMDDQELGFKAGDVIEVMDATNREWWWGRVADGEGWFPASFVRLRVNQDEPADDDAPLAGNSGAEDGGAEAQSSKDQMRTNVINEILSTERDYIKHLRDICEQADFQIYSEYCNNHPNACVELSRLTKLSKYVYFFEACRLLQKMIDISLDGFLLTPVQKICKYPLQLAELLKYTHPQHRDFKDVEAALHAMKNVAQLINERKRRLENIDKIAQWQSSIEDWEGEDLLVRSSELIYSGELTRVTQPQAKSQQRMFFLFDHQLIYCKKDLLRRDVLYYKGRLDMDGLEVVDLEDGKDRDLHVSIKNAFRLHRGATGDSHLLCTRKPEQKQRWLKAFAREREQVQLDQETGFSITELQRKQAMLNASKQQVTGKPKAVGRPCYLTRQKHPALPSNRPQQQVLVLAEPRRKPSTFWHSISRLAPFRK

SEQ ID NO: 1050 - protein, 690 aa, Homo sapiens
MPWEEPAGEKPSCSHSQKAFHMEPAQKPCFTTDMVTWALLCISAETVRGEAPSQPRGIPHRSPVSVDDLWLEKTQRKKLQKQAHVERRLHIGAVHKDGVKCWRKTIITSPESLNLPRRSHPLSQSAPTGLNHMGWPEHTPGTAMPDGALDTAVCADEVGSEEDLYDDLHSSSHHYSHPGGGGEQLAINELISDGSVVCAEALWDHVTMDDQELGFKAGDVIEVMDATNREWWWGRVADGEGWFPASFVRLRVNQDEPADDDAPLAGNSGAEDGGAEAQSSKDQMRTNVINEILSTERDYIKHLRDICEGYVRQCRKRADMFSEEQLRTIFGNIEDIYRCQKAFVKALEQRFNRERPHLSELGACFLEHQADFQIYSEYCNNHPNACVELSRLTKLSKYVYFFEACRLLQKMIDISLDGFLLTPVQKICKYPLQLAELLKYTHPQHRDFKDVEAALHAMKNVAQLINERKRRLENIDKIAQWQSSIEDWEGEDLLVRSSELIYSGELTRVTQPQAKSQQRMFFLFDHQLIYCKKDLLRRDVLYYKGRLDMDGLEVVDLEDGKDRDLHVSIKNAFRLHRGATGDSHLLCTRKPEQKQRWLKAFAREREQVQLDQETGFSITELQRKQAMLNASKQQVTGKPKAVGRPCYLTRQKHPALPSNRPQQQVLVLAEPRRKPSTFWHSISRLAPFRK

SEQ ID NO: 1051 - protein, 670 aa, Homo sapiens
MPWEEPAGEKPSCSHSQKAFHMEPAQKPCFTTDMVTWALLCISAETVRGEAPSQPRGIPHRSPVSVDDLWLEKTQRKKLQKQAHVERRLHIGAVHKDGVKCWRKTIITSPESLNLPRRSHPLSQSAPTGLNHMGWPEHTPGTAMPDGALDTAVCADEVGSEEDLYDDLHSSSHHYSHPGGGGEQLAINELISDGSVVCAEALWDHVTMDDQELGFKAGDVIEVMDATNREWWWGRVADGEGWFPASFVRLRVNQDEPADDDAPLAGNSGAEDGGAEAQSSKDQMRTNVINEILSTERDYIKHLRDICEGYVRQCRKRADMFSEEQLRTIFGNIEDIYRCQKAFVKALEQRFNRERPHLSELGACFLEHQADFQIYSEYCNNHPNACVELSRLTKLSKYVYFFEACRLLQKMIDISLDGFLLTPVQKICKYPLQLAELLKYTHPQHRDFKDVEAALHAMKNVAQLINERKRRLENIDKIAQWQSSIEDWEGEDLLVRSSELIYSGELTRVTQPQAKSQQRMFFLFDHQLIYCKKDLLRRDVLYYKGRLDMDGLEVVDLEDGKDRDLHVSIKNAFRLHRGATGDSHLLCTRKPEQKQRWLKAFAREREQVQLDQETGFSITELQRKQAMLNASKQQVTGKPKGRRTAAPPPRLPGPYPADIIPFSEPQSQAS

SEQ ID NO: 1052 - protein, 630 aa, Homo sapiens
MPWEEPAGEKPSCSHSQKAFHMEPAQKPCFTTDMVTWALLCISAETVRGEAPSQPRGIPHRSPVSVDDLWLEKTQRKKLQKQAHVERRLHIGAVHKDGVKCWRKTIITSPESLNLPRRSHPLSQSAPTGLNHMGWPEHTPGTAMPDGALDTAVCADEVGSEEDLYDDLHSSSHHYSHPGGGGEQLAINELISDGSVVCAEALWDHVTMDDQELGFKAGDVIEVMDATNREWWWGRVADGEGWFPASFVRLRVNQDEPADDDAPLAGNSGAEDGGAEAQSSKDQMRTNVINEILSTERDYIKHLRDICEQADFQIYSEYCNNHPNACVELSRLTKLSKYVYFFEACRLLQKMIDISLDGFLLTPVQKICKYPLQLAELLKYTHPQHRDFKDVEAALHAMKNVAQLINERKRRLENIDKIAQWQSSIEDWEGEDLLVRSSELIYSGELTRVTQPQAKSQQRMFFLFDHQLIYCKKDLLRRDVLYYKGRLDMDGLEVVDLEDGKDRDLHVSIKNAFRLHRGATGDSHLLCTRKPEQKQRWLKAFAREREQVQLDQETGFSITELQRKQAMLNASKQQVTGKPKAVGRPCYLTRQKHPALPSNRPQQQVLVLAEPRRKPSTFWHSISRLAPFRK

SEQ ID NO: 1053 - protein, 192 aa, Homo sapiens
MPWEEPAGEKPSCSHSQKAFHMEPAQKPCFTTDMVTWALLCISAETVRGEAPSQPRGIPHRSPVSVDDLWLEKTQRKKLQKQAHVERRLHIGAVHKDGVKCWRKTIITSPESLNLPRRSHPLSQSAPTGLNHMGWPEHTPGTAVGRPCYLTRQKHPALPSNRPQQQVLVLAEPRRKPSTFWHSISRLAPFRK

SEQ ID NO: 1054 - protein, 517 aa, Homo sapiens
MRGAVSRSWSLESLRSATAAMPDGALDTAVCADEVGSEEDLYDDLHSSSHHYSHPGGGGEQLAINELISDGSVVCAEALWDHVTMDDQELGFKAGDVIEVMDATNREWWWGRVADGEGWFPASFVRLRVNQDEPADDDAPLAGNSGAEDGGAEAQSSKDQMRTNVINEILSTERDYIKHLRDICEGYVRQCRKRADMFSEEQLRTIFGNIEDIYRCQKAFVKALEQRFNRERPHLSELGACFLEHQADFQIYSEYCNNHPNACVELSRLTKLSKYVYFFEACRLLQKMIDISLDGFLLTPVQKICKYPLQLAELLKYTHPQHRDFKDVEAALHAMKNVAQLINERKRRLENIDKIAQWQSSIEDWEGEDLLVRSSELIYSGELTRVTQPQAKSQQRMFFLFDHQLIYCKKDLLRRDVLYYKGRLDMDGLEVVDLEDGKDRDLHVSIKNAFRLHRGATGDSHLLCTRKPEQKQRWLKAFAREREQVQLDQETGFSITELQRKQAMLNASKQQVTGKPK

SEQ ID NO: 1055 - protein, 619 aa, Homo sapiens
MRPDGQQALDAVVRSFDCHSEAALRQRNDVIYCSLPRTAQGIVQREDQLEVLVSLREVWGRRRGRDGTCTGAMPDGALDTAVCADEVGSEEDLYDDLHSSSHHYSHPGGGGEQLAINELISDGSVVCAEALWDHVTMDDQELGFKAGDVIEVMDATNREWWWGRVADGEGWFPASFVRLRVNQDEPADDDAPLAGNSGAEDGGAEAQSSKDQMRTNVINEILSTERDYIKHLRDICEGYVRQCRKRADMFSEEQLRTIFGNIEDIYRCQKAFVKALEQRFNRERPHLSELGACFLEHQADFQIYSEYCNNHPNACVELSRLTKLSKYVYFFEACRLLQKMIDISLDGFLLTPVQKICKYPLQLAELLKYTHPQHRDFKDVEAALHAMKNVAQLINERKRRLENIDKIAQWQSSIEDWEGEDLLVRSSELIYSGELTRVTQPQAKSQQRMFFLFDHQLIYCKKDLLRRDVLYYKGRLDMDGLEVVDLEDGKDRDLHVSIKNAFRLHRGATGDSHLLCTRKPEQKQRWLKAFAREREQVQLDQETGFSITELQRKQAMLNASKQQVTGKPKAVGRPCYLTRQKHPALPSNRPQQQVLVLAEPRRKPSTFWHSISRLAPFRK

SEQ ID NO: 1056 - protein, 372 aa, Homo sapiens
PLASTPLSSSLVSPEHRRKSEPTIKCTATQEGGRYLPSGIFPEKSWLASPGSPRAQQAGIAHTLPSSSACCLAYENPGTPCRPTSPKPLSPRPSAQRMGLHYPGRGSAISMVSLGSYSYVDSSSGDPERPKIPKGQTSFLLSLQTLNQDEQKEESREGGQGPRGLGTVPWLRDLPGSENHMPWEEPAGEKPSCSHSQKAFHMEPAQKPCFTTDMVTWALLCISAETVRGEAPSQPRGIPHRSPVSVDDLWLEKTQRKKLQKQAHVERRLHIGAVHKDGVKCWRKTIITSPESLNLPRRSHPLSQSAPTGLNHMGWPEHTPGTAVGRPCYLTRQKHPALPSNRPQQQVLVLAEPRRKPSTFWHSISRLAPFRK

SEQ ID NO: 1057 - protein, 287 aa, Homo sapiens
  SITE 1: note = misc_feature - Xaa can be any naturally occurring amino acid
XACVELSRLTKLSKYVYFFEACRLLQKMIDISLDGFLLTPVQKICKYPLQLAELLKYTHPQHRDFKDVEAALHAMKNVAQLINERKRRLENIDKIAQWQSSIEDWEGEDLLVRSSELIYSGELTRVTQPQAKSQQRMFFLFDHQLIYCKKDLLRRDVLYYKGRLDMDGLEVVDLEDGKDRDLHVSIKNAFRLHRGATGDSHLLCTRKPEQKQRWLKAFAREREQVQLDQETGFSITELQRKQAMLNASKQQVTGKPKGRRTAAPPPRLPGPYPADIIPFSEPQSQAS

SEQ ID NO: 1058 - protein, 695 aa, Homo sapiens
  SITE 1: note = misc_feature - Xaa can be any naturally occurring amino acid
XEGGQGPRGLGTVPWLRDLPGSENHMPWEEPAGEKPSCSHSQKAFHMEPAQKPCFTTDMVTWALLCISAETVRGEAPSQPRGIPHRSPVSVDDLWLEKTQRKKLQKQAHVERRLHIGAVHKDGVKCWRKTIITSPESLNLPRRSHPLSQSAPTGLNHMGWPEHTPGTAMPDGALDTAVCADEVGSEEDLYDDLHSSSHHYSHPGGGGEQLAINELISDGSVVCAEALWDHVTMDDQELGFKAGDVIEVMDATNREWWWGRVADGEGWFPASFVRLRVNQDEPADDDAPLAGNSGAEDGGAEAQSSKDQMRTNVINEILSTERDYIKHLRDICEGYVRQCRKRADMFSEEQLRTIFGNIEDIYRCQKAFVKALEQRFNRERPHLSELGACFLEHQADFQIYSEYCNNHPNACVELSRLTKLSKYVYFFEACRLLQKMIDISLDGFLLTPVQKICKYPLQLAELLKYTHPQHRDFKDVEAALHAMKNVAQLINERKRRLENIDKIAQWQSSIEDWEGEDLLVRSSELIYSGELTRVTQPQAKSQQRMFFLFDHQLIYCKKDLLRRDVLYYKGRLDMDGLEVVDLEDGKDRDLHVSIKNAFRLHRGATGDSHLLCTRKPEQKQRWLKAFAREREQVQLDQETGFSITELQRKQAMLNASKQQVTGKPKGRRTAAPPPRLPGPYPADIIPFSEPQSQAS

SEQ ID NO: 1059 - protein, 142 aa, Homo sapiens
  SITE 1: note = misc_feature - Xaa can be any naturally occurring amino acid
XKKLRARLALAHKTFSNFIESIVLEKENTHERSPSSPKGEKEKSRLRQGSWRAFLKSKDAGSPKKPTLVSLPLGPEVLSPAETDSHCEERAEDKEGYVFSDHWAPPLASTPLSSSLVSPEHRRKSEPTIKCTATQEGDAKPR

SEQ ID NO: 1060 - protein, 173 aa, Homo sapiens
MCLLLGATGVGKTLLVKRLQEVSSRDGKGDLGEPPPTRPTVGTNLTDIVAQRKITIRELGGCMGPIWSSYYGNCRSLLFVMDASDPTQLSASCVQLLGLLSAEQLAEASVLILFNKIDLPCYMSTEEMKSLIRLPDIIACAKQNITTAEISAREGTGLAGVLAWLQATHRAND

SEQ ID NO: 1061 - protein, 93 aa, Homo sapiens
MDASDPTQLSASCVQLLGLLSAEQLAEASVLILFNKIDLPCYMSTEEMKSLIRLPDIIACAKQNITTAEISAREGTGLAGVLAWLQATHRAND

SEQ ID NO: 1062 - protein, 93 aa, Homo sapiens; identical to SEQ ID NO: 1061

SEQ ID NO: 1063 - protein, 93 aa, Homo sapiens; identical to SEQ ID NO: 1061

SEQ ID NO: 1064 - protein, 111 aa, Homo sapiens
MGPIWSSYYGNCRSLLFVMDASDPTQLSASCVQLLGLLSAEQLAEASVLILFNKIDLPCYMSTEEMKSLIRLPDIIACAKQNITTAEISAREGTGLAGVLAWLQATHRAND

SEQ ID NO: 1065 - protein, 111 aa, Homo sapiens; identical to SEQ ID NO: 1064

SEQ ID NO: 1066 - protein, 197 aa, Homo sapiens
MRVAGGRALSRGAELRVPGGAKHGMCLLLGATGVGKTLLVKRLQEVSSRDGKGDLGEPPPTRPTVGTNLTDIVAQRKITIRELGGCMGPIWSSYYGNCRSLLFVMDASDPTQLSASCVQLLGLLSAEQLAEASVLILFNKIDLPCYMSTEEMKSLIRLPDIIACAKQNITTAEISAREGTGLAGVLAWLQATHRAND

SEQ ID NO: 1067 - protein, 197 aa, Homo sapiens; identical to SEQ ID NO: 1066

SEQ ID NO: 1068 - protein, 48 aa, Homo sapiens
VGTNLTDIVAQRKITIRELGGCMGPIWSSYYGNCRSLLACAADTSMEN

SEQ ID NO: 1069 - protein, 935 aa, Homo sapiens
MAAAKPTLTDSLSFCLAQLAAAAGEALGGEKDPATNETPLSRALLALRTRHIKAAGGIERFRARGGLRPLLALLRRAAAAGSAPSQAGPGSAPSSAASGASSPAPASGPAPSAVSSSSPTPPVRLRKTLDLALSILADCCTEGACRTEVRRLGGILPLVTILQCMKTDSIQNRTARALGNLAMEPESCGDIHCAGAVPLLVESLTACQDSQCLQSVVRALRNLADSPQHRLALAQQGAVRPLAELLATAPDAALTLALVRALLELSRGCSRACAEQLSLGGGLGPLVSLASHPKRAVREGTILILANLCAQGLIRPALGNAGGVEVLVDELRQRRDPNGASPTSQQPLVRAVCLLCREAINRARLRDAGGLDLLMGLLRDPRASAWHPRIVAALVGFLYDTGALGRLQALGLVPLLAGQLCGEAGEEEEEGREAASWDFPEERTPERAQGGSFRSLRSWLISEGYATGPDDISPDWSPEQCPPEPMEPASPAPTPTSLRAPRTQRTPGRSPAAAIEEPWGREGPALLLLSRFSQAPDPSGALVTGPALYGLLTYVTGAPGPPSPRALRILSRLTCNPACLEAFVRSYGAALLRAWLVLGVAPDDWPAPRARPTLHSRHRELGERLLQNLTVQAESPFGVGALTHLLLSGSPEDRVACALTLPFICRKPSLWRRLLLEQGGLRLLLAALTRPAPHPLFLFFAADSLSCLQDLVSPTVSPAVPQAVPMDLDSPSPCLYEPLLGPAPVPAPDLHFLLDSGLQLPAQRAASATASPFFRALLSGSFAEAQMDLVPLRGLSPGAAWPVLHHLHGCRGCGAALGPVPPPGQPLLGSEAEEALEAAGRFLLPGLEEELEEAVGRIHLGPQGGPESVGEVFRLGRPRLAAHCARWTLGSEQCPRKRGLALVGLVEAAGEEAGPLTEALLAVVMGIELGARVPA

SEQ ID NO: 1070 - protein, 935 aa, Homo sapiens; identical to SEQ ID NO: 1069

SEQ ID NO: 1071 - protein, 725 aa, Homo sapiens
MAAAKPTLTDSLSFCLAQLAAAAGEALGGEKDPATNETPLSRALLALRTRHIKAAGGIERFRARGGLRPLLALLRRAAAAGSAPSQAGPGSAPSSAASGASSPAPASGPAPSAVSSSSPTPPVRLRKTLDLALSILADCCTEGACRTEVRRLGGILPLVTILQCMKTDSIQNRTARALGNLAMEPESCGDIHCAGAVPLLVESLTACQDSQCLQSVVRALRNLADSPQHRLALAQQGAVRPLAELLATAPDAALTLALVRALLELSRGCSRACAEQLSLGGGLGPLVSLASHPKRAVREGTILILANLCAQGLIRPALGNAGGVEVLVDELRQRRDPNGASPTSQQPLVRAVCLLCREAINRARLRDAGGLDLLMGLLRDPRASAWHPRIVAALVGFLYDTGALGRLQALGLVPLLAGQLCGEAGEEEEEGREAASWDFPEERTPERAQGGSFRSLRSWLISEGYATGPDDISPDWSPEQCPPEPMEPASPAPTPTSLRAPRTQRTPGRSPAAAIEEPWGREGPALLLLSRFSQAPDPSGALVTGPALYGLLTYVTGAPGPPSPRALRILSRLTCNPACLEAFVRSYGAALLRAWLVLGVAPDDWPAPRARPTLHSRHRELGEFPYPPVSLPPCESPSSPMASMGPEPHLPTHLSSPARPPDNLSPEWGGEQGVPVPPWAHRQSSAVSSALALGPRYPNSRCSPAPRIWAGLCFFPGSAIGSALS

SEQ ID NO: 1072 - protein, 771 aa, Homo sapiens
MKTDSIQNRTARALGNLAMEPESCGDIHCAGAVPLLVESLTACQDSQCLQSVVRALRNLADSPQHRLALAQQGAVRPLAELLATAPDAALTLALVRALLELSRGCSRACAEQLSLGGGLGPLVSLASHPKRAVREGTILILANLCAQGLIRPALGNAGGVEVLVDELRQRRDPNGASPTSQQPLVRAVCLLCREAINRARLRDAGGLDLLMGLLRDPRASAWHPRIVAALVGFLYDTGALGRLQALGLVPLLAGQLCGEAGEEEEEGREAASWDFPEERTPERAQGGSFRSLRSWLISEGYATGPDDISPDWSPEQCPPEPMEPASPAPTPTSLRAPRTQRTPGRSPAAAIEEPWGREGPALLLLSRFSQAPDPSGALVTGPALYGLLTYVTGAPGPPSPRALRILSRLTCNPACLEAFVRSYGAALLRAWLVLGVAPDDWPAPRARPTLHSRHRELGERLLQNLTVQAESPFGVGALTHLLLSGSPEDRVACALTLPFICRKPSLWRRLLLEQGGLRLLLAALTRPAPHPLFLFFAADSLSCLQDLVSPTVSPAVPQAVPMDLDSPSPCLYEPLLGPAPVPAPDLHFLLDSGLQLPAQRAASATASPFFRALLSGSFAEAQMDLVPLRGLSPGAAWPVLHHLHGCRGCGAALGPVPPPGQPLLGSEAEEALEAAGRFLLPGLEEELEEAVGRIHLGPQGGPESVGEVFRLGRPRLAAHCARWTLGSEQCPRKRGLALVGLVEAAGEEAGPLTEALLAVVMGIELGARVPA

SEQ ID NO: 1073 - protein, 1030 aa, Homo sapiens
MVTLGAGVRLFTGVYPVVLNQIRATSEASAITRTTMPAPELTSTSRAEDTRDTGVQLRKRKIPQARHSRKRQRTFSFRSLGSAARSGAESEARAKMAAAKPTLTDSLSFCLAQLAAAAGEALGGEKDPATNETPLSRALLALRTRHIKAAGGIERFRARGGLRPLLALLRRAAAAGSAPSQAGPGSAPSSAASGASSPAPASGPAPSAVSSSSPTPPVRLRKTLDLALSILADCCTEGACRTEVRRLGGILPLVTILQCMKTDSIQNRTARALGNLAMEPESCGDIHCAGAVPLLVESLTACQDSQCLQSVVRALRNLADSPQHRLALAQQGAVRPLAELLATAPDAALTLALVRALLELSRGCSRACAEQLSLGGGLGPLVSLASHPKRAVREGTILILANLCAQGLIRPALGNAGGVEVLVDELRQRRDPNGASPTSQQPLVRAVCLLCREAINRARLRDAGGLDLLMGLLRDPRASAWHPRIVAALVGFLYDTGALGRLQALGLVPLLAGQLCGEAGEEEEEGREAASWDFPEERTPERAQGGSFRSLRSWLISEGYATGPDDISPDWSPEQCPPEPMEPASPAPTPTSLRAPRTQRTPGRSPAAAIEEPWGREGPALLLLSRFSQAPDPSGALVTGPALYGLLTYVTGAPGPPSPRALRILSRLTCNPACLEAFVRSYGAALLRAWLVLGVAPDDWPAPRARPTLHSRHRELGERLLQNLTVQAESPFGVGALTHLLLSGSPEDRVACALTLPFICRKPSLWRRLLLEQGGLRLLLAALTRPAPHPLFLFFAADSLSCLQDLVSPTVSPAVPQAVPMDLDSPSPCLYEPLLGPAPVPAPDLHFLLDSGLQLPAQRAASATASPFFRALLSGSFAEAQMDLVPLRGLSPGAAWPVLHHLHGCRGCGAALGPVPPPGQPLLGSEAEEALEAAGRFLLPGLEEELEEAVGRIHLGPQGGPESVGEVFRLGRPRLAAHCARWTLGSEQCPRKRGLALVGLVEAAGEEAGPLTEALLAVVMGIELGARVPA

SEQ ID NO: 1074 - protein, 10 aa, Homo sapiens
  SITE 1: note = misc_feature - Xaa can be any naturally occurring amino acid
XLGKCSAPVS

SEQ ID NO: 1075 - protein, 598 aa, Homo sapiens
  SITE 1: note = misc_feature - Xaa can be any naturally occurring amino acid
XTEVRRLGGILPLVTILQCMKTDSIQNRTARALGNLAMEPESCGDIHCAGAVPLLVESLTACQDSQCLQSVALGLVPLLAGQLCGEAGEEEEEGREAASWDFPEERTPERAQGGSFRSLRSWLISEGYATGPDDISPDWSPEQCPPEPMEPASPAPTPTSLRAPRTQRTPGRSPAAAIEEPWGREGPALLLLSRFSQAPDPSGALVTGPALYGLLTYVTGAPGPPSPRALRILSRLTCNPACLEAFVRSYGAALLRAWLVLGVAPDDWPAPRARPTLHSRHRELGERLLQNLTVQAESPFGVGALTHLLLSGSPEDRVACALTLPFICRKPSLWRRLLLEQGGLRLLLAALTRPAPHPLFLFFAADSLSCLQDLVSPTVSPAVPQAVPMDLDSPSPCLYEPLLGPAPVPAPDLHFLLDSGLQLPAQRAASATASPFFRALLSGSFAEAQMDLVPLRGLSPGAAWPVLHHLHGCRGCGAALGPVPPPGQPLLGSEAEEALEAAGRFLLPGLEEELEEAVGRIHLGPQGGPESVGEVFRLGRPRLAAHCARWTLGSEQCPRKRGLALVGLVEAAGEEAGPLTEALLAVVMGIELGARVPA

SEQ ID NO: 1076 - protein, 23 aa, Homo sapiens
MADQRMDISSTISDFMSPGPTDL

SEQ ID NO: 1077 - protein, 59 aa, Homo sapiens
MADQRMDISSTISDFMSPGPTDLLSSSLGTSGVDCNRKRKGSSTDYQESMDTDKDDPHG

SEQ ID NO: 1078 - protein, 76 aa, Homo sapiens
MADQRMDISSTISDFMSPGPTDLLSSSLGTSGVDCNRKRKGSSTDYQESMDTDKDDPHGRLEYTEHQGRIKNAREA

SEQ ID NO: 1079 - protein, 101 aa, Homo sapiens
MADQRMDISSTISDFMSPGPTDLLSSSLGTSGVDCNRKRKGSSTDYQESMDTDKDDPHGRLEYTEHQGRIKNAREAHSQIEKRRRDKMNSFIDELASLVPT

SEQ ID NO: 1080 - protein, 135 aa, Homo sapiens
MADQRMDISSTISDFMSPGPTDLLSSSLGTSGVDCNRKRKGSSTDYQESMDTDKDDPHGRLEYTEHQGRIKNAREAHSQIEKRRRDKMNSFIDELASLVPTCNAMSRKLDKLTVLRMAVQHMKTLRGATNPYTEA

SEQ ID NO: 1081 - protein, 626 aa, Homo sapiens
MADQRMDISSTISDFMSPGPTDLLSSSLGTSGVDCNRKRKGSSTDYQESMDTDKDDPHGRLEYTEHQGRIKNAREAHSQIEKRRRDKMNSFIDELASLVPTCNAMSRKLDKLTVLRMAVQHMKTLRGATNPYTEANYKPTFLSDDELKHLILRAADGFLFVVGCDRGKILFVSESVFKILNYSQNDLIGQSLFDYLHPKDIAKVKEQLSSSDTAPRERLIDAKTGLPVKTDITPGPSRLCSGARRSFFCRMKCNRPSVKVEDKDFPSTCSKKKADRKSFCTIHSTGYLKSWPPTKMGLDEDNEPDNEGCNLSCLVAIGRLHSHVVPQPVNGEIRVKSMEYVSRHAIDGKFVFVDQRATAILAYLPQELLGTSCYEYFHQDDIGHLAECHRQVLQTREKITTNCYKFKIKDGSFITLRSRWFSFMNPWTKEVEYIVSTNTVVLANVLEGGDPTFPQLTASPHSMDSMLPSGEGGPKRTHPTVPGIPGGTRAGAGKIGRMIAEEIMEIHRIRGSSPSSCGSSPLNITSTPPPDASSPGGKKILNGGTPDIPSSGLLSGQAQENPGYPYSDSSSILGENPHIGIDMIDNDQGSSSPSNDEAAMAVIMSLLEADAGLGGPVDFSDLPWPL

SEQ ID NO: 1082 - protein, 625 aa, Homo sapiens
MADQRMDISSTISDFMSPGPTDLLSSSLGTSGVDCNRKRKGSSTDYQESMDTDKDDPHGRLEYTEHQGRIKNAREAHSQIEKRRRDKMNSFIDELASLVPTCNAMSRKLDKLTVLRMAVQHMKTLRGATNPYTEANYKPTFLSDDELKHLILRAADGFLFVVGCDRGKILFVSESVFKILNYSQNDLIGQSLFDYLHPKDIAKVKEQLSSSDTAPRERLIDAKTGLPVKTDITPGPSRLCSGARRSFFCRMKCNRPSVKVEDKDFPSTCSKKKDRKSFCTIHSTGYLKSWPPTKMGLDEDNEPDNEGCNLSCLVAIGRLHSHVVPQPVNGEIRVKSMEYVSRHAIDGKFVFVDQRATAILAYLPQELLGTSCYEYFHQDDIGHLAECHRQVLQTREKITTNCYKFKIKDGSFITLRSRWFSFMNPWTKEVEYIVSTNTVVLANVLEGGDPTFPQLTASPHSMDSMLPSGEGGPKRTHPTVPGIPGGTRAGAGKIGRMIAEEIMEIHRIRGSSPSSCGSSPLNITSTPPPDASSPGGKKILNGGTPDIPSSGLLSGQAQENPGYPYSDSSSILGENPHIGIDMIDNDQGSSSPSNDEAAMAVIMSLLEADAGLGGPVDFSDLPWPL

SEQ ID NO: 1083 - protein, 60 aa, Homo sapiens
MADQRMDISSTISDFMSPGPTDLLSSSLGTSGVDCNRKRKGSSTDYQLEYTEHQGRIKNA

SEQ ID NO: 1084 - protein, 46 aa, Homo sapiens
MINIESMDTDKDDPHGRLEYTEHQGRIKNAREAHSQIEKRRRDKMN

SEQ ID NO: 1085 - protein, 72 aa, Homo sapiens
MINIESMDTDKDDPHGRLEYTEHQGRIKNAREAHSQIEKRRRDKMNSFIDELASLVPTCNAMSRKLDKLTVL

SEQ ID NO: 1086 - protein, 141 aa, Homo sapiens
MINIESMDTDKDDPHGRLEYTEHQGRIKNAREAHSQIEKRRRDKMNSFIDELASLVPTCNAMSRKLDKLTVLRMAVQHMKTLRGATNPYTEANYKPTFLSDDELKHLILRAADGFLFVVGCDRGKILFVSESVFKILNYSQ

SEQ ID NO: 1087 - protein, 583 aa, Homo sapiens
MINIESMDTDKDDPHGRLEYTEHQGRIKNAREAHSQIEKRRRDKMNSFIDELASLVPTCNAMSRKLDKLTVLRMAVQHMKTLRGATNPYTEANYKPTFLSDDELKHLILRAADGFLFVVGCDRGKILFVSESVFKILNYSQNDLIGQSLFDYLHPKDIAKVKEQLSSSDTAPRERLIDAKTGLPVKTDITPGPSRLCSGARRSFFCRMKCNRPSVKVEDKDFPSTCSKKKADRKSFCTIHSTGYLKSWPPTKMGLDEDNEPDNEGCNLSCLVAIGRLHSHVVPQPVNGEIRVKSMEYVSRHAIDGKFVFVDQRATAILAYLPQELLGTSCYEYFHQDDIGHLAECHRQVLQTREKITTNCYKFKIKDGSFITLRSRWFSFMNPWTKEVEYIVSTNTVVLANVLEGGDPTFPQLTASPHSMDSMLPSGEGGPKRTHPTVPGIPGGTRAGAGKIGRMIAEEIMEIHRIRGSSPSSCGSSPLNITSTPPPDASSPGGKKILNGGTPDIPSSGLLSGQAQENPGYPYSDSSSILGENPHIGIDMIDNDQGSSSPSNDEAAMAVIMSLLEADAGLGGPVDFSDLPWPL

SEQ ID NO: 1088 - protein, 582 aa, Homo sapiens
MINIESMDTDKDDPHGRLEYTEHQGRIKNAREAHSQIEKRRRDKMNSFIDELASLVPTCNAMSRKLDKLTVLRMAVQHMKTLRGATNPYTEANYKPTFLSDDELKHLILRAADGFLFVVGCDRGKILFVSESVFKILNYSQNDLIGQSLFDYLHPKDIAKVKEQLSSSDTAPRERLIDAKTGLPVKTDITPGPSRLCSGARRSFFCRMKCNRPSVKVEDKDFPSTCSKKKDRKSFCTIHSTGYLKSWPPTKMGLDEDNEPDNEGCNLSCLVAIGRLHSHVVPQPVNGEIRVKSMEYVSRHAIDGKFVFVDQRATAILAYLPQELLGTSCYEYFHQDDIGHLAECHRQVLQTREKITTNCYKFKIKDGSFITLRSRWFSFMNPWTKEVEYIVSTNTVVLANVLEGGDPTFPQLTASPHSMDSMLPSGEGGPKRTHPTVPGIPGGTRAGAGKIGRMIAEEIMEIHRIRGSSPSSCGSSPLNITSTPPPDASSPGGKKILNGGTPDIPSSGLLSGQAQENPGYPYSDSSSILGENPHIGIDMIDNDQGSSSPSNDEAAMAVIMSLLEADAGLGGPVDFSDLPWPL

SEQ ID NO: 1089 - protein, 624 aa, Homo sapiens
MSKEAVSLWALTVSLQPPVPLCVCREMTGSGRRKQQCVTLPFISRELCFYLLLFPPPRLEYTEHQGRIKNAREAHSQIEKRRRDKMNSFIDELASLVPTCNAMSRKLDKLTVLRMAVQHMKTLRGATNPYTEANYKPTFLSDDELKHLILRAADGFLFVVGCDRGKILFVSESVFKILNYSQNDLIGQSLFDYLHPKDIAKVKEQLSSSDTAPRERLIDAKTGLPVKTDITPGPSRLCSGARRSFFCRMKCNRPSVKVEDKDFPSTCSKKKADRKSFCTIHSTGYLKSWPPTKMGLDEDNEPDNEGCNLSCLVAIGRLHSHVVPQPVNGEIRVKSMEYVSRHAIDGKFVFVDQRATAILAYLPQELLGTSCYEYFHQDDIGHLAECHRQVLQTREKITTNCYKFKIKDGSFITLRSRWFSFMNPWTKEVEYIVSTNTVVLANVLEGGDPTFPQLTASPHSMDSMLPSGEGGPKRTHPTVPGIPGGTRAGAGKIGRMIAEEIMEIHRIRGSSPSSCGSSPLNITSTPPPDASSPGGKKILNGGTPDIPSSGLLSGQAQENPGYPYSDSSSILGENPHIGIDMIDNDQGSSSPSNDEAAMAVIMSLLEADAGLGGPVDFSDLPWPL

SEQ ID NO: 1090 - protein, 171 aa, Homo sapiens
RATAILAYLPQELLGTSCYEYFHQDDIGHLAECHRQVLQTREKITTNCYKFKIKDGSFITLRSRWFSFMNPWTKEVEYIVSTNTVVLSRVDTGHLGQVEWCTVLSRPDSRFLIAGMFTEPTSWKAGTQPSHSSQHPPTAWTACCPLEKVAQRGPTPLFQGFQGEPGLGQEK

SEQ ID NO: 1091 - protein, 423 aa, Homo sapiens
MGMYPGVLVPSSRGGLPLEEVTVAEVLAARGYLTGMAGKWHLGVGPEGAFLPPHQGFHRFLGIPYSHDQGPCQNLTCFPPATPCDGGCDQGLVPIPLLANLSVEAQPPWLPGLEARYMAFAHDLMADAQRQDRPFFLYYASHHTHYPQFSGQSFAERSGRGPFGDSLMELDAAVGTLMTAIGDLGLLEETLVIFTADNGPETMRMSRGGCSGLLRCGKGTTYEGGVREPALAFWPGHIAPGVTHELASSLDLLPTLAALAGAPLPNVTLDGFDLSPLLLGTGKSPRQSLFFYPSYPDEVRGVFAVRTGKYKAHFFTQGSAHSDTTADPACHASSSLTAHEPPLLYDLSKDPGENYNLLGGVAGATPEVLQALKQLQLLKAQLDAAVTFGPSQVARGEDPALQICCHPGCTPRPACCHCPDPHA

SEQ ID NO: 1092 - protein, 509 aa, Homo sapiens
MSMGAPRSLLLALAAGLAVARPPNIVLIFADDLGYGDLGCYGHPSSTTPNLDQLAAGGLRFTDFYVPVSLCTPSRAALLTGRLPVRMGMYPGVLVPSSRGGLPLEEVTVAEVLAARGYLTGMAGKWHLGVGPEGAFLPPHQGFHRFLGIPYSHDQGPCQNLTCFPPATPCDGGCDQGLVPIPLLANLSVEAQPPWLPGLEARYMAFAHDLMADAQRQDRPFFLYYASHHTHYPQFSGQSFAERSGRGPFGDSLMELDAAVGTLMTAIGDLGLLEETLVIFTADNGPETMRMSRGGCSGLLRCGKGTTYEGGVREPALAFWPGHIAPGVTHELASSLDLLPTLAALAGAPLPNVTLDGFDLSPLLLGTGKSPRQSLFFYPSYPDEVRGVFAVRTGKYKAHFFTQGSAHSDTTADPACHASSSLTAHEPPLLYDLSKDPGENYNLLGGVAGATPEVLQALKQLQLLKAQLDAAVTFGPSQVARGEDPALQICCHPGCTPRPACCHCPDPHA

SEQ ID NO: 1093 - protein, 509 aa, Homo sapiens; identical to SEQ ID NO: 1092

SEQ ID NO: 1094 - protein, 509 aa, Homo sapiens; identical to SEQ ID NO: 1092

SEQ ID NO: 1095 - protein, 509 aa, Homo sapiens; identical to SEQ ID NO: 1092

SEQ ID NO: 1096 - protein, 69 aa, Homo sapiens
  SITE 1: note = misc_feature - Xaa can be any naturally occurring amino acid
XPSYPDEVRGVFAVRTGKYKAHFFTQGSAHSDTTADPACHASSSLTAHEPPLLYDLSKDPDGVSLCRPG

SEQ ID NO: 1097 - protein, 45 aa, Homo sapiens
MGPRGAASLPRGPGPRRLLLPVVLPLLLLLLLAPPGSGAGASRPP

SEQ ID NO: 1098 - protein, 533 aa, Homo sapiens
MGPRGAASLPRGPGPRRLLLPVVLPLLLLLLLAPPGSGAGASRPPHLVFLLADDLGWNDVGFHGSRIRTPHLDALAAGGVLLDNYYTQPLCTPSRSQLLTGRYQIRTGLQHQIIWPCQPSCVPLDEKLLPQLLKEAGYTTHMVGKWHLGMYRKECLPTRRGFDTYFGYLLGSEDYYSHERCTLIDALNVTRCALDFRDGEEVATGYKNMYSTNIFTKRAIALITNHPPEKPLFLYLALQSVHEPLQVPEEYLKPYDFIQDKNRHHYAGMVSLMDEAVGNVTAALKSSGLWNNTVFIFSTDNGGQTLAGGNNWPLRGRKWSLWEGGVRGVGFVASPLLKQKGVKNRELIHISDWLPTLVKLARGHTNGTKPLDGFDVWKTISEGSPSPRIELLHNIDPNFVDSSPCPRNSMAPAKDDSSLPEYSAFNTSVHAAIRHGNWKLLTGYPGCGYWFPPPSQYNVSEIPSSDPPTKTLWLFDIDRDPEERHDLSREYPHIVTKLLSRLQFYHKHSVPVYFPAQDPRCDPKATGVWGPWM

SEQ ID NO: 1099 - protein, 413 aa, Homo sapiens
MGPRGAASLPRGPGPRRLLLPVVLPLLLLLLLAPPGSGAGASRPPHLVFLLADDLGWNDVGFHGSRIRTPHLDALAAGGVLLDNYYTQPLCTPSRSQLLTGRYQIRTGLQHQIIWPCQPSCVPLDEKLLPQLLKEAGYTTHMVGKWHLGMYRKECLPTRRGFDTYFGYLLGSEDYYSHERCTLIDALNVTRCALDFRDGEEVATGYKNMYSTNIFTKRAIALITNHPPEKPLFLYLALQSVHEPLQVPEEYLKPYDFIQDKNRHHYAGMVSLMDEAVGNVTAALKSSGLWNNTVFIFSTDNGGQTLAGGNNWPLRGRKWSLWEGGVRGVGFVASPLLKQKGVKNRELIHISDWLPTLVKLARGHTNGTKPLDGFDVWKTISEGSPSPRIELLHNIDPNFVDSSPYWPECSLLL

SEQ ID NO: 1100 - protein, 398 aa, Homo sapiens
MGPRGAASLPRGPGPRRLLLPVVLPLLLLLLLAPPGSGAGASRPPHLVFLLADDLGWNDVGFHGSRIRTPHLDALAAGGVLLDNYYTQPLCTPSRSQLLTGRYQIRTGLQHQIIWPCQPSCVPLDEKLLPQLLKEAGYTTHMVGKWHLGMYRKECLPTRRGFDTYFGYLLGSEDYYSHERCTLIDALNVTRCALDFRDGEEVATGYKNMYSTNIFTKRAIALITNHPPEKPLFLYLALQSVHEPLQVPEEYLKPYDFIQDKNRHHYAGMVSLMDEAVGNVTAALKSSGLWNNTVFIFSTDNGGQTLAGGNNWPLRGRKWSLWEGGVRGVGFVASPLLKQKGVKNRELIHISDWLPTLVKLARGHTNGTKPLDGFDVWKTIRYLHPALFPPRTETPRAA

SEQ ID NO: 1101 - protein, 178 aa, Homo sapiens
MLHLHHSCLCFRSWLPAMLAVLLSLAPSASSDISASRPNILLLMADDLGIGDIGCYGNNTMRTPNIDRLAEDGVKLTQHISAASLCTPSRAAFLTGRYPVRSGMVSSIGYRVLQWTGASGGLPTNETTFAKILKEKGYATGLIGKWHLGLNCESASDHCHHPLHHGFDHFYGMPFSLM

SEQ ID NO: 1102 - protein, 589 aa, Homo sapiens
MLHLHHSCLCFRSWLPAMLAVLLSLAPSASSDISASRPNILLLMADDLGIGDIGCYGNNTMRTPNIDRLAEDGVKLTQHISAASLCTPSRAAFLTGRYPVRSGMVSSIGYRVLQWTGASGGLPTNETTFAKILKEKGYATGLIGKWHLGLNCESASDHCHHPLHHGFDHFYGMPFSLMGDCARWELSEKRVNLEQKLNFLFQVLALVALTLVAGKLTHLIPVSWMPVIWSALSAVLLLASSYFVGALIVHADCFLMRNHTITEQPMCFQRTTPLILQEVASFLKRNKHGPFLLFVSFLHVHIPLITMENFLGKSLHGLYGDNVEEMDWMVGRILDTLDVEGLSNSTLIYFTSDHGGSLENQLGNTQYGGWNGIYKGGKGMGGWEGGIRVPGIFRWPGVLPAGRVIGEPTSLMDVFPTVVRLAGGEVPQDRVIDGQDLLPLLLGTAQHSDHEFLMHYCERFLHAARWHQRDRGTMWKVHFVTPVFQPEGAGACYGRKVCPCFGEKVVHHDPPLLFDLSRDPSETHILTPASEPVFYQVMERVQQAVWEHQRTLSPVPLQLDRLGNIWRPWLQPCCGPFPLCWCLREDDPQ

SEQ ID NO: 1103 - protein, 614 aa, Homo sapiens
MRPVINRCAPGSLDLMLPQAASEGIVFHSLQISLCFRSWLPAMLAVLLSLAPSASSDISASRPNILLLMADDLGIGDIGCYGNNTMRTPNIDRLAEDGVKLTQHISAASLCTPSRAAFLTGRYPVRSGMVSSIGYRVLQWTGASGGLPTNETTFAKILKEKGYATGLIGKWHLGLNCESASDHCHHPLHHGFDHFYGMPFSLMGDCARWELSEKRVNLEQKLNFLFQVLALVALTLVAGKLTHLIPVSWMPVIWSALSAVLLLASSYFVGALIVHADCFLMRNHTITEQPMCFQRTTPLILQEVASFLKRNKHGPFLLFVSFLHVHIPLITMENFLGKSLHGLYGDNVEEMDWMVGRILDTLDVEGLSNSTLIYFTSDHGGSLENQLGNTQYGGWNGIYKGGKGMGGWEGGIRVPGIFRWPGVLPAGRVIGEPTSLMDVFPTVVRLAGGEVPQDRVIDGQDLLPLLLGTAQHSDHEFLMHYCERFLHAARWHQRDRGTMWKVHFVTPVFQPEGAGACYGRKVCPCFGEKVVHHDPPLLFDLSRDPSETHILTPASEPVFYQVMERVQQAVWEHQRTLSPVPLQLDRLGNIWRPWLQPCCGPFPLCWCLREDDPQ

SEQ ID NO: 1104 - protein, 544 aa, Homo sapiens
MSGSRERDNMLHLHHSWTPNIDRLAEDGVKLTQHISAASLCTPSRAAFLTGRYPVRSGMVSSIGYRVLQWTGASGGLPTNETTFAKILKEKGYATGLIGKWHLGLNCESASDHCHHPLHHGFDHFYGMPFSLMGDCARWELSEKRVNLEQKLNFLFQVLALVALTLVAGKLTHLIPVSWMPVIWSALSAVLLLASSYFVGALIVHADCFLMRNHTITEQPMCFQRTTPLILQEVASFLKRNKHGPFLLFVSFLHVHIPLITMENFLGKSLHGLYGDNVEEMDWMVGRILDTLDVEGLSNSTLIYFTSDHGGSLENQLGNTQYGGWNGIYKGGKGMGGWEGGIRVPGIFRWPGVLPAGRVIGEPTSLMDVFPTVVRLAGGEVPQDRVIDGQDLLPLLLGTAQHSDHEFLMHYCERFLHAARWHQRDRGTMWKVHFVTPVFQPEGAGACYGRKVCPCFGEKVVHHDPPLLFDLSRDPSETHILTPASEPVFYQVMERVQQAVWEHQRTLSPVPLQLDRLGNIWRPWLQPCCGPFPLCWCLREDDPQ

SEQ ID NO: 1105 - protein, 361 aa, Homo sapiens
MGCTDTPGYNHPPCPACPQGDGPSRNLQRDCYTDVALPLYENLNIVEQPVNLSSLAQKYAEKATQFIQRASTSGRPFLLYVALAHMHVPLPVTQLPAAPRGRSLYGAGLWEMDSLVGQIKDKVDHTVKENTFLWFTGDNGPWAQKCELAGSVGPFTGFWQTRQGGSPAKQTTWEGGHRVPALAYWPGRVPVNVTSTALLSVLDIFPTVVALAQASLPQGRRFDGVDVSEVLFGRSQPGHRVLFHPNSGAAGEFGALQTVRLERYKAFYITGGARACDGSTGPELQHKFPLIFNLEDDTAEAVPLERGGAEYQAVLPEVRKVLADVLQDIANDNISSADYTQDPSVTPCCNPYQIACRCQAA

SEQ ID NO: 1106 - protein, 29 aa, Homo sapiens
MGWLFLKVLLAGVSFSGFLYPLVDFCISG

SEQ ID NO: 1107 - protein, 525 aa, Homo sapiens
MGWLFLKVLLAGVSFSGFLYPLVDFCISGKTRGQKPNFVIILADDMGWGDLGANWAETKDTANLDKMASEGMRFVDFHAAASTCSPSRASLLTGRLGLRNGVTRNFAVTSVGGLPLNETTLAEVLQQAGYVTGIIGKWHLGHHGSYHPNFRGFDYYFGIPYSHDMGCTDTPGYNHPPCPACPQGDGPSRNLQRDCYTDVALPLYENLNIVEQPVNLSSLAQKYAEKATQFIQRASTSGRPFLLYVALAHMHVPLPVTQLPAAPRGRSLYGAGLWEMDSLVGQIKDKVDHTVKENTFLWFTGDNGPWAQKCELAGSVGPFTGFWQTRQGGSPAKQTTWEGGHRVPALAYWPGRVPVNVTSTALLSVLDIFPTVVALAQASLPQGRRFDGVDVSEVLFGRSQPGHRVLFHPNSGAAGEFGALQTVRLERYKAFYITGGARACDGSTGPELQHKFPLIFNLEDDTAEAVPLERGGAEYQAVLPEVRKVLADVLQDIANDNISSADYTQDPSVTPCCNPYQIACRCQAA

SEQ ID NO: 1108 - protein, 525 aa, Homo sapiens; identical to SEQ ID NO: 1107

SEQ ID NO: 1109 - protein, 569 aa, Homo sapiens
MHTLTGFSLVSLLSFGYLSWDWAKPSFVADGPGEAGEQPSAAPPQPPHIIFILTDDQGYHDVGYHGSDIETPTLDRLAAKGVKLENYYIQPICTPSRSQLLTGRYQIHTGLQHSIIRPQQPNCLPLDQVTLPQKLQEAGYSTHMVGKWHLGFYRKECLPTRRGFDTFLGSLTGNVDYYTYDNCDGPGVCGFDLHEGENVAWGLSGQYSTMLYAQRASHILASHSPQRPLFLYVAFQAVHTPLQSPREYLYRYRTMGNVARRKYAAMVTCMDEAVRNITWALKRYGFYNNSVIIFSSDNGGQTFSGGSNWPLRGRKGTYWEGGVRGLGFVHSPLLKRKQRTSRALMHITDWYPTLVGLAGGTTSAADGLDGYDVWPAISEGRASPRTEILHNIDPLYNHAQHGSLEGGFGIWNTAVQAAIRVGEWKLLTGDPGYGDWIPPQTLATFPGSWWNLERMASVRQAVWLFNISADPYEREDLAGQRPDVVRTLLARLAEYNRTAIPVRYPAENPRAHPDFNGGAWGPWASDEEEEEEEGRARSFSRGRRKKKCKICKLRSFFRKLNTRLMSQRI

SEQ ID NO: 1110 - protein, 86 aa, Homo sapiens
MVGKWHLGFYRKECLPTRRGFDTFLGSLTGNVDYYTYDNCDGPGVCGFDLHEGENVAWGLSGQYSTMLYAQRASHILASHSPQRPL

SEQ ID NO: 1111 - protein, 426 aa, Homo sapiens
MVGKWHLGFYRKECLPTRRGFDTFLGSLTGNVDYYTYDNCDGPGVCGFDLHEGENVAWGLSGQYSTMLYAQRASHILASHSPQRPLFLYVAFQAVHTPLQSPREYLYRYRTMGNVARRKYAAMVTCMDEAVRNITWALKRYGFYNNSVIIFSSDNGGQTFSGGSNWPLRGRKGTYWEGGVRGLGFVHSPLLKRKQRTSRALMHITDWYPTLVGLAGGTTSAADGLDGYDVWPAISEGRASPRTEILHNIDPLYNHAQHGSLEGGFGIWNTAVQAAIRVGEWKLLTGDPGYGDWIPPQTLATFPGSWWNLERMASVRQAVWLFNISADPYEREDLAGQRPDVVRTLLARLAEYNRTAIPVRYPAENPRAHPDFNGGAWGPWASDEEEEEEEGRARSFSRGRRKKKCKICKLRSFFRKLNTRLMSQRI

SEQ ID NO: 1112 - protein, 153 aa, Homo sapiens
MLLLWVSVVAALALAVLAPGAGEQRRRAAKAPNVVLVVSDSFDGRLTFHPGSQVVKLPFINFMKTRGTSFLNAYTNSPICCPSRAAMWSGLFTHLTESWNNFKGLDPNYTTWMDVMERHGYRTQKFGKLDYTSGHHSIRHSERGSTNQRSEKV

SEQ ID NO: 1113 - protein, 536 aa, Homo sapiens
MLLLWVSVVAALALAVLAPGAGEQRRRAAKAPNVVLVVSDSFDGRLTFHPGSQVVKLPFINFMKTRGTSFLNAYTNSPICCPSRAAMWSGLFTHLTESWNNFKGLDPNYTTWMDVMERHGYRTQKFGKLDYTSGHHSISNRVEAWTRDVAFLLRQEGRPMVNLIRNRTKVRVMERDWQNTDKAVNWLRKEAINYTEPFVIYLGLNLPHPYPSPSSGENFGSSTFHTSLYWLEKVSHDAIKIPKWSPLSEMHPVDYYSSYTKNCTGRFTKKEIKNIRAFYYAMCAETDAMLGEIILALHQLDLLQKTIVIYSSDHGELAMEHRQFYKMSMYEASAHVPLLMMGPGIKAGLQVSNVVSLVDIYPTMLDIAGIPLPQNLSGYSLLPLSSETFKNEHKVKNLHPPWILSEFHGCNVNASTYMLRTNHWKYIAYSDGASILPQLFDLSSDPDELTNVAVKFPEITYSLDQKLHSIINYPKVSASVHQYNKEQFIKWKQSIGQNYSNVIANLRWHQDWQKEPRKYENAIDQWLKTHMNPRAV

SEQ ID NO: 1114 - protein, 395 aa, Homo sapiens
MLLLWVSVVAALALAVLAPGAGEQRRRAAKAPNVVLVVSDSFDGRLTFHPGSQVVKLPFINFMKTRGTSFLNAYTNSPICCPSRAAMWSGLFTHLTESWNNFKGLDPNYTTWMDVMERHGYRTQKFGKLDYTSGHHSISNRVEAWTRDVAFLLRQEGRPMVNLIRNRTKVRVMERDWQNTDKAVNWLRKEAINYTEPFVIYLGLNLPHPYPSPSSGENFGSSTFHTSLYWLEKVSHDAIKIPKWSPLSEMHPVDYYSSYTKNCTGRFTKKEIKNIRAFYYAMCAETDAMLGEIILALHQLDLLQKTIVIYSSDHGELAMEHRQFYKMSMYEASAHVPLLMMGPGIKAGLQVSNVVSLVDIYPTMLDEKTEVEISKLLAEVHMASGILLEFLCLRT

SEQ ID NO: 1115 - protein, 46 aa, Homo sapiens
MLLLWVSVVAALALAVLAPGAGEQRRRAAKAPNVVLVVSDSFIPDD

SEQ ID NO: 1116 - protein, 92 aa, Homo sapiens
RAAKAPNVVLVVSDSFDGRLTFHPGSQVVKLPFINFMKTRGTSFLNAYTNSPICCPSRAVIVWKRGQEMLLSYSDKKAGPWLILSVTGLKSE

SEQ ID NO: 1117 - protein, 117 aa, Homo sapiens
KTCSHYECAFLGGLKTENCIENLEYFQPIYVYNPGEKNQKLEDHSEKNWKLEDHGEKNQKLEDHGVKILEPTQIPGMKIPEPFPLPGIKMIQLNEKPEDKSQGNINNPTPGPVPVPG

SEQ ID NO: 1118 - protein, 107 aa, Homo sapiens
MKTGHFEIVTMLLATMILVDIFQVKAEVLDMADNAFDDEYLKCTDRMEIKYVPQLLKEEKASHQQLDTVWENAKAKWAARKTQIFLPMNFKDNHGIALMAYISEAQE

SEQ ID NO: 1119 - protein, 129 aa, Homo sapiens
MKTGHFEIVTMLLATMILVDIFQVKAEVLDMADNAFDDEYLKCTDRMEIKYVPQLLKEEKASHQQLDTVWENAKAKWAARKTQIFLPMNFKDNHGIALMAYISEAQEQTPFYHLFSEAVKMAGQSREDY

SEQ ID NO: 1120 - protein, 175 aa, Homo sapiens
MKTGHFEIVTMLLATMILVDIFQVKAEVLDMADNAFDDEYLKCTDRMEIKYVPQLLKEEKASHQQLDTVWENAKAKWAARKTQIFLPMNFKDNHGIALMAYISEAQEQTPFYHLFSEAVKMAGQSREDYIYGFQFKAFHFYLTRALQLLRKPCEASSKTVVYRTSQGTSFTFGGL

SEQ ID NO: 1121 - protein, 202 aa, Homo sapiens
MKTGHFEIVTMLLATMILVDIFQVKAEVLDMADNAFDDEYLKCTDRMEIKYVPQLLKEEKASHQQLDTVWENAKAKWAARKTQIFLPMNFKDNHGIALMAYISEAQEQTPFYHLFSEAVKMAGQSREDYIYGFQFKAFHFYLTRALQLLRKPCEASSKTVVYRTSQGTSFTFGGLNQARFGHFTLAYSAKPQAANDQLTVLS

SEQ ID NO: 1122 - protein, 389 aa, Homo sapiens
MKTGHFEIVTMLLATMILVDIFQVKAEVLDMADNAFDDEYLKCTDRMEIKYVPQLLKEEKASHQQLDTVWENAKAKWAARKTQIFLPMNFKDNHGIALMAYISEAQEQTPFYHLFSEAVKMAGQSREDYIYGFQFKAFHFYLTRALQLLRKPCEASSKTVVYRTSQGTSFTFGGLNQARFGHFTLAYSAKPQAANDQLTVLSIYTCLGVDIENFLDKESERITLIPLNEVFQVSQEGAGNNLILQSINKTCSHYECAFLGGLKTENCIENLEYFQPIYVYNPGEKNQKLEDHSEKNWKLEDHGEKNQKLEDHGVKILEPTQIPGMKIPEPFPLPEDKSQGNINNPTPGPVPVPGPKSHPSASSGKLLLPQFGMVIILISVSAINLFVAL

SEQ ID NO: 1123 - protein, 378 aa, Homo sapiens
MKTGHFEIVTMLLATMILVDIFQVKAEVLDMADNAFDDEYLKCTDRMEIKYVPQLLKEEKASHQQLDTVWENAKAKWAARKTQIFLPMNFKDNHGIALMAYISEAQEQTPFYHLFSEAVKMAGQSREDYIYGFQFKAFHFYLTRALQLLRKPCEASSKTVVYRTSQGTSFTFGGLNQARFGHFTLAYSAKPQAANDQLTVLSIYTCLGVDIENFLDKESERITLIPLNEVFQVSQEGAGNNLILQSINKTCSHYECAFLGGLKTENCIENLEYFQPIYVYNPGEKNQKLEDHSEKNWKLEDHGEKNQKLEDHGVKILEPTQIPEDKSQGNINNPTPGPVPVPGPKSHPSASSGKLLLPQFGMVIILISVSAINLFVAL

SEQ ID NO: 1124 - protein, 367 aa, Homo sapiens
MKTGHFEIVTMLLATMILVDIFQVKAEVLDMADNAFDDEYLKCTDRMEIKYVPQLLKEEKASHQQLDTVWENAKAKWAARKTQIFLPMNFKDNHGIALMAYISEAQEQTPFYHLFSEAVKMAGQSREDYIYGFQFKAFHFYLTRALQLLRKPCEASSKTVVYRTSQGTSFTFGGLNQARFGHFTLAYSAKPQAANDQLTVLSIYTCLGVDIENFLDKESERITLIPLNEVFQVSQEGAGNNLILQSINKTCSHYECAFLGGLKTENCIENLEYFQPIYVYNPGEKNQKLEDHSEKNWKLEDHGEKNQKLEDHGVKILEPTQIPAPGPVPVPGPKSHPSASSGKLLLPQFGMVIILISVSAINLFVAL

SEQ ID NO: 1125 - protein, 314 aa, Homo sapiens
MGPLINRCKKILLPTTVPPATMRIWLLGGLLPFLLLLSGLQRPTEGSEVAIKIDFDFAPGSFDDQYQGCSKQVMEKLTQGDYFTKDIEAQKNYFRMWQKAHLAWLNQGKVLPQNMTTTHAVAILFYTLNSNVHSDFTRAMASVARTPQQYERSFHFKYLHYYLTSAIQLLRKDSIMENGTLCYEVHYRTKDVHFNAYTGATIRFGQFLSTSLLKEEAQEFGNQTLFTIFTCLGAPVQYFSLKKEVLIPPYELFKVINMSYHPRGDWLQLRSTGNLSTYNCQLLKASSKKCIPDPIAIASLSFLTSVIIFSKSRV

SEQ ID NO: 1126 - protein, 41 aa, Homo sapiens
PPATMRIWLLGGLLPFLLLLSGLQRPTEGSELPARNASLIL

SEQ ID NO: 1127 - protein, 65 aa, Homo sapiens
PPATMRIWLLGGLLPFLLLLSGLQRPTEGSEVAIKIDFDFAPGSFDDQYQGCSKQLPARNASLIL

SEQ ID NO: 1128 - protein, 273 aa, Homo sapiens
PPATMRIWLLGGLLPFLLLLSGLQRPTEGSEVAIKIDFDFAPGSFDDQYQGCSKQVMEKLTQGDYFTKDIEAQKNYFRMWQKAHLAWLNQGKVLPQNMTTTHAVAILFYTLNSNVHSDFTRAMASVARTPQQYERSFHFKYLHYYLTSAIQLLRKDSIMENGTLCYEVHYRTKDVHFNAYTGATIRFGQFLSTSLLKEEAQEFGNQTLFTIFTCLGAPVQYFSLKKEVLIPPYELFKVINMSYHPRGDWLQLRSTGNLSTYNCQLLKGILYLN

SEQ ID NO: 1129 - protein, 152 aa, Homo sapiens
AVPILPLGLAPDTFDDTYVGCAEEMEEKAAPLLKEEMAHHALLRESWEAAQETWEDKRRGLTLPPGFKAQNGIAIMVYTNSSNTLYWELNQAAFSVFPKEREVLIPPHEVFLVTRFSQDGAQSLVTLWSYNQTCSHFNCAYLGGEKRRGCVS

SEQ ID NO: 1130 - protein, 239 aa, Homo sapiens
MALAALMIALGSLGLHTWQAQAVPILPLGLAPDTFDDTYVGCAEEMEEKAAPLLKEEMAHHALLRESWEAAQETWEDKRRGLTLPPGFKAQNGIAIMVYTNSSNTLYWELNQAVRTGGGSRELYMRHFPFKALHFYLIRALQLLRGSGGCSRGPGEVVFRGVGSLRFEPKRLGDSVRLGQFASSSLDKAVAHRFGEKRRGCVSAPGVQLGSQSEGASSLPPWKTLLLAPGEFQLSGVGP

SEQ ID NO: 1131 - protein, 291 aa, Homo sapiens
MALAALMIALGSLGLHTWQAQAVPILPLGLAPDTFDDTYVGCAEEMEEKAAPLLKEEMAHHALLRESWEAAQETWEDKRRGLTLPPGFKAQNGIAIMVYTNSSNTLYWELNQAVRTGGGSRELYMRHFPFKALHFYLIRALQLLRGSGGCSRGPGEVVFRGVGSLRFEPKRLGDSVRLGQFASSSLDKAVAHRFGNATLFSLTTCFGAPIQAFSVFPKEREVLIPPHEVFLVTRFSQDGAQSLVTLWSYNQTCSHFNCAYLGGEKRRGCVSAPGALGTGDLHMTKRHLQQP

SEQ ID NO: 1132 - protein, 291 aa, Homo sapiens; identical to SEQ ID NO: 1131

SEQ ID NO: 1133 - protein, 264 aa, Homo sapiens
  SITE 1: note = misc_feature - Xaa can be any naturally occurring amino acid
XEMEEKAAPLLKEEMAHHALLRESWEAAQETWEDKRRGLTLPPGFKAQNGIAIMVYTNSSNTLYWELNQAVRTGGGSRELYMRHFPFKALHFYLIRALQLLRGSGGCSRGPGEVVFRGVGSLRFEPKRLGDSVRLGQFASSSLDKAVAHRFGNATLFSLTTCFGAPIQAFSVFPKEREVLIPPHEVFLVTRFSQDGAQSLVTLWSYNQTCSHFNCAYLGGEKRRGCVSAPGVQLGSQSEGASSLPPWKTLLLAPGEFQLSGVGP

SEQ ID NO: 1134 - protein, 89 aa, Homo sapiens
MELGLGGLSTLSHCPWPRQQAPLGLSAQPALWPTLAALALLSSVAEASLGSAPRSPAPREGPPPVLASPAGHLPGGRTARWCSGRARRP

SEQ ID NO: 1135 - protein, 89 aa, Homo sapiens; identical to SEQ ID NO: 1134

SEQ ID NO: 1136 - protein, 228 aa, Homo sapiens
MELGLGGLSTLSHCPWPRQQAPLGLSAQPALWPTLAALALLSSVAEASLGSAPRSPAPREGPPPVLASPAGHLPGGRTARWCSGRARRPPPQPSRPAPPPPAPPSALPRGGRAARAGGPGSRARAAGARGCRLRSQLVPVRALGLGHRSDELVRFRFCSGSCRRARSPHDLSLASLLGAGALRPPPGSRPVSQPCCRPTRYEAVSFMDVNSTWRTVDRLSATACGCLG

SEQ ID NO: 1137 - protein, 228 aa, Homo sapiens; identical to SEQ ID NO: 1136

SEQ ID NO: 1138 - protein, 76 aa, Homo sapiens
MELGLGGLSTLSHCPWPRQQAPLGLSAQPALWPTLAALALLSSVAEASLGSAPRSPAPREGPPPVLASPAGHLPGR

SEQ ID NO: 1139 - protein, 76 aa, Homo sapiens; identical to SEQ ID NO: 1138

SEQ ID NO: 1140 - protein, 66 aa, Homo sapiens
MELGLGGLSTLSHCPWPRQQPALWPTLAALALLSSVAEASLGSAPRSPAPREGPPPVLASPAGHLP

SEQ ID NO: 1141 - protein, 66 aa, Homo sapiens; identical to SEQ ID NO: 1140

SEQ ID NO: 1142 - protein, 220 aa, Homo sapiens
MELGLGGLSTLSHCPWPRQQPALWPTLAALALLSSVAEASLGSAPRSPAPREGPPPVLASPAGHLPGGRTARWCSGRARRPPPQPSRPAPPPPAPPSALPRGGRAARAGGPGSRARAAGARGCRLRSQLVPVRALGLGHRSDELVRFRFCSGSCRRARSPHDLSLASLLGAGALRPPPGSRPVSQPCCRPTRYEAVSFMDVNSTWRTVDRLSATACGCLG

SEQ ID NO: 1143 - protein, 220 aa, Homo sapiens; identical to SEQ ID NO: 1142

SEQ ID NO: 1144 - protein, 237 aa, Homo sapiens
MPGLISARGQPLLEVLPPQAHLGALFLPEAPLGLSAQPALWPTLAALALLSSVAEASLGSAPRSPAPREGPPPVLASPAGHLPGGRTARWCSGRARRPPPQPSRPAPPPPAPPSALPRGGRAARAGGPGSRARAAGARGCRLRSQLVPVRALGLGHRSDELVRFRFCSGSCRRARSPHDLSLASLLGAGALRPPPGSRPVSQPCCRPTRYEAVSFMDVNSTWRTVDRLSATACGCLG

SEQ ID NO: 1145 - protein, 31 aa, Homo sapiens
GRAVDRGLQKINLSSFRTNVQRCSSMVHHKS

SEQ ID NO: 1146 - protein, 125 aa, Homo sapiens
MLDKAPVLKVIVNSLKNMINTFVPSGKIMQVVDEKLPGLLGNFPGPFEEEMKGIAAVTDIPLGEIISFNIFYELFTICTSIVAEDKKGHLIHGRNMDFGVFLGWNINNDTWVITEQLKPLTVNLD

SEQ ID NO: 1147 - protein, 151 aa, Homo sapiens
MLDKAPVLKVIVNSLKNMINTFVPSGKIMQVVDEKLPGLLGNFPGPFEEEMKGIAAVTDIPLGEIISFNIFYELFTICTSIVAEDKKGHLIHGRNMDFGVFLGWNINNDTWVITEQLKPLTVNLDFQRNNKTVFKASSFAGYVGMLTGFKP

SEQ ID NO: 1148 - protein, 330 aa, Homo sapiens
MLDKAPVLKVIVNSLKNMINTFVPSGKIMQVVDEKLPGLLGNFPGPFEEEMKGIAAVTDIPLGEIISFNIFYELFTICTSIVAEDKKGHLIHGRNMDFGVFLGWNINNDTWVITEQLKPLTVNLDFQRNNKTVFKASSFAGYVGMLTGFKPGLFSLTLNERFSINGGYLGILEWILGKKDVMWIGFLTRTVLENSTSYEEAKNLLTKTKILAPAYFILGGNQSGEGCVITRDRKESLDVYELDAKQGRWYVVQTNYDRWKHPFFLDDRRTPAKMCLNRTSQENISFETMYDVLSTKPVLNKLTVYTTLIDVTKGQFETYLRDCPDPCIGW

SEQ ID NO: 1149 - protein, 330 aa, Homo sapiens; identical to SEQ ID NO: 1148

SEQ ID NO: 1150 - protein, 110 aa, Homo sapiens
MLDKAPVLKVIVNSLKNMINTFVPSGKIMQVVDEKLPGLLGNFPGPFEEEMKGIAAVTDIPLGKVHLEALKKKVIKFFYKFPLRCDIHTAQVLYVLDIQHRCTGLRYTAQ

SEQ ID NO: 1151 - protein, 110 aa, Homo sapiens; identical to SEQ ID NO: 1150

SEQ ID NO: 1152 - protein, 187 aa, Homo sapiens
MNCCIGLGEKARGSHRASYPSLSALFTEASILGFGSFAVKAQVAWKALSLSLRHPFRGTEKPRPLLPVPPPPSVPPTAWNGAVPGRGSRGGGGVACPRPSRLFFASAGVRGVALAARAMPGRSCVALVLLAAAVSCAVAQHAPPWTEDCRKSTYPPSGPTYRGAVPWYTINLDLPPYKRWHELMLDK

SEQ ID NO: 1153 - protein, 72 aa, Homo sapiens
MNCCIGLGEKARGSHRASYPSLSALFTEASILGFGSFAVKAQVGNQQLGGPEWIRFSLTPRPLNCSLSLTPR

SEQ ID NO: 1154 - protein, 97 aa, Homo sapiens
MNCCIGLGEKARGSHRASYPSLSALFTEASILGFGSFAVKAQVGNQQLGGPEWIRFSLTPRPLNCSLSLTPRGQRTAENQPILLQDQRTEVQFHGTP

SEQ ID NO: 1155 - protein, 74 aa, Homo sapiens
MNCCIGLGEKARGSHRASYPSLSALFTEASILGFGSFAVKAQVGNQQLGGPEWIRFSLTPRPLNCSLSLTPRWG

SEQ ID NO: 1156 - protein, 74 aa, Homo sapiens; identical to SEQ ID NO: 1155

SEQ ID NO: 1157 - protein, 74 aa, Homo sapiens; identical to SEQ ID NO: 1155

SEQ ID NO: 1158 - protein, 74 aa, Homo sapiens; identical to SEQ ID NO: 1155

SEQ ID NO: 1159 - protein, 74 aa, Homo sapiens; identical to SEQ ID NO: 1155

SEQ ID NO: 1160 - protein, 71 aa, Homo sapiens
MNCCIGLGEKARGSHRASYPSLSALFTEASILGFGSFAVKAQVVDRGLQKINLSSFRTNVQRCSSMVHHKS

SEQ ID NO: 1161 - protein, 58 aa, Homo sapiens
MNCCIGLGEKARGSHRASYPSLSALFTEASILGFGSFAVKAQWTEDCRKSTYPPSGPT

SEQ ID NO: 1162 - protein, 59 aa, Homo sapiens
MNCCIGLGEKARGSHRASYPSLSALFTEASILGFGSFAVKAQWTEDCRKSTYPPSGPTL

SEQ ID NO: 1163 - protein, 389 aa, Homo sapiens
MNCCIGLGEKARGSHRASYPSLSALFTEASILGFGSFAVKAQWTEDCRKSTYPPSGPTVFPAVIRYRGAVPWYTINLDLPPYKRWHELMLDKAPVPGLLGNFPGPFEEEMKGIAAVTDIPLGEIISFNIFYELFTICTSIVAEDKKGHLIHGRNMDFGVFLGWNINNDTWVITEQLKPLTVNLDFQRNNKTVFKASSFAGYVGMLTGFKPGLFSLTLNERFSINGGYLGILEWILGKKDVMWIGFLTRTVLENSTSYEEAKNLLTKTKILAPAYFILGGNQSGEGCVITRDRKESLDVYELDAKQGRWYVVQTNYDRWKHPFFLDDRRTPAKMCLNRTSQENISFETMYDVLSTKPVLNKLTVYTTLIDVTKGQFETYLRDCPDPCIGW

SEQ ID NO: 1164 - protein, 411 aa, Homo sapiens
MNCCIGLGEKARGSHRASYPSLSALFTEASILGFGSFAVKAQWTEDCRKSTYPPSGPTYRGAVPWYTINLDLPPYKRWHELMLDKAPVLKVIVNSLKNMINTFVPSGKIMQVVDEKLPGLLGNFPGPFEEEMKGIAAVTDIPLGEIISFNIFYELFTICTSIVAEDKKGHLIHGRNMDFGVFLGWNINNDTWVITEQLKPLTVNLDFQRNNKTVFKASSFAGYVGMLTGFKPGLFSLTLNERFSINGGYLGILEWILGKKDVMWIGFLTRTVLENSTSYEEAKNLLTKTKILAPAYFILGGNQSGEGCVITRDRKESLDVYELDAKQGRWYVVQTNYDRWKHPFFLDDRRTPAKMCLNRTSQENISFETMYDVLSTKPVLNKLTVYTTLIDVTKGQFETYLRDCPDPCIGW

SEQ ID NO: 1165 - protein, 341 aa, Homo sapiens
MNCCIGLGEKARGSHRASYPSLSALFTEASILGFGSFAVKAQWTEDCRKSTYPPSGPTYRGAVPWYTINLDLPPYKRWHELMLDKAPVLKVIVNSLKNMINTFVPSGKIMQVVDEKLPGLLGNFPGPFEEEMKGIAAVTDIPLGEIISFNIFYELFTICTSIVAEDKKGHLIHGRNMDFGVFLGWNINNDTWVITEQLKPLTVNLDFQRNNKTVFKASSFAGYVGMLTGFKPGLFSLTLNERFSINGGYLGILEWILGKKDVMWIGFLTRTVLENSTSYEEAKNLLTKTKILAPAYFILGGNQSGEGCVITRDRKESLDVYEISHLKPCMMSCQQNLSSTS

SEQ ID NO: 1166 - protein, 386 aa, Homo sapiens
MNCCIGLGEKARGSHRASYPSLSALFTEASILGFGSFAVKAQWTEDCRKSTYPPSGPTYRGAVPWYTINLDLPPYKRWHELMLDKAPVLKVIVNSLKNMINTFVPSGKIMQVVDEKLPGLLGNFPGPFEEEMKGIAAVTDIPLGHLIHGRNMDFGVFLGWNINNDTWVITEQLKPLTVNLDFQRNNKTVFKASSFAGYVGMLTGFKPGLFSLTLNERFSINGGYLGILEWILGKKDVMWIGFLTRTVLENSTSYEEAKNLLTKTKILAPAYFILGGNQSGEGCVITRDRKESLDVYELDAKQGRWYVVQTNYDRWKHPFFLDDRRTPAKMCLNRTSQENISFETMYDVLSTKPVLNKLTVYTTLIDVTKGQFETYLRDCPDPCIGW

SEQ ID NO: 1167 - protein, 191 aa, Homo sapiens
MNCCIGLGEKARGSHRASYPSLSALFTEASILGFGSFAVKAQWTEDCRKSTYPPSGPTYRGAVPWYTINLDLPPYKRWHELMLDKAPVLKVIVNSLKNMINTFVPSGKIMQVVDEKLPGLLGNFPGPFEEEMKGIAAVTDIPLGKVHLEALKKKVIKFFYKFPLRCDIHTAQVLYVLDIQHRCTGLRYTAQ

SEQ ID NO: 1168 - protein, 140 aa, Homo sapiens
MNCCIGLGEKARGSHRASYPSLSALFTEASILGFGSFAVKAQWTEDCRKSTYPPSGPTYRGAVPWYTINLDLPPYKRWHELMLDKAPVVIVNSLKNMINTFVPSGKIMQVVDEKLPGLLGNFPGPFEEEMKGIAAVTDIP

SEQ ID NO: 1169 - protein, 49 aa, Homo sapiens
MPGRSCVALVLLAAAVSCAVAQHAPPRTAENQPILLQDQRTEVQFHGTP

SEQ ID NO: 1170 - protein, 81 aa, Homo sapiens
MPGRSCVALVLLAAAVSCAVAQHAPPVSELEPRRREGRAGAGADGGAGVAARAVDRGLQKINLSSFRTNVQRCSSMVHHKS

SEQ ID NO: 1171 - protein, 75 aa, Homo sapiens
MPGRSCVALVLLAAAVSCAVAQHAPPVSELEPRRREGRAGAGADGGAVDRGLQKINLSSFRTNVQRCSSMVHHKS

SEQ ID NO: 1172 - protein, 75 aa, Homo sapiens; identical to SEQ ID NO: 1171

SEQ ID NO: 1173 - protein, 67 aa, Homo sapiens
MPGRSCVALVLLAAAVSCAVAQHAPPVSELEPRRREGRAVDRGLQKINLSSFRTNVQRCSSMVHHKS

SEQ ID NO: 1174 - protein, 42 aa, Homo sapiens
MPGRSCVALVLLAAAVSCAVAQHAPPWTEDCRKSTYPPSGPT

SEQ ID NO: 1175 - protein, 42 aa, Homo sapiens; identical to SEQ ID NO: 1174

SEQ ID NO: 1176 - protein, 42 aa, Homo sapiens; identical to SEQ ID NO: 1174

SEQ ID NO: 1177 - protein, 56 aa, Homo sapiens
MPGRSCVALVLLAAAVSCAVAQHAPPWTEDCRKSTYPPSGPTLAYLATFLALLKRK

SEQ ID NO: 1178 - protein, 184 aa, Homo sapiens
MPGRSCVALVLLAAAVSCAVAQHAPPWTEDCRKSTYPPSGPTVFPAVIRYRGAVPWYTINLDLPPYKRWHELMLDKAPVLKVIVNSLKNMINTFVPSGKIMQVVDEKLPGLLGNFPGPFEEEMKGIAAVTDIPLGEIISFNIFYELFTICTSIVAEDKKGHLIHGRNMDFGVFLGWNINNDTWV

SEQ ID NO: 1179 - protein, 62 aa, Homo sapiens
MPGRSCVALVLLAAAVSCAVAQHAPPWTEDCRKSTYPPSGPTYRGAVPWYTINLDLPPYKRC

SEQ ID NO: 1180 - protein, 185 aa, Homo sapiens
MPGRSCVALVLLAAAVSCAVAQHAPPWTEDCRKSTYPPSGPTYRGAVPWYTINLDLPPYKRWHELMLDKAPVLKVIVNSLKNMINTFVPSGKIMQVVDEKLPGLLGNFPGPFEEEMKGEIISFNIFYELFTICTSIVAEDKKGHLIHGRNMDFGVFLGWNINNDTWVITEQLKPLTVNLDFQRNN

SEQ ID NO: 1181 - protein, 375 aa, Homo sapiens
MPGRSCVALVLLAAAVSCAVAQHAPPWTEDCRKSTYPPSGPTYRGAVPWYTINLDLPPYKRWHELMLDKAPVLKVIVNSLKNMINTFVPSGKIMQVVDEKLPGLLGNFPGPFEEEMKGIAAVTDIPLAEDKKGHLIHGRNMDFGVFLGWNINNDTWVITEQLKPLTVNLDFQRNNKTVFKASSFAGYVGMLTGFKPGLFSLTLNERFSINGGYLGILEWILGKKDVMWIGFLTRTVLENSTSYEEAKNLLTKTKILAPAYFILGGNQSGEGCVITRDRKESLDVYELDAKQGRWYVVQTNYDRWKHPFFLDDRRTPAKMCLNRTSQENISFETMYDVLSTKPVLNKLTVYTTLIDVTKGQFETYLRDCPDPCIGW

SEQ ID NO: 1182 - protein, 374 aa, Homo sapiens
MPGRSCVALVLLAAAVSCAVAQHAPPWTEDCRKSTYPPSGPTYRGAVPWYTINLDLPPYKRWHELMLDKAPVLKVIVNSLKNMINTFVPSGKIMQVVDEKLPGLLGNFPGPFEEEMKGIAAVTDIPLEDKKGHLIHGRNMDFGVFLGWNINNDTWVITEQLKPLTVNLDFQRNNKTVFKASSFAGYVGMLTGFKPGLFSLTLNERFSINGGYLGILEWILGKKDVMWIGFLTRTVLENSTSYEEAKNLLTKTKILAPAYFILGGNQSGEGCVITRDRKESLDVYELDAKQGRWYVVQTNYDRWKHPFFLDDRRTPAKMCLNRTSQENISFETMYDVLSTKPVLNKLTVYTTLIDVTKGQFETYLRDCPDPCIGW

SEQ ID NO: 1183 - protein, 395 aa, Homo sapiens
MPGRSCVALVLLAAAVSCAVAQHAPPWTEDCRKSTYPPSGPTYRGAVPWYTINLDLPPYKRWHELMLDKAPVLKVIVNSLKNMINTFVPSGKIMQVVDEKLPGLLGNFPGPFEEEMKGIAAVTDIPLGEIISFNIFYELFTICTSIVAEDKKGHLIHGRNMDFGVFLGWNINNDTWVITEQLKPLTVNLDFQRNNKTVFKASSFAGYVGMLTGFKPGLFSLTLNERFSINGGYLGILEWILGKKDVMWIGFLTRTVLENSTSYEEAKNLLTKTKILAPAYFILGGNQSGEGCVITRDRKESLDVYELDAKQGRWYVVQTNYDRWKHPFFLDDRRTPAKMCLNRTSQENISFETMYDVLSTKPVLNKLTVYTTLIDVTKGQFETYLRDCPDPCIGW

SEQ ID NO: 1184 - protein, 395 aa, Homo sapiens; identical to SEQ ID NO: 1183

SEQ ID NO: 1185 - protein, 395 aa, Homo sapiens; identical to SEQ ID NO: 1183

SEQ ID NO: 1186 - protein, 173 aa, Homo sapiens
MPGRSCVALVLLAAAVSCAVAQHAPPWTEDCRKSTYPPSGPTYRGAVPWYTINLDLPPYKRWHELMLDKAPVLKVIVNSLKNMINTFVPSGKIMQVVDEKLPGLLGNFPGPFEEEMKGIAAVTDIPLGEIISFNIFYELFTICTSIVAEDKKGNCALREGGQHEALHKEKSSK

SEQ ID NO: 1187 - protein, 370 aa, Homo sapiens
MPGRSCVALVLLAAAVSCAVAQHAPPWTEDCRKSTYPPSGPTYRGAVPWYTINLDLPPYKRWHELMLDKAPVLKVIVNSLKNMINTFVPSGKIMQVVDEKLPGLLGNFPGPFEEEMKGIAAVTDIPLGHLIHGRNMDFGVFLGWNINNDTWVITEQLKPLTVNLDFQRNNKTVFKASSFAGYVGMLTGFKPGLFSLTLNERFSINGGYLGILEWILGKKDVMWIGFLTRTVLENSTSYEEAKNLLTKTKILAPAYFILGGNQSGEGCVITRDRKESLDVYELDAKQGRWYVVQTNYDRWKHPFFLDDRRTPAKMCLNRTSQENISFETMYDVLSTKPVLNKLTVYTTLIDVTKGQFETYLRDCPDPCIGW

SEQ ID NO: 1188 - protein, 288 aa, Homo sapiens
MPGRSCVALVLLAAAVSCAVAQHAPPWTEDCRKSTYPPSGPTYRGAVPWYTINLDLPPYKRWHELMLDKAPVLKVIVNSLKNMINTFVPSGKIMQVVDEKLPGLLGNFPGPFEEEMKGIAAVTDIPLGILEWILGKKDVMWIGFLTRTVLENSTSYEEAKNLLTKTKILAPAYFILGGNQSGEGCVITRDRKESLDVYELDAKQGRWYVVQTNYDRWKHPFFLDDRRTPAKMCLNRTSQENISFETMYDVLSTKPVLNKLTVYTTLIDVTKGQFETYLRDCPDPCIGW

SEQ ID NO: 1189 - protein, 175 aa, Homo sapiens
MPGRSCVALVLLAAAVSCAVAQHAPPWTEDCRKSTYPPSGPTYRGAVPWYTINLDLPPYKRWHELMLDKAPVLKVIVNSLKNMINTFVPSGKIMQVVDEKLPGLLGNFPGPFEEEMKGIAAVTDIPLGKVHLEALKKKVIKFFYKFPLRCDIHTAQVLYVLDIQHRCTGLRYTAQ

SEQ ID NO: 1190 - protein, 376 aa, Homo sapiens
MPGRSCVALVLLAAAVSCAVAQHAPPWTEDCRKSTYPPSGPTYRGAVPWYTINLDLPPYKRWHELMLDKAPVLKVIVNSLKNMINTFVPSGKIMQVVDEKLPGLLGNFPGPFEEEMKGIAAVTDIPLVAEDKKGHLIHGRNMDFGVFLGWNINNDTWVITEQLKPLTVNLDFQRNNKTVFKASSFAGYVGMLTGFKPGLFSLTLNERFSINGGYLGILEWILGKKDVMWIGFLTRTVLENSTSYEEAKNLLTKTKILAPAYFILGGNQSGEGCVITRDRKESLDVYELDAKQGRWYVVQTNYDRWKHPFFLDDRRTPAKMCLNRTSQENISFETMYDVLSTKPVLNKLTVYTTLIDVTKGQFETYLRDCPDPCIGW

SEQ ID NO: 1191 - protein, 246 aa, Homo sapiens
MPGRSCVALVLLAAAVSCAVAQHAPPWTEDCRKSTYPPSGPTYRGAVPWYTINLDLPPYKRWHELMLDKAPVLKVIVNSLKNMINTFVPSGKIMQVVDEKLPGLLGNFPGPFEEEMKGIAAVTDIPLVNLDFQRNNKTVFKASSFAGYVGMLTGFKPGLFSLTLNERFSINGGYLGILEWILGKKDVMWIGFLTRTVLENSTSYEEAKNLLTKTKILAPAYFILGGNQSGEGCVITRDRKESLDVY

SEQ ID NO: 1192 - protein, 366 aa, Homo sapiens
MPGRSCVALVLLAAAVSCAVAQHAPPWTEDCRKSTYPPSGPTYRGAVPWYTINLDLPPYKRWHELMLDKAPVPGLLGNFPGPFEEEMKGIAAVTDIPLGEIISFNIFYELFTICTSIVAEDKKGHLIHGRNMDFGVFLGWNINNDTWVITEQLKPLTVNLDFQRNNKTVFKASSFAGYVGMLTGFKPGLFSLTLNERFSINGGYLGILEWILGKKDVMWIGFLTRTVLENSTSYEEAKNLLTKTKILAPAYFILGGNQSGEGCVITRDRKESLDVYELDAKQGRWYVVQTNYDRWKHPFFLDDRRTPAKMCLNRTSQENISFETMYDVLSTKPVLNKLTVYTTLIDVTKGQFETYLRDCPDPCIGW

SEQ ID NO: 1193 - protein, 393 aa, Homo sapiens
MPGRSCVALVLLAAAVSCAVAQHAPPWTEDCRKSTYPPSGPTYRGAVPWYTINLDLPPYKRWHELMLDKAPVVIVNSLKNMINTFVPSGKIMQVVDEKLPGLLGNFPGPFEEEMKGIAAVTDIPLGEIISFNIFYELFTICTSIVAEDKKGHLIHGRNMDFGVFLGWNINNDTWVITEQLKPLTVNLDFQRNNKTVFKASSFAGYVGMLTGFKPGLFSLTLNERFSINGGYLGILEWILGKKDVMWIGFLTRTVLENSTSYEEAKNLLTKTKILAPAYFILGGNQSGEGCVITRDRKESLDVYELDAKQGRWYVVQTNYDRWKHPFFLDDRRTPAKMCLNRTSQENISFETMYDVLSTKPVLNKLTVYTTLIDVTKGQFETYLRDCPDPCIGW

SEQ ID NO: 1194 - protein, 368 aa, Homo sapiens
  SITE 1: note = misc_feature - Xaa can be any naturally occurring amino acid
XLAAAVSCAVAQHAPPVSELEPRRREGRAVDRGLQKINLSSFRTNLKVIVNSLKNMINTFVPSGKIMQVVDEKLPGLLGNFPGPFEEEMKGIAAVTDIPLGEIISFNIFYELFTICTSIVAEDKKGHLIHGRNMDFGVFLGWNINNDTWVITEQLKPLTVNLDFQRNNKTVFKASSFAGYVGMLTGFKPGLFSLTLNERFSINGGYLGILEWILGKKDVMWIGFLTRTVLENSTSYEEAKNLLTKTKILAPAYFILGGNQSGEGCVITRDRKESLDVYELDAKQGRWYVVQTNYDRWKHPFFLDDRRTPAKMCLNRTSQENISFETMYDVLSTKPVLNKLTVYTTLIDVTKGQFETYLRDCPDPCIGW

SEQ ID NO: 1195 - protein, 200 aa, Homo sapiens
  SITE 1: note = misc_feature - Xaa can be any naturally occurring amino acid
XNNKTVFKASSFAGYVGMLTGFKPGLFSLTLNERFSINGGYLEWILGKKDVMWIGFLTRTVLENSTSYEEAKNLLTKTKILAPAYFILGGNQSGEGCVITRDRKESLDVYELDAKQGRWYVVQTNYDRWKHPFFLDDRRTPAKMCLNRTSQENISFETMYDVLSTKPVLNKLTVYTTLIDVTKGQFETYLRDCPDPCIGW

SEQ ID NO: 1196 - protein, 51 aa, Homo sapiens
AQRYEAASTIYGPHTLSAYIQLFRNLAKAIATELHLWKSSLWMQLFMKLQL

SEQ ID NO: 1197 - protein, 144 aa, Homo sapiens
AQRYEAASTIYGPHTLSAYIQLFRNLAKAIATGEVAEVIFVGANPKNSVQNQTHQTFLTVEKYEATSTSWQIVCNDASWETRFYWHKGLLGLSNATVEWHIPDTAQPGIYRIRYFGHNRKQDILKPAVILSFEGTSPAFEVVTI

SEQ ID NO: 1198 - protein, 780 aa, Homo sapiens
MAKRTFSNLETFLIFLLVMMSAITVALLSLLFITSGTIENHKDLGGHFFSTTQSPPATQGSTAAQRSTATQHSTATQSSTATQTSPVPLTPESPLFQNFSGYHIGVGRADCTGQVADINLMGYGKSGQNAQGILTRLYSRAFIMAEPDGSNRTVFVSIDIGMVSQRLRLEVLNRLQSKYGSLYRRDNVILSGTHTHSGPAGYFQYTVFVIASEGFSNQTFQHMVTGILKSIDIAHTNMKPGKIFINKGNVDGVQINRSPYSYLQNPQSERARYSSNTDKEMIVLKMVDLNGDDLGLISWFAIHPVSMNNSNHLVNSDNVGYASYLLEQEKNKGYLPGQGPFVAAFASSNLGDVSPNILGPRCINTGESCDNANSTCPIGGPSMCIAKGPGQDMFDSTQIIGRAMYQRAKELYASASQEVTGPLASAHQWVDMTDVTVWLNSTHASKTCKPALGYSFAAGTIDGVGGLNFTQGKTEGDPFWDTIRDQILGKPSEEIKECHKPKPILLHTGELSKPHPWHPDIVDVQIITLGSLAITAIPGEFTTMSGRRLREAVQAEFASHGMQNMTVVISGLCNVYTHYITTYEEYQAQRYEAASTIYGPHTLSAYIQLFRNLAKAIATDTVANLSRGPEPPFFKQLIVPLIPSIVDRAPKGRTFGDVLQPAKPEYRVGEVAEVIFVGANPKNSVQNQTHQTFLTVEKYEATSTSWQIVCNDASWETRFYWHKGLLGLSNATVEWHIPDTAQPGIYRIRYFGHNRKQDILKPAVILSFEGTSPAFEVVTI

SEQ ID NO: 1199 - protein, 745 aa, Homo sapiens
MAKRTFSNLETFLIFLLVMMSAITVALLSLLFITSGTIENHKDLGGHFFSTTQSPPATQGSTAAQRSTATQHSTATQSSTATQTSPVPLTPESPLFQNFSGYHIGVGRADCTGQVADINLMGYGKSGQNAQGILTRLYSRAFIMAEPDGSNRTVFVSIDIGMVSQRLRLEVLNRLQSKYGSLYRRDNVILSGTHTHSGPAGYFQYTVFVIASEGFSNQTFQHMVTGILKSIDIAHTNMKPGKIFINKGNVDGVQINRSPYSYLQNPQSERARYSSNTDKEMIVLKMVDLNGDDLGLISWFAIHPVSMNNSNHLVNSDNVGYASYLLEQEKNKGYLPGQGPFVAAFASSNLGDVSPNILGPRCINTGESCDNANSTCPIGGPSMCIAKGPGQDMFDSTQIIGRAMYQRAKSKTCKPALGYSFAAGTIDGVGGLNFTQGKTEGDPFWDTIRDQILGKPSEEIKECHKPKPILLHTGELSKPHPWHPDIVDVQIITLGSLAITAIPGEFTTMSGRRLREAVQAEFASHGMQNMTVVISGLCNVYTHYITTYEEYQAQRYEAASTIYGPHTLSAYIQLFRNLAKAIATDTVANLSRGPEPPFFKQLIVPLIPSIVDRAPKGRTFGDVLQPAKPEYRVGEVAEVIFVGANPKNSVQNQTHQTFLTVEKYEATSTSWQIVCNDASWETRFYWHKGLLGLSNATVEWHIPDTAQPGIYRIRYFGHNRKQDILKPAVILSFEGTSPAFEVVTI

SEQ ID NO: 1200 - protein, 622 aa, Homo sapiens
MDSEKSSEWRSDVLNRLQSKYGSLYRRDNVILSGTHTHSGPAGYFQYTVFVIASEGFSNQTFQHMVTGILKSIDIAHTNMKPGKIFINKGNVDGVQINRSPYSYLQNPQSERARYSSNTDKEMIVLKMVDLNGDDLGLISWFAIHPVSMNNSNHLVNSDNVGYASYLLEQEKNKGYLPGQGPFVAAFASSNLGDVSPNILGPRCINTGESCDNANSTCPIGGPSMCIAKGPGQDMFDSTQIIGRAMYQRAKELYASASQEVTGPLASAHQWVDMTDVTVWLNSTHASKTCKPALGYSFAAGTIDGVGGLNFTQGKTEGDPFWDTIRDQILGKPSEEIKECHKPKPILLHTGELSKPHPWHPDIVDVQIITLGSLAITAIPGEFTTMSGRRLREAVQAEFASHGMQNMTVVISGLCNVYTHYITTYEEYQAQRYEAASTIYGPHTLSAYIQLFRNLAKAIATDTVANLSRGPEPPFFKQLIVPLIPSIVDRAPKGRTFGDVLQPAKPEYRVGEVAEVIFVGANPKNSVQNQTHQTFLTVEKYEATSTSWQIVCNDASWETRFYWHKGLLGLSNATVEWHIPDTAQPGIYRIRYFGHNRKQDILKPAVILSFEGTSPAFEVVTI

SEQ ID NO: 1201 - protein, 726 aa, Homo sapiens
MSAITVALLSLLFITSGTIENHKDLGGHFFSTTQSPPATQGSTAAQRSTATQHSTATQSSTATQTSPVPLTPESPLFQNFSGYHIGVGRADCTGQVADINLMGYGKSGQNAQGILTRLYSRAFIMAEPDGSNRTVFVSIDIGMVSQRLRLEVLNRLQSKYGSLYRRDNVILSGTHTHSGPAGYFQYTVFVIASEGFSNQTFQHMVTGILKSIDIAHTNMKPGKIFINKGNVDGVQINRSPYSYLQNPQSERARYSSNTDKEMIVLKMVDLNGDDLGLISWFAIHPVSMNNSNHLVNSDNVGYASYLLEQEKNKGYLPGQGPFVAAFASSNLGDVSPNILGPRCINTGESCDNANSTCPIGGPSMCIAKGPGQDMFDSTQIIGRAMYQRAKSKTCKPALGYSFAAGTIDGVGGLNFTQGKTEGDPFWDTIRDQILGKPSEEIKECHKPKPILLHTGELSKPHPWHPDIVDVQIITLGSLAITAIPGEFTTMSGRRLREAVQAEFASHGMQNMTVVISGLCNVYTHYITTYEEYQAQRYEAASTIYGPHTLSAYIQLFRNLAKAIATDTVANLSRGPEPPFFKQLIVPLIPSIVDRAPKGRTFGDVLQPAKPEYRVGEVAEVIFVGANPKNSVQNQTHQTFLTVEKYEATSTSWQIVCNDASWETRFYWHKGLLGLSNATVEWHIPDTAQPGIYRIRYFGHNRKQDILKPAVILSFEGTSPAFEVVTI

SEQ ID NO: 1202 - protein, 236 aa, Homo sapiens
MESSAKMESGGAGQQPQPQPQQPFLPPAACFFATAAAAAAAAAAAAAQSAQQQQQQQQQQQQAPQLRPAADGQPSGGGHKSAPKQVKRQRSSSPELMRCKRRLNFSGFGYSLPQQQPAAVARRNERERNRVKLVNLGFATLREHVPNGAANKKMSKVETLRSAVEYIRALQQLLDEHDAVSAAFQAGVLSPTISPNYSNDLNSMAGSPVSSYSSDEGSYDPLSPEEQELLDFTNWF

SEQ ID NO: 1203 - protein, 132 aa, Homo sapiens
MDVTRLLLATLLVFLCFFTANSHLPPEEKLRDDRSLRSNSSVNLLDVPSVSIVALNKKSKQIGRKAAEKKRSSKKEASMKKVVRPRTPLSAPCVATRNSCKPPAPACCDPCASCQCRFFRSACSCRVLSLNC

SEQ ID NO: 1204 - protein, 132 aa, Homo sapiens; identical to SEQ ID NO: 1203

SEQ ID NO: 1205 - protein, 243 aa, Homo sapiens
MKEYVLLLFLALCSAKPFFSPSHIALKNMMLKDMEDTDDDDDDDDDDDDDDEDNSLFPTREPRSHFFPFDLFPMCPFGCQCYSRVVHCSDLGLTSVPTNIPFDTRMLDLQNNKIKEIKENDFKGLTSLYGLILNNNKLTKIHPKAFLTTKKLRRLYLSHNQLSEIPLNLPKSLAELRIHENKVKKIQKDTFKGMNALHVLEMSANPLDNNGIEPGAFEGVTVFHIRIAEAKLTSVPKDNLPSF

SEQ ID NO: 1206 - protein, 380 aa, Homo sapiens
MKEYVLLLFLALCSAKPFFSPSHIALKNMMLKDMEDTDDDDDDDDDDDDDDEDNSLFPTREPRSHFFPFDLFPMCPFGCQCYSRVVHCSDLGLTSVPTNIPFDTRMLDLQNNKIKEIKENDFKGLTSLYGLILNNNKLTKIHPKAFLTTKKLRRLYLSHNQLSEIPLNLPKSLAELRIHENKVKKIQKDTFKGMNALHVLEMSANPLDNNGIEPGAFEGVTVFHIRIAEAKLTSVPKGLPPTLLELHLDYNKISTVELEDFKRYKELQRLGLGNNKITDIENGSLANIPRVREIHLENNKLKKIPSGLPELKYLQIIFLHSNSIARVGVNDFCPTVPKMKKSLYSAISLFNNPVKYWEMQPATFRCVLSRMSVQLGNFGM

SEQ ID NO: 1207 - protein, 431 aa, Homo sapiens
MEGVGGLWPWVLGLLSLPGVILGAPLASSCAGACGTSFPDGLTPEGTQASGDKDIPAINQGLILEETPESSFLIEGDIIRPSPFRLLSATSNKWPMGGSGVVEVPFLLSSKYDEPSRQVILEALAEFERSTCIRFVTYQDQRDFISIIPMYGCFSSVGRSGGMQVVSLAPTCLQKGRGIVLHELMHVLGFWHEHTRADRDRYIRVNWNEILPGFEINFIKSQSSNMLTPYDYSSVMHYGRLAFSRRGLPTITPLWAPSVHIGQRWNLSASDITRVLKLYGCSPSGPRPRGRGSHAHSTGRSPAPASLSLQRLLEALSAESRSPDPSGSSAGGQPVPAGPGESPHGWESPALKKLSAEASARQPQTLASSPRSRPGAGAPGVAQEQSWLAGVSTKPTVPSSEAGIQPVPVQGSPALPGGCVPRNHFKGMSED

SEQ ID NO: 1208 - protein, 1844 aa, Homo sapiens
MVGVLAMAAAAAPPPVKDCEIEPCKKRKKDDDTSTCKTITKYLSPLGKTRDRVFAPPKPSNILDYFRKTSPTNEKTQLGKECKIKSPESVPVDSNKDCTTPLEMFSNVEFKKKRKRVNLSHQLNNIKTENEAPIEISSDDSKEDYSLNNDFVESSTSVLRYKKQVEVLAENIQDTKSQPNTMTSLQNSKKVNPKQGTTKNDFKKLRKRKCRDVVDLSESLPLAEELNLLKKDGKDTKQMENTTSHANSRDNVTEAAQLNDSIITVSYEEFLKSHKENKVEEIPDSTMSICVPSETVDEIVKSGYISESENSEISQQVRFKTVTVLAQVHPIPPKKTGKIPRIFLKQKQFEMENSLSDPENEQTVQKRKSNVVIQEEELELAVLEAGSSEAVKPKCTLEERQQFMKAFRQPASDALKNGVKKSSDKQKDLNEKCLYEVGRDDNSKKIMENSGIQMVSKNGNLQLHTDKGSFLKEKNKKLKKKNKKTLDTGAIPGKNREGNTQKKETTFFLKEKQYQNRMSLRQRKTEFFKSSTLFNNESLVYEDIANDDLLKVSSLCNNNKLSRKTSIPVKDIKLTQSKAESEASLLNVSTPKSTRRSGRISSTPTTETIRGIDSDDVQDNSQLKASTQKAANLSEKHSLYTAELITVPFDSESPIRMKFTRISTPKKSKKKSNKRSEKSEATDGGFTSQIRKASNTSKNISKAKQLIEKAKALHISRSKVTEEIAIPLRRSSRHQTLPERKKLSETEDSVIIIDSSPTALKHPEKNQKKLQCLNDVLGKKLNTSTKNVPGKMKVAPLFLVRKAQKAADPVPSFDESSQDTSEKSQDCDVQCKAKRDFLMSGLPDLLKRQIAKKAAALDVYNAVSTSFQRVVHVQQKDDGCCLWHLKPPSCPLLTKFKELNTKVIDLSKCGIALGEFSTLNSKLKSGNSAAVFMRTRKEFTEEVRNLLLEEIRWSNPEFSLKKYFPLLLKKQIEHQVLSSECHSKQELEADVSHKETKRKLVEAENSKSKRKKPNEYSKNLEKTNRKSEELSKRNNSSGIKLDSSKDSGTEDMLWTEKYQPQTASELIGNELAIKKLHSWLKDWKRRAELEERQNLKGKRDEKHEDFSGGIDFKGSSDDEEESRLCNTVLITGPTGVGKTAAVYACAQELGFKIFEVNASSQRSGRQILSQLKEATQSHQVDKQGVNSQKPCFFNSYYIGKSPKKISSPKKVVTSPRKVPPPSPKSSGPKRALPPKTLANYFKVSPKPKNNEEIGMLLENNKGIKNSFEQKQITQTKSTNATNSNVKDVGAEEPSRKNATSLILFEEVDVIFDEDAGFLNAIKTFMATTKRPVILTTSDPTFSLMFDGCFEEIKFSTPSLLNVASYLQMICLTENFRTDVKDFVTLLTANTCDIRKSILYLQFWIRSGGGVLEERPLTLYRGNSRNVQLVCSEHGLDNKIYPKNTKKKRVDLPKCDSGCAETLFGLKNIFSPSEDLFSFLKHKITMKEEWHKFIQLLTEFQMRNVDFLYSNLEFILPLPVDTIPETKNFCGPSVTVDASAATKSMNCLARKHSEREQPLKKSQKKKQKKTLVILDDSDLFDTDLDFPDQSISLSSVSSSSNAEESKTGDEESKARDKGNNPETKKSIPCPPKTTAGKKCSALVSHCLNSLSEFMDNMSFLDALLTDVREQNKYGRNDFSWTNGKVTSGLCDEFSLESNDGWTSQSSGELKAAAEALSFTKCSSAISKALETLNSCKKLGRDPTNDLTFYVSQKRNNVYFSQSAANLDNAWKRISVIKSVFSSRSLLYVGNRQASIIEYLPTLRNICKTEKLKEQGKSKRRFLHYFEGIHLDIPKETVNTLAADFP

SEQ ID NO: 1209 - protein, 1224 aa, Homo sapiens
MVGVLAMAAAAAPPPVKDCEIEPCKKRKKDDDTSTCKTITKYLSPLGKTRDRVFAPPKPSNILDYFRKTSPTNEKTQLGKECKIKSPESVPVDSNKDCTTPLEMFSNVEFKKKRKRVNLSHQLNNIKTENEAPIEISSDDSKEDYSLNNDFVESSTSVLRYKKQVEVLAENIQDTKSQPNTMTSLQNSKKVNPKQGTTKNDFKKLRKRKCRDVVDLSESLPLAEELNLLKKDGKDTKQMENTTSHANSRDNVTEAAQLNDSIITVSYEEFLKSHKENKVEEIPDSTMSICVPSETVDEIVKSGYISESENSEISQQVRFKTVTVLAQVHPIPPKKTGKIPRIFLKQKQFEMENSLSDPENEQTVQKRKSNVVIQEEELELAVLEAGSSEAVKPKCTLEERQQFMKAFRQPASDALKNGVKKSSDKQKDLNEKCLYEVGRDDNSKKIMENSGIQMVSKNGNLQLHTDKGSFLKEKNKKLKKKNKKTLDTGAIPGKNREGNTQKKETTFFLKEKQYQNRMSLRQRKTEFFKSSTLFNNESLVYEDIANDDLLKVSSLCNNNKLSRKTSIPVKDIKLTQSKAESEASLLNVSTPKSTRRSGRISSTPTTETIRGIDSDDVQDNSQLKASTQKAANLSEKHSLYTAELITVPFDSESPIRMKFTRISTPKKSKKKSNKRSEKSEATDGGFTSQIRKASNTSKNISKAKQLIEKAKALHISRSKVTEEIAIPLRRSSRHQTLPERKKLSETEDSVIIIDSSPTALKHPEKNQKKLQCLNDVLGKKLNTSTKNVPGKMKVAPLFLVRKAQKAADPVPSFDESSQDTSEKSQDCDVQCKAKRDFLMSGLPDLLKRQIAKKAAALDVYNAVSTSFQRVVHVQQKDDGCCLWHLKPPSCPLLTKFKELNTKVIDLSKCGIALGEFSTLNSKLKSGNSAAVFMRTRKEFTEEVRNLLLEEIRWSNPEFSLKKYFPLLLKKQIEHQVLSSECHSKQELEADVSHKETKRKLVEAENSKSKRKKPNEYSKNLEKTNRKSEELSKRNNSSGIKLDSSKDSGTEDMLWTEKYQPQTASELIGNELAIKKLHSWLKDWKRRAELEERQNLKGKRDEKHEDFSGGIDFKGSSDDEEESRLCNTVLITGPTGVGKTAAVYACAQELGFKIFEVNASSQRSGRQILSQLKEATQSHQVDKQGVNSQKPCFFNSYYIGKSPKKISSPKKVVTSPRKVPPPSPK

SEQ ID NO: 1210 - protein, 310 aa, Homo sapiens
MEFPFDVDALFPERITVLDQHLRPPARRPGTTTPARVDLQQQIMTIIDELGKASAKAQNLSAPITSASRMQSNRHVVYILKDSSARPAGKGAIIGFIKVGYKKLFVLDDREAHNEVEPLCILDFYIHESVQRHGHGRELFQYMLQKERVEPHQLAIDRPSQKLLKFLNKHYNLETTVPQVNNFVIFEGFFAHQHPPARKLPPKRAEGDIKPYSSSDREFLKVAVEPPWPLNRAPRRATPPAHPPPRSSSLGNSPERGPLRPFVPEQELLRSLRLCPPHPTARLLLAADPGGSPAQRRRTSSLPRSEESRY

SEQ ID NO: 1211 - protein, 300 aa, Homo sapiens
MEFPFDVDALFPERITVLDQHLRPPARRPGTTTPARVDLQQQIMTIIDELGKASAKAQNLSAPITSASRMQSNRHVVYILKDSSARPAGKGAIIGFIKVGYKKLFVLDDREAHNEVEPLCILDFYIHESVQRHGHGRELFQYMLQKERVEPHQLAIDRPSQKLLKFLNKHYNLETTVPQVNNFVIFEGFFAHQHPPARKLPPKRAEGDIKPYSSSDREFLKVAVEPPWPLNRAPRRATPPAHPPPRSSSLGNSPERGPLRPFVPEQELLRSLRLCPPHPTARLLLAADPGGSPAQRRRTR

SEQ ID NO: 1212 - protein, 333 aa, Homo sapiens
MEFPFDVDALFPERITVLDQHLRPPARRPGTTTPARVDLQQQIMTIIDELGKASAKAQNLSAPITSASRMQSNRHVVYILKDSSARPAGKGAIIGFIKVGYKKLFVLDDREAHNEVEPLCILDFYIHESVQRHGHGRELFQYMLQKERVEPHQLAIDRPSQKLLKFLNKHYNLETTVPQVNNFVIFEGFFAHQHRPPAPSLRATRHSRAAAVDPTPAAPARKLPPKRAEGDIKPYSSSDREFLKVAVEPPWPLNRAPRRATPPAHPPPRSSSLGNSPERGPLRPFVPEQELLRSLRLCPPHPTARLLLAADPGGSPAQRRRTSSLPRSEESRY

SEQ ID NO: 1213 - protein, 421 aa, Homo sapiens
MEFPFDVDALFPERITVLDQHLRPPARRPGTTTPARVDLQQQIMTIIDELGKASAKAQNLSAPITSASRMQSNRHVVYILKDSSARPAGKGAIIGFIKVGYKKLFVLDDREAHNEVEPLCILDFYIHESVQRHGHGRELFQYMLQKERVEPHQLAIDRPSQKLLKFLNKHYNLETTVPQVNNFVIFEGFFAHQHRPPAPSLRATRHSRAAAVDPTPAAPARKLPPKRAEGDIKPYSSSDREFLKVAVEPPWPLNRAPRRATPPAHPPPRSSSLGNSPERGPLRPFVPEQELLRSLRLCPPHPTARLLLAADPGGSPAQRRRTRGTPPGLVAQSCCYSRHGGVNSSSPNTGNQDSKQGEQETKNRSASEEQALSQDGSGEKPMHTAPPQAPAPPAQSWTVGGDILNARFIRNLQERRSTRPW

SEQ ID NO: 1214 - protein, 323 aa, Homo sapiens
MEFPFDVDALFPERITVLDQHLRPPARRPGTTTPARVDLQQQIMTIIDELGKASAKAQNLSAPITSASRMQSNRHVVYILKDSSARPAGKGAIIGFIKVGYKKLFVLDDREAHNEVEPLCILDFYIHESVQRHGHGRELFQYMLQKERVEPHQLAIDRPSQKLLKFLNKHYNLETTVPQVNNFVIFEGFFAHQHRPPAPSLRATRHSRAAAVDPTPAAPARKLPPKRAEGDIKPYSSSDREFLKVAVEPPWPLNRAPRRATPPAHPPPRSSSLGNSPERGPLRPFVPEQELLRSLRLCPPHPTARLLLAADPGGSPAQRRRTR

SEQ ID NO: 1215 - protein, 409 aa, Homo sapiens
MWLTWPFCFLTITLREEGVCHLESVDLQQQIMTIIDELGKASAKAQNLSAPITSASRMQSNRHVVYILKDSSARPAGKGAIIGFIKVGYKKLFVLDDREAHNEVEPLCILDFYIHESVQRHGHGRELFQYMLQKERVEPHQLAIDRPSQKLLKFLNKHYNLETTVPQVNNFVIFEGFFAHQHRPPAPSLRATRHSRAAAVDPTPAAPARKLPPKRAEGDIKPYSSSDREFLKVAVEPPWPLNRAPRRATPPAHPPPRSSSLGNSPERGPLRPFVPEQELLRSLRLCPPHPTARLLLAADPGGSPAQRRRTRGTPPGLVAQSCCYSRHGGVNSSSPNTGNQDSKQGEQETKNRSASEEQALSQDGSGEKPMHTAPPQAPAPPAQSWTVGGDILNARFIRNLQERRSTRPW

SEQ ID NO: 1216 - protein, 331 aa, Homo sapiens
MAVAMVKLCERAGLPLLAAPLLRSLLPRAPQPGPAQPRSVQGQRCPARHPPGNLVCERGAGVNGVTAGAGGRLRGLHRGGRALGCSAHRPLHSARVRPPAHLAAPPGSSARGCRLTELGYALNEWLQDIRKNQLPGLLGGVGPMHSVVQLFQGFRDLLWLPIEQYRKDGRLMRGLQRGAASFGSSTASAALELSNRLVQAIQATAETVYDILSPAAPVSRSLQDKRSARRLRRGQQPADLREGVAKAYDTVREGILDTAQTICDVASRGHEQKGLTGAVGGVIRQLPPTVVKPLILATEATSSLLGGMRNQIVPDAHKDHALKWRSDSAQD

SEQ ID NO: 1217 - protein, 1938 aa, Homo sapiens
MSRWLWPWSNCVKERVCRYLLHHYLGHFFQEHLSLDQLSLDLYKGSVALRDIHLEIWSVNEVLESMESPLELVEGFVGSIEVAVPWAALLTDHCTVRVSGLQLTLQPRRGPAPGAADSQSWASCMTTSLQLAQECLRDGLPEPSEPPQPLEGLEMFAQTIETVLRRIKVTFLDTVVRVEHSPGDGERGVAVEVRVQRLEYCDEAVRDPSQAPPVDVHQPPAFLHKLLQLAGVRLHYEELPAQEEPPEPPLQIGSCSGYMELMVKLKQNEAFPGPKLEVAGQLGSLHLLLTPRQLQQLQELLSAVSLTDHEGLADKLNKSRPLGAEDLWLIEQDLNQQLQAGAVAEPLSPDPLTNPLLNLDNTDLFFSMAGLTSSVASALSELSLSDVDLASSVRSDMASRRLSAQAHPAGKMAPNPLLDTMRPDSLLKMTLGGVTLTLLQTSAPSSGPPDLATHFFTEFDATKDGPFGSRDFHHLRPRFQRACPCSHVRLTGTAVQLSWELRTGSRGRRTTSMEVHFGQLEVLECLWPRGTSEPEYTEILTFPGTLGSQASARPCAHLRHTQILRRVPKSRPRRSVACHCHSELALDLANFQADVELGALDRLAALLRLATVPAEPPAGLLTEPLPAMEQQTVFRLSAPRATLRLRFPIADLRPEPDPWAGQAVRAEQLRLELSEPQFRSELSSGPGPPVPTHLELTCSDLHGIYEDGGKPPVPCLRVSKALDPKSTGRKYFLPQVVVTVNPQSSSTQWEVAPEKGEELELSVESPCELREPEPSPFSSKRTMYETEEMVIPGDPEEMRTFQSRTLALSRCSLEVILPSVHIFLPSKEVYESIYNRINNDLLMWEPADLLPTPDPAAQPSGFPGPSGFWHDSFKMCKSAFKLANCFDLTPDSDSDDEDAHFFSVGASGGPQAAAPEAPSLHLQSTFSTLVTVLKGRITALCETKDEGGKRLEAVHGELVLDMEHGTLFSVSQYCGQPGLGYFCLEAEKATLYHRAAVDDYPLPSHLDLPSFAPPAQLAPTIYPSEEGVTERGASGRKGQGRGPHMLSTAVRIHLDPHKNVKEFLVTLRLHKATLRHYMALPEQSWHSQLLEFLDVLDDPVLGYLPPTVITILHTHLFSCSVDYRPLYLPVRVLITAETFTLSSNIIMDTSTFLLRFILDDSALYLSDKCEVETLDLRRDYVCVLDVDLLELVIKTWKGSTEGKLSQPLFELRCSNNVVHVHSCADSCALLVNLLQYVMSTGDLHPPPRPPSPTEIAGQKLSESPASLPSCPPVETALINQRDLADALLDTERSLRELAQPSGGHLPQASPISVYLFPGERSGAPPPSPPVGGPAGSLGSCSEEKEDEREEEGDGDTLDSDEFCILDAPGLGIPPRDGEPVVTQLHPGPIVVRDGYFSRPIGSTDLLRAPAHFPVPSTRVVLREVSLVWHLYGGRDFGPHPGHRARTGLSGPRSSPSRCSGPNRPQNSWRTQGGSGRQHHVLMEIQLSKVSFQHEVYPAEPATGPAAPSQELEERPLSRQVFIVQELEVRDRLASSQINKFLYLHTSERMPRRAHSNMLTIKALHVAPTTNLGGPECCLRVSLMPLRLNVDQDALFFLKDFFTSLVAGINPVVPGETSAEARPETRAQPSSPLEGQAEGVETTGSQEAPGGGHSPSPPDQQPIYFREFRFTSEVPIWLDYHGKHVTMDQVGTFAGLLIGLAQLNCSELKLKRLCCRHGLLGVDKVLGYALNEWLQDIRKNQLPGLLGGVGPMHSVVQLFQGFRDLLWLPIEQYRKDGRLMRGLQRGAASFGSSTASAALELSNRLVQAIQATAETVYDILSPAAPVSRSLQDKRSARRLRRGQQPADLREGVAKAYDTVREGILDTAQTICDVASRGHEQKGLTGAVGGVIRQLPPTVVKPLILATEATSSLLGGMRNQIVPDAHKDHALKWRSDSAQD

SEQ ID NO: 1218 - protein, 1742 aa, Homo sapiens
  SITE 1: note = misc_feature - Xaa can be any naturally occurring amino acid
XYCDEAVRDPSQAPPVDVHQPPAFLHKLLQLAGVRLHYEELPAQEEPPEPPLQIGSCSGYMELMVKLKQNEAFPGPKLEVAGQLGSLHLLLTPRQLQQLQELLSAVSLTDHEGLADKLNKSRPLGAEDLWLIEQDLNQQLQAGAVAEPLSPDPLTNPLLNLDNTDLFFSMAGLTSSVASALSELSLSDVDLASSVRSDMASRRLSAQAHPAGKMAPNPLLDTMRPDSLLKMTLGGVTLTLLQTSAPSSGPPDLATHFFTEFDATKDGPFGSRDFHHLRPRFQRACPCSHVRLTGTAVQLSWELRTGSRGRRTTSMEVHFGQLEVLECLWPRGTSEPEYTEILTFPGTLGSQASARPCAHLRHTQILRRVPKSRPRRSVACHCHSELALDLANFQADVELGALDRLAALLRLATVPAEPPAGLLTEPLPAMEQQTVFRLSAPRATLRLRFPIADLRPEPDPWAGQAVRAEQLRLELSEPQFRSELSSGPGPPVPTHLELTCSDLHGIYEDGGKPPVPCLRVSKALDPKSTGRKYFLPQVVVTVNPQSSSTQWEVAPEKGEELELSVESPCELREPEPSPFSSKRTMYETEEMVIPGDPEEMRTFQSRTLALSRCSLEVILPSVHIFLPSKEVYESIYNRINNDLLMWEPADLLPTPDPAAQPSGFPGPSGFWHDSFKMCKSAFKLANCFDLTPDSDSDDEDAHFFSVGASGGPQAAAPEAPSLHLQSTFSTLVTVLKGRITALCETKDEGGKRLEAVHGELVLDMEHGTLFSVSQYCGQPGLGYFCLEAEKATLYHRAAVDDYPLPSHLDLPSFAPPAQLAPTIYPSEEGVTERGASGRKGQGRGPHMLSTAVRIHLDPHKNVKEFLVTLRLHKATLRHYMALPEQSWHSQLLEFLDVLDDPVLGYLPPTVITILHTHLFSCSVDYRPLYLPVRVLITAETFTLSSNIIMDTSTFLLRFILDDSALYLSDKCEVETLDLRRDYVCVLDVDLLELVIKTWKGSTEGKLSQPLFELRCSNNVVHVHSCADSCALLVNLLQYVMSTGDLHPPPRPPSPTEIAGQKVQLSESPASLPSCPPVETALINQRDLADALLDTERSLRELAQPSGGHLPQASPISVYLFPGERSGAPPPSPPVGGPAGSLGSCSEEKEDEREEEGDGDTLDSDEFCILDAPGLGIPPRDGEPVVTQLHPGPIVVRDGYFSRPIGSTDLLRAPAHFPVPSTRVVLREVSLVWHLYGGRDFGPHPGHRARTGLSGPRSSPSRCSGPNRPQNSWRTQGGSGRQHHVLMEIQLSKVSFQHEVYPAEPATGPAAPSQELEERPLSRQVFIVQELEVRDRLASSQINKFLYLHTSERMPRRAHSNMLTIKALHVAPTTNLGGPECCLRVSLMPLRLNVDQDALFFLKDFFTSLVAGINPVVPGETSAEARPETRAQPSSPLEGQAEGVETTGSQEAPGGGHSPSPPDQQPIYFREFRFTSEVPIWLDYHGKHVTMDQVGTFAGLLIGLAQLNCSELKLKRLCCRHGLLGVDKVLGYALNEWLQDIRKNQLPGLLGGVGPMHSVVQLFQGFRDLLWLPIEQYRKDGRLMRGLQRGAASFGSSTASAALELSNRLVQAIQATAETVYDILSPAAPVSRSLQDKRSARRLRRGQQPADLREGVAKAYDTVREGILDTAQTICDVASRGHEQKGLTGAVGGVIRQLPPTVVKPLILATEATSSLLGGMRNQIVPDAHKDHALKWRSDSAQD

SEQ ID NO: 1219 - protein, 153 aa, Homo sapiens
MHYPIGLLFDLLASSSALPWNITVHFKSFPEKDLLHCPSKDAIEAHFMSCMKEADALKHKSQVINEMQKKDHKQLWMGLQNDRFDQFWAINRKLMEYPAEENGFRYIPFRIYQTTTERPFIQKLFRPVAADGQLHTLGDLLKEVCPSAIDPED

SEQ ID NO: 1220 - protein, 197 aa, Homo sapiens
MHYPIGLLFDLLASSSALPWNITVHFKSFPEKDLLHCPSKDAIEAHFMSCMKEADALKHKSQVINEMQKKDHKQLWMGLQNDRFDQFWAINRKLMEYPAEENGFRYIPFRIYQTTTERPFIQKLFRPVAADGQLHTLGDLLKEVCPSAIDPEDGEKKNQVMIHGIEPMLETPLQWLSEHLSYPDNFLHISIIPQPTD

SEQ ID NO: 1221 - protein, 159 aa, Homo sapiens
MHYPIGLLFDLLASSSALPWNITVHFKSFPEKDLLHCPSKDAIEAHFMSCMKEADALKHKSQVINEMQKKDHKQLWMGLQNDRFDQFWAINRKLMEYPAEENGFRYIPFRIYQTTTERPFIQKLFRPVAADGQLHTLGDLLKEVCPSAIDPEEIPPGED

SEQ ID NO: 1222 - protein, 44 aa, Homo sapiens
MTDDKDVLRDVWFGRIPTCFTLYQDEITEREAEPYYALSNWFAI

SEQ ID NO: 1223 - protein, 162 aa, Homo sapiens
MTDDKDVLRDVWFGRIPTCFTLYQDEITEREAEPYYLLLPRVSYLTLVTDKVKKHFQKVMRQEDISEIWFEYEGTPLKWHYPIGLLFDLLASSSALPWNITVHFKSFPEKDLLHCPSKDAIEAHFMSCMKEADALKHKSQVINEMQKKDHKQLWMGLQNDND

SEQ ID NO: 1224 - protein, 275 aa, Homo sapiens
MTDDKDVLRDVWFGRIPTCFTLYQDEITEREAEPYYLLLPRVSYLTLVTDKVKKHFQKVMRQEDISEIWFEYEGTPLKWHYPIGLLFDLLASSSALPWNITVHFKSFPEKDLLHCPSKDAIEAHFMSCMKEADALKHKSQVINEMQKKDHKQLWMGLQNDRFDQFWAINRKLMEYPAEENGFRYIPFRIYQTTTERPFIQKLFRPVAADGQLHTLGDLLKEVCPSAIDPEDGEKKNQVMIHGIEPMLETPLQWLSEHLSYPDNFLHISIIPQPTD

SEQ ID NO: 1225 - protein, 275 aa, Homo sapiens; identical to SEQ ID NO: 1224

SEQ ID NO: 1226 - protein, 233 aa, Homo sapiens
MTDDKDVLRDVWFGRIPTCFTLYQDEITEREAEPYYLLLPRVSYLTLVTDKVKKHFQKVMRQEDISEIWFEYEGTPLKWHYPIGLLFDLLASSSALPWNITVHFKSFPEKDLLHCPSKDAIEAHFMSCMKEADALKHKSQVINEMQKKDHKQLWMGLQNDRFDQFWAINRKLMEYPAEENGFRYIPFRIYQVTAVWVGIQRFQASEEESEDEEFLATLTGGERSGKARKQWTQ

SEQ ID NO: 1227 - protein, 91 aa, Homo sapiens
MTDDKDVLRDVWFGRIPTCFTLYQDEITEREAEPYYTDLTSFGPSIGNSWNILQKKMDFVISPLEYIRQRLKDLSFRSCFVLWLQMDSCTH

SEQ ID NO: 1228 - protein, 823 aa, Homo sapiens
MAASEAAAAAGSAALAAGARAVPAATTGAAAAASGPWVPPGPRLRGSRPRPAGATQQPAVPAPPAGELIQPSVSELSRAVRTNILCTVRGCGKILPNSPALNMHLVKSHRLQDGIVNPTIRKDLKTGPKFYCCPIEGCPRGPERPFSQFSLVKQHFMKMHAEKKHKCSKCSNSYGTEWDLKRHAEDCGKTFRCTCGCPYASRTALQSHIYRTGHEIPAEHRDPPSKKRKMENCAQNQKLSNKTIESLNNQPIPRPDTQELEASEIKLEPSFEDSCGSNTDKQTLTTPPRYPQKLLLPKPKVALVKLPVMQFSVMPVFVPTADSSAQPVVLGVDQGSATGAVHLMPLSVGTLILGLDSEACSLKESLPLFKIANPIAGEPISTGVQVNFGKSPSNPLQELGNTCQKNSISSINVQTDLSYASQNFIPSAQWATADSSVSSCSQTDLSFDSQVSLPISVHTQTFLPSSKVTSSIAAQTDAFMDTCFQSGGVSRETQTSGIESPTDDHVQMDQAGMCGDIFESVHSSYNVATGNIISNSLVAETVTHSLLPQNEPKTLNQDIEKSAPIINFSAQNSMLPSQNMTDNQTQTIDLLSDLENILSSNLPAQTLDHRSLLSDTNPGPDTQLPSGPAQNPGIDFDIEEFFSASNIQTQTEESELSTMTTEPVLESLDIETQTDFLLADTSAQSYGCRGNSNFLGLEMFDTQTQTDLNFFLDSSPHLPLGSILKHSSFSVSTDSSDTETQTEGVSTAKNIPALESKVQLNSTETQTMSSGFETLGSLFFTSNETQTAMDDFLLADLAWNTMESQFSSVETQTSAEPHTVSNF

SEQ ID NO: 1229 - protein, 55 aa, Homo sapiens
MKMHAEKKHKCSKCSNSYGTEWDLKRHAEDCGKTFRCTCGCPYASRTALQSHIYR

SEQ ID NO: 1230 - protein, 667 aa, Homo sapiens
MKMHAEKKHKCSKCSNSYGTEWDLKRHAEDCGKTFRCTCGCPYASRTALQSHIYRTGHEIPAEHRDPPSKKRKMENCAQNQKLSNKTIESLNNQPIPRPDTQELEASEIKLEPSFEDSCGSNTDKQTLTTPPRYPQKLLLPKPKVALVKLPVMQFSVMPVFVPTADSSAQPVVLGVDQGSATGAVHLMPLSVGTLILGLDSEACSLKESLPLFKIANPIAGEPISTGVQVNFGKSPSNPLQELGNTCQKNSISSINVQTDLSYASQNFIPSAQWATADSSVSSCSQTDLSFDSQVSLPISVHTQTFLPSSKVTSSIAAQTDAFMDTCFQSGGVSRETQTSGIESPTDDHVQMDQAGMCGDIFESVHSSYNVATGNIISNSLVAETVTHSLLPQNEPKTLNQDIEKSAPIINFSAQNSMLPSQNMTDNQTQTIDLLSDLENILSSNLPAQTLDHRSLLSDTNPGPDTQLPSGPAQNPGIDFDIEEFFSASNIQTQTEESELSTMTTEPVLESLDIETQTDFLLADTSAQSYGCRGNSNFLGLEMFDTQTQTDLNFFLDSSPHLPLGSILKHSSFSVSTDSSDTETQTEGVSTAKNIPALESKVQLNSTETQTMSSGFETLGSLFFTSNETQTAMDDFLLADLAWNTMESQFSSVETQTSAEPHTVSNF

SEQ ID NO: 1231 - protein, 667 aa, Homo sapiens; identical to SEQ ID NO: 1230

SEQ ID NO: 1232 - protein, 1204 aa, Homo sapiens
MAAAAAVGNAVPCGARPCGVRPDGQPKPGPQPRALLAAGPALIANGDELVAAVWPYRRLALLRRLTVLPFAGLLYPAWLGAAAAGCWGWGSSWVQIPEAALLVLATICLAHALTVLSGHWSVHAHCALTCTPEYDPSKATFVKVVPTPNNGSTELVALHRNEGEDGLEVLSFEFQKIKYSYDALEKKQFLPVAFPVGNAFSYYQSNRGFQEDSEIRAAEKKFGSNKAEMVVPDFSELFKERATAPFFVFQVFCVGLWCLDEYWYYSVFTLSMLVAFEASLVQQQMRNMSEIRKMGNKPHMIQVYRSRKWRPIASDEIVPGDIVSIGRSPQENLVPCDVLLLRGRCIVDEAMLTGESVPQMKEPIEDLSPDRVLDLQADSRLHVIFGGTKVVQHIPPQKATTGLKPVDSGCVAYVLRTGFNTSQGKLLRTILFGVKRVTANNLETFIFILFLLVFAIAAAAYVWIEGTKDPSRNRYKLFLECTLILTSVVPPELPIELSLAVNTSLIALAKLYMYCTEPFRIPFAGKVEVCCFDKTGTLTSDSLVVRGVAGLRDGKEVTPVSSIPVETHRALASCHSLMQLDDGTLVGDPLEKAMLTAVDWTLTKDEKVFPRSIKTQGLKIHQRFHFASALKRMSVLASYEKLGSTDLCYIAAVKGAPETLHSMFSQCPPDYHHIHTEISREGARVLALGYKELGHLTHQQAREVKREALECSLKFVGFIVVSCPLKADSKAVIREIQNASHRVVMITGDNPLTACHVAQELHFIEKAHTLILQPPSEKGRQCEWRSIDGSIVLPLARGSPKALALEYALCLTGDGLAHLQATDPQQLLRLIPHVQVFARVAPKQKEFVITSLKELGYVTLMCGDGTNDVGALKHADVGVALLANAPERVVERRRRPRDSPTLSNSGIRATSRTAKQRSGLPPSEEQPTSQRDRLSQVLRDLEDESTPIVKLGDASIAAPFTSKLSSIQCICHVIKQGRCTLVTTLQMFKILALNALILAYSQSVLYLEGVKFSDFQATLQGLLLAGCFLFISRSKPLKTLSRERPLPNIFNLYTILTVMLQFFVHFLSLVYLYREAQARSPEKQEQFVDLYKEFEPSLVNSTVYIMAMAMQMATFAINYKGPPFMESLPENKPLVWSLAVSLLAIIGLLLGSSPDFNSQFGLVDIPVEFKLVIAQVLLLDFCLALLADRVLQFFLGTPKLKVPS

SEQ ID NO: 1233 - protein, 1086 aa, Homo sapiens
MEKWEELNSHQPGEEYDPSKATFVKVVPTPNNGSTELVALHRNEGEDGLEVLSFEFQKIKYSYDALEKKQFLPVAFPVGNAFSYYQSNRGFQEDSEIRAAEKKFGSNKAEMVVPDFSELFKERATAPFFVFQVFCVGLWCLDEYWYYSVFTLSMLVAFEASLVQQQMRNMSEIRKMGNKPHMIQVYRSRKWRPIASDEIVPGDIVSIGRSPQENLVPCDVLLLRGRCIVDEAMLTGESVPQMKEPIEDLSPDRVLDLQADSRLHVIFGGTKVVQHIPPQKATTGLKPVDSGCVAYVLRTGFNTSQGKLLRTILFGVKRVTANNLETFIFILFLLVFAIAAAAYVWIEGTKDPSRNRYKLFLECTLILTSVVPPELPIELSLAVNTSLIALAKLYMYCTEPFRIPFAGKVEVCCFDKTGTLTSDSLVVRGVAGLRDGKEVTPVSSIPVETHRALASCHSLMQLDDGTLVGDPLEKAMLTAVDWTLTKDEKVFPRSIKTQGLKIHQRFHFASALKRMSVLASYEKLGSTDLCYIAAVKGAPETLHSMFSQCPPDYHHIHTEISREGARVLALGYKELGHLTHQQAREVKREALECSLKFVGFIVVSCPLKADSKAVIREIQNASHRVVMITGDNPLTACHVAQELHFIEKAHTLILQPPSEKGRQCEWRSIDGSIVLPLARGSPKALALEYALCLTGDGLAHLQATDPQQLLRLIPHVQVFARVAPKQKEFVITSLKELGYVTLMCGDGTNDVGALKHADVGVALLANAPERVVERRRRPRDSPTLSNSGIRATSRTAKQRSGLPPSEEQPTSQRDRLSQVLRDLEDESTPIVKLGDASIAAPFTSKLSSIQCICHVIKQGRCTLVTTLQMFKILALNALILAYSQSVLYLEGVKFSDFQATLQGLLLAGCFLFISRSKPLKTLSRERPLPNIFNLYTILTVMLQFFVHFLSLVYLYREAQARSPEKQEQFVDLYKEFEPSLVNSTVYIMAMAMQMATFAINYKGPPFMESLPENKPLVWSLAVSLLAIIGLLLGSSPDFNSQFGLVDIPVEFKLVIAQVLLLDFCLALLADRVLQFFLGTPKLKVPS

SEQ ID NO: 1234 - protein, 185 aa, Homo sapiens
  SITE 1: note = misc_feature - Xaa can be any naturally occurring amino acid
XASPWVPAAAFLSVTIATWATHLPGLDSQGHPLHFGAGLIMTPLLTCCACLEYDPSKATFVKVVPTPNNGSTELVALHRNEGEDGLEVLSFEFQKIKYSYDALEKKQFLPVAFPVGNAFSYYQSNRGFQEDSEIRAAEKKFGSNKAEMVVPDFSELFKERATAPFFVFQVFCVGLWCLDEYWYYS

SEQ ID NO: 1235 - protein, 256 aa, Homo sapiens
MLSRVVLSAAATAAPSLKNAAFLGPGVLQATRTFHTGQPHLVPVPPLPEYGGKVRYGLIPEEFFQFLYPKTGVTGPYVLGTGLILYALSKEIYVISAETFTALSVLGVMVYGIKKYGPFVADFADKLNEQKLAQLEEAKQASIQHIQNAIDTEKSQQALVQKRHYLFDVQRNNIAMALEVTYRERLYRVYKEVKNRLDYHISVQNMMRRKEQEHMINWVEKHVVQSISTQQEKETIAKCIADLKLLAKKAQAQPVM

SEQ ID NO: 1236 - protein, 195 aa, Homo sapiens
MLSRVVLSAAATAGPYVLGTGLILYALSKEIYVISAETFTALSVLGVMVYGIKKYGPFVADFADKLNEQKLAQLEEAKQASIQHIQNAIDTEKSQQALVQKRHYLFDVQRNNIAMALEVTYRERLYRVYKEVKNRLDYHISVQNMMRRKEQEHMINWVEKHVVQSISTQQEKETIAKCIADLKLLAKKAQAQPVM

SEQ ID NO: 1237 - protein, 128 aa, Homo sapiens
AQALWRMPWLPVFLSLAAAAAAAAAEQQVPLVLWSSDRDLWAPAADTHEGHITSDLQLSTYLDPALELGPRNVLLFLQDKLSIEDFTAYGGVFGNKQDSAFSNLEHTQVRRCPIHSGPHSGPPFQGGP

SEQ ID NO: 1238 - protein, 281 aa, Homo sapiens
MAPREVLTGNDEVIGQVLSTLKSEDVPYTAALTAVRPSRVARDVAVVAGGLGRQLLQKQPVSPVIHPPVSYNDTAPRILFWAQNFSVAYKDQWEDLTPLTFGVQELNLTGSFWNDSFARLSLTYERLFGTTVTFKFILANRLYPVSARHWFTMERLEVHSNGSVAYFNASQVTGPSIYSFHCEYVSSLSKKGSLLVARTQPSPWQMMLQDFQIQAFNVMGEQFSYASDCASFFSPGIWMGLLTSLFMLFIFTYGLHMILSLKTMDRFDDHKGPTISLTQIV

SEQ ID NO: 1239 - protein, 273 aa, Homo sapiens
MMAAMATARVRMGPRCAQALWRMPWLPVFLSLAAAAAAAAAEQQVPLVLWSSDRDLWAPAADTHEGHITSDLQLSTYLDPALELGPRNVLLFLQDKLSIEDFTAYGGVFGNKQDSAFSNLENALDLAPSSLVLPAVDWYAVSTLTTYLQEKLGASPLHVARDVAVVAGGLGRQLLQKQPVSPVIHPPVSYNDTAPRILFWAQNFSVAYKDQWEDLTPLTFGVQELNLTGSFWNDSFARFILANRLYPVSARHWFTMERLEVHSNGSVAYFNAS

SEQ ID NO: 1240 - protein, 230 aa, Homo sapiens
MMAAMATARVRMGPRCAQALWRMPWLPVFLSLAAAAAAAAAEQQVPLVLWSSDRDLWAPAADTHEGHITSDLQLSTYLDPALELGPRNVLLFLQDKLSIEDFTAYGGVFGNKQDSAFSNLENALDLAPSSLVLPAVDWYAVSTLTTYLQEKLGASPLHVDLATLRELKLNASLPALLLIRLPYTASSGLMAPREVLTDEVIGQVLSTLKSEDVPYTAALTAVRPSRVARD

SEQ ID NO: 1241 - protein, 470 aa, Homo sapiens
MMAAMATARVRMGPRCAQALWRMPWLPVFLSLAAAAAAAAAEQQVPLVLWSSDRDLWAPAADTHEGHITSDLQLSTYLDPALELGPRNVLLFLQDKLSIEDFTAYGGVFGNKQDSAFSNLENALDLAPSSLVLPAVDWYAVSTLTTYLQEKLGASPLHVDLATLRELKLNASLPALLLIRLPYTASSGLMAPREVLTGNDEVIGQVLSTLKSEDVPYTAALTAVRPSRVARDVAVVAGGLGRQLLQKQPVSPVIHPPVSYNDTAPRILFWAQNFSVAYKDQWEDLTPLTFGVQELNLTGSFWNDSFARLSLTYERLFGTTVTFKFILANRLYPVSARHWFTMERLEVHSNGSVAYFNASQVTGPSIYSFHCEYVSSLSKKGSLLVARTQPSPWQMMLQDFQIQAFNVMGEQFSYASDCASFFSPGIWMGLLTSLFMLFIFTYGLHMILSLKTMDRFDDHKGPTISLTQIV

SEQ ID NO: 1242 - protein, 134 aa, Homo sapiens
MMAAMATARVRMGPRCAQALWRMPWLPVFLSLAAAAAAAAAEQQVPLVLWSSDRDLWAPAADTHEGHITSDLQLSTYLDPALELGPRNVLLFLQDKVRPPQPTLPRSSGGSQAPSPHDTDAHSPREASVTLSQL

SEQ ID NO: 1243 - protein, 134 aa, Homo sapiens; identical to SEQ ID NO: 1242

SEQ ID NO: 1244 - protein, 133 aa, Homo sapiens
  SITE 1: note = misc_feature - Xaa can be any naturally occurring amino acid
XAAMATARVRMGPRCAQALWRMPWLPVFLSLAAAAAAAAAEQQVPLVLWSSDRDLWAPAADTHEGHITSDLQLSTYLDPALELGPRNVLLFLQDKVRPPQPTLPRSSGGSQAPSPHDTDAHSPREASVTLSQL

SEQ ID NO: 1245 - protein, 186 aa, Homo sapiens
FHRPRATVMVMVKGVNKLALPPGSVISYPLENLSRHKHLAKDHSPDLYSLELAGLDEIGKRYGEDSEQFRDASKILVDALQKFADDMYSLYGGNAVVELVTVKSFDTSLIRKTRTILEAKQAKNPASPYNLAYKYNFEYSVVFNMVLWIMIALALAVIITSYNIWNMDPGYDSIIYRMTNQKIRMD

SEQ ID NO: 1246 - protein, 186 aa, Homo sapiens
MAVFVVLLALVAGVLGNEFSILKSPGSVVFRNGNWPIPGERIPDVAALSMGFSVKEDLSWPGLAVGNLFHRPRATVMVMVKGVNKLALPPGSVISYPLENAVPFSLDSVANSIHSLFSEETPVVLQLAPSEERVYMVGKANSVFEDLSVTLRQLRNRLFQENSVLSSLPLNSLSRNNENALFFWAL

SEQ ID NO: 1247 - protein, 209 aa, Homo sapiens
MAVFVVLLALVAGVLGNEFSILKSPGSVVFRNGNWPIPGERIPDVAALSMGFSVKEDLSWPGLAVGNLFHRPRATVMVMVKGVNKLALPPGSVISYPLENAVPFSLDSVANSIHSLFSEETPVVLQLAPSEERVYMVGKANSVFEDLSVTLRQLRNRLFQENSVLSSLPLNSLSRNNEVDLLFLSELQVLHDISSLGETTYLPRTQAWA

SEQ ID NO: 1248 - protein, 345 aa, Homo sapiens
MAVFVVLLALVAGVLGNEFSILKSPGSVVFRNGNWPIPGERIPDVAALSMGFSVKEDLSWPGLAVGNLFHRPRATVMVMVKGVNKLALPPGSVISYPLENAVPFSLDSVANSIHSLFSEETPVVLQLAPSEERVYMVGKANSVFEDLSVTLRQLRNRLFQENSVLSSLPLNSLSRNNEVDLLFLSELQVLHDISSLHLAKDHSPDLYSLELAGLDEIGKRYGEDSEQFRDASKILVDALQKFADDMYSLYGGNAVVELVTVKSFDTSLIRKTRTILEAKQAKNPASPYNLAYKYNFEYSVVFNMVLWIMIALALAVIITSYNIWNMDPGYDSIIYRMTNQKIRMD

SEQ ID NO: 1249 - protein, 331 aa, Homo sapiens
MAVFVVLLALVAGVLGNEFSILKSPGSVVFRNGNWPIPGERIPDVAALSMGFSVKEDLSWPGLAVGNLFHRPRATVMVMVKGVNKLALPPGSVISYPLENAVPFSLDSVANSIHSLFSEETPVVLQLAPSEERVYMVGKANSVFEDLSVTLRQLRNRLFQENSVLSSLPLNSLSRNNEVDLLFLSELQVLHDISSLLAGLDEIGKRYGEDSEQFRDASKILVDALQKFADDMYSLYGGNAVVELVTVKSFDTSLIRKTRTILEAKQAKNPASPYNLAYKYNFEYSVVFNMVLWIMIALALAVIITSYNIWNMDPGYDSIIYRMTNQKIRMD

SEQ ID NO: 1250 - protein, 349 aa, Homo sapiens
MAVFVVLLALVAGVLGNEFSILKSPGSVVFRNGNWPIPGERIPDVAALSMGFSVKEDLSWPGLAVGNLFHRPRATVMVMVKGVNKLALPPGSVISYPLENAVPFSLDSVANSIHSLFSEETPVVLQLAPSEERVYMVGKANSVFEDLSVTLRQLRNRLFQENSVLSSLPLNSLSRNNEVDLLFLSELQVLHDISSLLSRHKHLAKDHSPDLYSLELAGLDEIGKRYGEDSEQFRDASKILVDALQKFADDMYSLYGGNAVVELVTVKSFDTSLIRKTRTILEAKQANPASPYNLAYKYNFEYSVVFNMVLWIMIALALAVIITSYNIWNMDPGYDSIIYRMTNQKIRMD

SEQ ID NO: 1251 - protein, 350 aa, Homo sapiens
MAVFVVLLALVAGVLGNEFSILKSPGSVVFRNGNWPIPGERIPDVAALSMGFSVKEDLSWPGLAVGNLFHRPRATVMVMVKGVNKLALPPGSVISYPLENAVPFSLDSVANSIHSLFSEETPVVLQLAPSEERVYMVGKANSVFEDLSVTLRQLRNRLFQENSVLSSLPLNSLSRNNEVDLLFLSELQVLHDISSLLSRHKHLAKDHSPDLYSLELAGLDEIGKRYGEDSEQFRDASKILVDALQKFADDMYSLYGGNAVVELVTVKSFDTSLIRKTRTILEAKQAKNPASPYNLAYKYNFEYSVVFNMVLWIMIALALAVIITSYNIWNMDPGYDSIIYRMTNQKIRMD

SEQ ID NO: 1252 - protein, 258 aa, Homo sapiens
MAVFVVLLALVAGVLGNEFSILKSPGSVVFRNGNWPIPGERIPDVAALSMGFSVKEDLSWPGLAVGNLFHRPRATVMVMVKGVNKLALPPGSVISYPLENAVPFSLDSVANSIHSLFSEETPVVLQLAPSEERVYMVGKANSVFEDLSVTLRQLRNRLFQENSVLSSLPLNSLSRNNEVDLLFLSELQVLHDISSLLSRHKHLAKDHSPDLYSLELAGLDEIGKRYGEDSEQFRDASKILVDALQKMTCTVFMVGMQW

SEQ ID NO: 1253 - protein, 262 aa, Homo sapiens
MAVFVVLLALVAGVLGNEFSILKSPGSVVFRNGNWPIPGERIPDVAALSMGFSVKEDLSWPGLAVGNLFHRPRATVMVMVKGVNKLALPPGSVISYPLENAVPFSLDSVANSIHSLFSEETPVVLQLAPSEERVYMVGKANSVFEDLSVTLRQLRNRLFQENSVLSSLPLNSLSRNNEVDLLFLSELQVLHDISSLLSRHKHLAKDHSPDLYSLELAGLDEIGKRYGEDSEQFRDASKILVDALQKSLWWECSGRVSHCQVI

SEQ ID NO: 1254 - protein, 143 aa, Homo sapiens
MAVFVVLLALVAGVLGNEFSILKSPGSVVFRNGNWPIPGERIPDVAALSMGFSVKEDLSWPGLAVGNLFHRPRATVMVMVKGVNKLALPPGSVISYPLENAVPFSLDSVANSIHSLFSEETPVVLQLAPSEESVYGREGKLSV

SEQ ID NO: 1255 - protein, 318 aa, Homo sapiens
MAVFVVLLALVAGVLGNEFSILKSPGSVVFRNGNWPIPGERIPDVAALSMGFSVKEDLSWPGLAVGNLFHRPRATVMVMVKGVNKLALPPGSVISYPLENRVYMVGKANSVFEDLSVTLRQLRNRLFQENSVLSSLPLNSLSRNNEVDLLFLSELQVLHDISSLLSRHKHLAKDHSPDLYSLELAGLDEIGKRYGEDSEQFRDASKILVDALQKFADDMYSLYGGNAVVELVTVKSFDTSLIRKTRTILEAKQAKNPASPYNLAYKYNFEYSVVFNMVLWIMIALALAVIITSYNIWNMDPGYDSIIYRMTNQKIRMD

SEQ ID NO: 1256 - protein, 317 aa, Homo sapiens
MAVFVVLLALVAGVLGNEFSILKSPGSVVFRNGNWPIPGERIPDVAALSMGFSVKEDLSWPGLAVGNLFHRPRATVMVMVKGVNKLALPPGSVISYPLENRVYMVGKANSVFEDLSVTLRQLRNRLFQENSVLSSLPLNSLSRNNEVDLLFLSELQVLHDISSLLSRHKHLAKDHSPDLYSLELAGLDEIGKRYGEDSEQFRDASKILVDALQKFADDMYSLYGGNAVVELVTVKSFDTSLIRKTRTILEAKQANPASPYNLAYKYNFEYSVVFNMVLWIMIALALAVIITSYNIWNMDPGYDSIIYRMTNQKIRMD

SEQ ID NO: 1257 - protein, 272 aa, Homo sapiens
MAVFVVLLALVAGVLGNEFSILKSPGSVVFRNGNWPIPGERIPDVAALSMGFSVKEDLSWPGLAVGNLFHRPRATVMVMVKGVNKLALPPGSVISYPLENVDLLFLSELQVLHDISSLLSRHKHLAKDHSPDLYSLELAGLDEIGKRYGEDSEQFRDASKILVDALQKFADDMYSLYGGNAVVELVTVKSFDTSLIRKTRTILEAKQAKNPASPYNLAYKYNFEYSVVFNMVLWIMIALALAVIITSYNIWNMDPGYDSIIYRMTNQKIRMD

SEQ ID NO: 1258 - protein, 128 aa, Homo sapiens
MGFSVKEDLSWPGLAVGNLFHRPRATVMVMVKGVNKLALPPGSVISYPLENAVPFSLDSVANSIHSLFSEETPVVLQLAPSEERVYMVGKANSVFEDLSVTLRQLRNRLFQENSVLSSLPLNSLSRNN

SEQ ID NO: 1259 - protein, 301 aa, Homo sapiens
MGFSVKEDLSWPGLAVGNLFHRPRATVMVMVKGVNKLALPPGSVISYPLENAVPFSLDSVANSIHSLFSEETPVVLQLAPSEERVYMVGKANSVFEDLSVTLRQLRNRLFQENSVLSSLPLNSLSRNNEVDLLFLSELQVLHDISSLLSRHKHLAKDHSPDLYSLELAGLDEIGKRYGEDSEQFRDASKILVDALQKFADDMYSLYGGNAVVELVTVKSFDTSLIRKTRTILEAKQAKNPASPYNLAYKYNFEYSVVFNMVLWIMIALALAVIITSYNIWNMDPGYDSIIYRMTNQKIRMD

SEQ ID NO: 1260 - protein, 274 aa, Homo sapiens
MVMVKGVNKLALPPGSVISYPLENAVPFSLDSVANSIHSLFSEETPVVLQLAPSEERVYMVGKANSVFEDLSVTLRQLRNRLFQENSVLSSLPLNSLSRNNEVDLLFLSELQVLHDISSLLSRHKHLAKDHSPDLYSLELAGLDEIGKRYGEDSEQFRDASKILVDALQKFADDMYSLYGGNAVVELVTVKSFDTSLIRKTRTILEAKQAKNPASPYNLAYKYNFEYSVVFNMVLWIMIALALAVIITSYNIWNMDPGYDSIIYRMTNQKIRMD

SEQ ID NO: 1261 - protein, 273 aa, Homo sapiens
MVMVKGVNKLALPPGSVISYPLENAVPFSLDSVANSIHSLFSEETPVVLQLAPSEERVYMVGKANSVFEDLSVTLRQLRNRLFQENSVLSSLPLNSLSRNNEVDLLFLSELQVLHDISSLLSRHKHLAKDHSPDLYSLELAGLDEIGKRYGEDSEQFRDASKILVDALQKFADDMYSLYGGNAVVELVTVKSFDTSLIRKTRTILEAKQANPASPYNLAYKYNFEYSVVFNMVLWIMIALALAVIITSYNIWNMDPGYDSIIYRMTNQKIRMD

SEQ ID NO: 1262 - protein, 59 aa, Homo sapiens
MVMVKGVNKLALPPGSVISYPLENFLLVLTVLQIPFTPYFLRKLLLFCSWLPVRKECIW

SEQ ID NO: 1263 - protein, 101 aa, Homo sapiens
MVMVKGVNKLALPPGSVISYPLENRVYMVGKANSVFEDLSVTLRQLRNRLFQENSVLSSLPLNSLSRNNEVDLLFLSELQVLHDISSLGETTYLPRTQAWA

SEQ ID NO: 1264 - protein, 242 aa, Homo sapiens
MVMVKGVNKLALPPGSVISYPLENRVYMVGKANSVFEDLSVTLRQLRNRLFQENSVLSSLPLNSLSRNNEVDLLFLSELQVLHDISSLLSRHKHLAKDHSPDLYSLELAGLDEIGKRYGEDSEQFRDASKILVDALQKFADDMYSLYGGNAVVELVTVKSFDTSLIRKTRTILEAKQAKNPASPYNLAYKYNFEYSVVFNMVLWIMIALALAVIITSYNIWNMDPGYDSIIYRMTNQKIRMD

SEQ ID NO: 1265 - protein, 196 aa, Homo sapiens
MVMVKGVNKLALPPGSVISYPLENVDLLFLSELQVLHDISSLLSRHKHLAKDHSPDLYSLELAGLDEIGKRYGEDSEQFRDASKILVDALQKFADDMYSLYGGNAVVELVTVKSFDTSLIRKTRTILEAKQAKNPASPYNLAYKYNFEYSVVFNMVLWIMIALALAVIITSYNIWNMDPGYDSIIYRMTNQKIRMD

SEQ ID NO: 1266 - protein, 294 aa, Homo sapiens
  SITE 1: note = misc_feature - Xaa can be any naturally occurring amino acid
XEFSILKSPGSVVFRNGNWPIPGERIPDVAALSMGFSVKEDLSWPGLAVGNLFHRPRATVMVMVKGVNKLALPPGSVISYPLENAVPFSLDSVANSIHSLFSEETPVVLQLAPSEERVYMVGKANSVFEDLSVTLRQLRNRLFQENSVLSSLPLNSLSRNNEVDLLFLSELQVLHDISSLLSRHKHLAKDHSPDLYSLELAGLDEIGKRYGEDSEQFRDASKILVDALQKKNPASPYNLAYKYNFEYSVVFNMVLWIMIALALAVIITSYNIWNMDPGYDSIIYRMTNQKIRMD

SEQ ID NO: 1267 - protein, 76 aa, Homo sapiens
  SITE 1: note = misc_feature - Xaa can be any naturally occurring amino acid
XSLYGGNAVVELVTVKSFDTSLIRKTRTILEAKQAEKEHVYQKKKKERNKEVFMGVKSFNVCLSSELPAEEPSKSL

SEQ ID NO: 1268 - protein, 113 aa, Homo sapiens
FLCALPRREGYEFFVGQWTGTELHFTALINIQTRGEAAASQLILYHYPELKEEKGIVLMTAEMDSTFLNVAEAQCIANQVQLFYATDRKETYGWAQLLAIHSTLIHLHQRVRK

SEQ ID NO: 1269 - protein, 174 aa, Homo sapiens
LIRSDPAAFESRLEKRSEFRKQPVGHSRQGDFIKCVEQKTDALGKQSVNRGFTKDKTLSSIFNIEMVKEKTAEEIKQIWQQYFAAKDTVYAVIPAEKFDLIWNRAQSCPTNVAEAQCIANQVQLFYATDRKETYGLVETFNLRPNEFKYMSVIAELEQSGLGAELKCAQNQNKT

SEQ ID NO: 1270 - protein, 328 aa, Homo sapiens
MAAVVVAAAGGAGPAVLQVAGLYRGLCAVRSRALGLGLVSPAQLRVFPVRPGSGRPEGGADSSGVGAEAELQANPFYDRYRDKIQLLRRSDPAAFESRLEKRSEFRKQPVGHSRQGDFIKCVEQKTDALGKQSVNRGFTKDKTLSSIFNIEMVKEKTAEEIKQIWQQYFAAKDTVYAVIPAEKFDLIWNRAQSCPTFLCALPRREGYEFFVGQWTGTELHFTALINIQTRGEAAASQLILYHYPELKEEKGIVLMTAEMDSTFLNVAEAQCIANQVQLFYATDRKETYGLVETFNLRPNEFKYMSVIAELEQSGLGAELKCAQNQNKT

SEQ ID NO: 1271 - protein, 351 aa, Homo sapiens
MERARGPRAEADAPEEEEEAGAAMAAVVVAAAGGAGPAVLQVAGLYRGLCAVRSRALGLGLVSPAQLRVFPVRPGSGRPEGGADSSGVGAEAELQANPFYDRYRDKIQLLRRSDPAAFESRLEKRSEFRKQPVGHSRQGDFIKCVEQKTDALGKQSVNRGFTKDKTLSSIFNIEMVKEKTAEEIKQIWQQYFAAKDTVYAVIPAEKFDLIWNRAQSCPTFLCALPRREGYEFFVGQWTGTELHFTALINIQTRGEAAASQLILYHYPELKEEKGIVLMTAEMDSTFLNVAEAQCIANQVQLFYATDRKETYGLVETFNLRPNEFKYMSVIAELEQSGLGAELKCAQNQNKT

SEQ ID NO: 1272 - protein, 351 aa, Homo sapiens; identical to SEQ ID NO: 1271

SEQ ID NO: 1273 - protein, 283 aa, Homo sapiens
MERARGPRAEADAPEEEEEAGAAMAAVVVAAAGGAGPAVLQVAGLYRGLCAVRSRALGLGLVSPAQLRVFPVRPGSGRPEGGADSSGVGAEAELQANPFYDRYRDKIQLLRRSDPAAFESRLEKRSEFRKQPVGHSRQGDFIKCVEQKTDALGKQSVNRGFTKDKTLSSIFNIEMVKEKTAEEIKQIWQQYFAAKDTVYAVIPAEKFDLIWNRAQSCPTNVAEAQCIANQVQLFYATDRKETYGLVETFNLRPNEFKYMSVIAELEQSGLGAELKCAQNQNKT

SEQ ID NO: 1274 - protein, 45 aa, Homo sapiens
MSDPAAFESRLEKRSEFRKQPVGHSRQGDFIKCVEQKDGAQNKLV

SEQ ID NO: 1275 - protein, 240 aa, Homo sapiens
MSDPAAFESRLEKRSEFRKQPVGHSRQGDFIKCVEQKTDALGKQSVNRGFTKDKTLSSIFNIEMVKEKTAEEIKQIWQQYFAAKDTVYAVIPAEKFDLIWNRAQSCPTFLCALPRREGYEFFVGQWTGTELHFTALINIQTRGEAAASQLILYHYPELKEEKGIVLMTAEMDSTFLNVAEAQCIANQVQLFYATDRKETYGLVETFNLRPNEFKYMSVIAELEQSGLGAELKCAQNQNKT

SEQ ID NO: 1276 - protein, 177 aa, Homo sapiens
MVKEKTAEEIKQIWQQYFAAKDTVYAVIPAEKFDLIWNRAQSCPTFLCALPRREGYEFFVGQWTGTELHFTALINIQTRGEAAASQLILYHYPELKEEKGIVLMTAEMDSTFLNVAEAQCIANQVQLFYATDRKETYGLVETFNLRPNEFKYMSVIAELEQSGLGAELKCAQNQNKT

SEQ ID NO: 1277 - protein, 183 aa, Homo sapiens
  SITE 1: note = misc_feature - Xaa can be any naturally occurring amino acid
XGKQSVNRGFTKDKTLSSIFNIEMVKEKTAEEIKQAEKFDLIWNRAQSCPTFLCALPRREGYEFFVGQWTGTELHFTALINIQTRGEAAASQLILYHYPELKEEKGIVLMTAEMDSTFLNVAEAQCIANQVQLFYATDRKETYGLVETFNLRPNEFKYMSVIAELEQSGLGAELKCAQNQNKT

SEQ ID NO: 1278 - protein, 86 aa, Homo sapiens
  SITE 1: note = misc_feature - Xaa can be any naturally occurring amino acid
XVRPGSGRPEGGADSSGVGAEAELQANPFYDRYRDKIQLLRRSDPAAFESRLEKRSEFRKQPVGHSRQGDFIKCVEQKDGAQNKLV

SEQ ID NO: 1279 - protein, 310 aa, Homo sapiens
MAAAVAAAPGALGSLHAGGARLVAACSAWLCPGLRLPGSLAGRRAGPAIWAQGWVPAAGGPAPKRGYSSEMKTEDELRVRHLEEENRGIVVLGINRAYGKNSLSKNLIKMLSKAVDALKSDKKVRTIIIRSEVPGIFCAANLPVPTIAAIDGLALGGGLELALACDIRVAASSAKMGLVETKLAIIPGGGGTQRLPRAIGMSLAKELIFSARVLDGKEAKAVGLISHVLEQNQEGDAAYRKALDLAREFLPQGPVAMRVAKLAINQGMEVDLVTGLAIEEACYAQTIPTKDRLEGLLAFKEKRPPRYKGE

SEQ ID NO: 1280 - protein, 339 aa, Homo sapiens
MAAAVAAAPGALGSLHAGGARLVAACSAWLCPGLRLPGSLAGRRAGPAIWAQGWVPAAGGPAPKRGYSSEMKTEDELRVRHLEEENRGIVVLGINRAYGKNSLSKNLIKMLSKAVDALKSDKKVRTIIIRSEVPGIFCAGADLKERAKMSSSEVGPFVSKIRAVINDIANLPVPTIAAIDGLALGGGLELALACDIRVAASSAKMGLVETKLAIIPGGGGTQRLPRAIGMSLAKELIFSARVLDGKEAKAVGLISHVLEQNQEGDAAYRKALDLAREFLPQGPVAMRVAKLAINQGMEVDLVTGLAIEEACYAQTIPTKDRLEGLLAFKEKRPPRYKGE

SEQ ID NO: 1281 - protein, 164 aa, Homo sapiens
MPDTMLPACFLGLLAFSSACYFQNCPRGGKRAMSDLELRQCLPCGPGGKGRCFGPSICCADELGCFVGTAEALRCQEENYLPSPCQSGQKACGSGGRCAAFGVCCNDESCVTEPECREGFHRRARASDRSNATQLDGPAGALLLRLVQLAGAPEPFEPAQPDAY

SEQ ID NO: 1282 - protein, 151 aa, Homo sapiens
MSSAMLVTCLPDPSSSFREDAPRPPVPGEEGETPPCQPGVGKGQVTKPMPVSSNTRRNEDGLGEPEGRASPDSPLTRWTKSLHSLLGDQDGAYLFRTFLEREKCVDTLDFWFACNGFRQMNLKDTKTLRVAKAIYKRYIENNSIVSKQLKP

SEQ ID NO: 1283 - protein, 192 aa, Homo sapiens
MSSAMLVTCLPDPSSSFREDAPRPPVPGEEGETPPCQPGVGKGQVTKPMPVSSNTRRNEDGLGEPEGRASPDSPLTRWTKSLHSLLGDQDGAYLFRTFLEREKCVDTLDFWFACNGFRQMNLKDTKTLRVAKAIYKRYIENNSIVSKQLKPATKTYIRDGIKKQQIDSIMFDQAQTEIQSVMEENAYQMFLT

SEQ ID NO: 1284 - protein, 192 aa, Homo sapiens; identical to SEQ ID NO: 1283

SEQ ID NO: 1285 - protein, 843 aa, Homo sapiens
MSSAMLVTCLPDPSSSFREDAPRPPVPGEEGETPPCQPGVGKGQVTKPMPVSSNTRRNEDGLGEPEGRASPDSPLTRWTKSLHSLLGDQDGAYLFRTFLEREKCVDTLDFWFACNGFRQMNLKDTKTLRVAKAIYKRYIENNSIVSKQLKPATKTYIRDGIKKQQIDSIMFDQAQTEIQSVMEENAYQMFLTSDIYLEYVRSGGENTAYMSNGGLGSLKVVCGYLPTLNEEEEWTCADFKCKLSPTVVGLSSKTLRATASVRSTETVDSGYRSFKRSDPVNPYHIGSGYVFAPATSANDSEISSDALTDDSMSMTDSSVDGIPPYRVGSKKQLQREMHRSVKANGQVSLPHFPRTHRLPKEMTPVEPATFAAELISRLEKLKLELESRHSLEERLQQIREDEEREGSELTLNSREGAPTQHPLSLLPSGSYEEDPQTILDDHLSRVLKTPGCQSPGVGRYSPRSRSPDHHHHHHSQYHSLLPPGGKLPPAAASPGACPLLGGKGFVTKQTTKHVHHHYIHHHAVPKTKEEIEAEATQRVHCFCPGGSEYYCYSKCKSHSKAPETMPSEQFGGSRGSTLPKRNGKGTEPGLALPAREGGAPGGAGALQLPREEGDRSQDVWQWMLESERQSKPKPHSAQSTKKAYPLESARSSPGERASRHHLWGGNSGHPRTTPRAHLFTQDPAMPPLTPPNTLAQLEEACRRLAEVSKPPKQRCCVASQQRDRNHSATVQTGATPFSNPSLAPEDHKEPKKLAGVHALQASELVVTYFFCGEEIPYRRMLKAQSLTLGHFKEQLSKKGNYRYYFKKASDEFACGAVFEEIWEDETVLPMYEGRILGKVERID

SEQ ID NO: 1286 - protein, 778 aa, Homo sapiens
MSSAMLVTCLPDPSSSFREDAPRPPVPGEEGETPPCQPGVGKGQVTKPMPVSSNTRRNEDGLGEPEGRASPDSPLTRWTKSLHSLLGDQDGAYLFRTFLEREKCVDTLDFWFACNGFRQMNLKDTKTLRVAKAIYKRYIENNSIVSKQLKPATKTYIRDGIKKQQIDSIMFDQAQTEIQSVMEENAYQMFLTSDIYLEYVRSGGENTAYMSNGGLGSLKVVCGYLPTLNEEEEWTCADFKCKLSPTVVGLSSKTLRATASVRSTETVDSGYRSFKRSDPVNPYHIGSGYVFAPATSANDSEISSDALTDDSMSMTDSSVDGIPPYRVGSKKQLQREMHRSVKANGQVSLPHFPRTHRLPKEMTPVEPATFAAELISRLEKLKLELESRHSLEERLQQIREDEEREGSELTLNSREGAPTQHPLSLLPSGSYEEDPQTILDDHLSRVLKTPGCQSPGVGRYSPRSRSPDHHHHHHSQYHSLLPPGGKLPPAAASPGACPLLGGKGFVTKQTTKHVHHHYIHHHAVPKTKEEIEAEATQRVHCFCPGGSEYYCYSKCKSHSKAPETMPSEQFGAQSTKKAYPLESARSSPGERASRHHLWGGNSGHPRTTPRAHLFTQDPAMPPLTPPNTLAQLEEACRRLAEVSKPPKQRCCVASQQRDRNHSATVQTGATPFSNPSLAPEDHKEPKKLAGVHALQASELVVTYFFCGEEIPYRRMLKAQSLTLGHFKEQLSKKGNYRYYFKKASDEFACGAVFEEIWEDETVLPMYEGRILGKVERID

SEQ ID NO: 1287 - protein, 271 aa, Homo sapiens
MSSAMLVTCLPDPSSSFREDAPRPPVPGEEGETPPCQPGVGKGQVTKPMPVSSNTRRNEDGLGEPEGRASPDSPLTRWTKSLHSLLGDQDGAYLFRTFLEREKCVDTLDFWFACNGFRQMNLKDTKTLRVAKAIYKRYIENNSIVSKQLKPATKTYIRDGIKKQQIDSIMFDQAQTEIQSVMEENAYQMFLTSDIYLEYVRSGGENTAYMSNGGLGSLKVVCGYLPTLNEEEEWTCADFKCKLSPTVVGLSSKTLRATASVRSTETVDSGY

SEQ ID NO: 1288 - protein, 778 aa, Homo sapiens; identical to SEQ ID NO: 1286

SEQ ID NO: 1289 - protein, 160 aa, Homo sapiens
MSSAMLVTCLPDPSSSFREDAPRPPVPGEEGETPPCQPGVGKGQVTKPMPVSSNTRRNEDGLGEPEGRASPDSPLTRWTKSLHSLLGDQDGAYLFRTFLEREKCVDTLDFWFACNGFRQMNLKDTKTLRVAKDFCHDILFYLYCKLCIIKSSFKENYLVQ

SEQ ID NO: 1290 - protein, 227 aa, Homo sapiens
MVPVLLSLLLLLGPAVPQENQDGRYSLTYIYTGLSKHVEDVPAFQALGSLNDLQFFRYNSKDRKSQPMGLWRQVEGMEDWKQDSQLQKAREDIFMETLKDIVEYYNDSNGSHVLQGRFGCEIENNRSSGAFWKYYYDGKDYIEFNKEIPAWVPFDPAAQITKQKWEAEPVYVQRAKAYLEEECPATLRKYLKYSKNILDRQGTHCFLLPSTEPRIKDDLRLGAQATS

SEQ ID NO: 1291 - protein, 298 aa, Homo sapiens
MVRMVPVLLSLLLLLGPAVPQENQDGRYSLTYIYTGLSKHVEDVPAFQALGSLNDLQFFRYNSKDRKSQPMGLWRQVEGMEDWKQDSQLQKAREDIFMETLKDIVEYYNDSNGSHVLQGRFGCEIENNRSSGAFWKYYYDGKDYIEFNKEIPAWVPFDPAAQITKQKWEAEPVYVQRAKAYLEEECPATLRKYLKYSKNILDRQDPPSVVVTSHQAPGEKKKLKCLAYDFYPGKIDVHWTRAGEVQEPELRGDVLHNGNGTYQSWVVVAVPPQDTAPYSCHVQHSSLAQPLVVPWEAS

SEQ ID NO: 1292 - protein, 85 aa, Homo sapiens
  SITE 1: note = misc_feature - Xaa can be any naturally occurring amino acid
XTYIYTGLSKHVEDVPAFQALGSLNDLQFFRYNSKDRKSQPMGLWRQQKYPGPARSSLCGGHQPPGPRRKEETEVPGLRLLPREN

SEQ ID NO: 1293 - protein, 150 aa, Homo sapiens
MTAASCFQSQNPGVSTVVLGAYDLRRRERQSRQTFSISSMSENGYDPQQNLNDLMLLQLDREANLTSSVTILPLPLQNATVEAGTRCQVAGWGSQRSGGRLSRFPRFVNVTVTPEDQCRPNNVCTGVLTRRGGICNVSAPCGGRRGPERY

SEQ ID NO: 1294 - protein, 251 aa, Homo sapiens
MTRLTVLALLAGLLASSRAGSSPLLDIVGGRKARPRQFPFLASIQNQGRHFCGGALIHARFVMTAASCFQSQNPGVSTVVLGAYDLRRRERQSRQTFSISSMSENGYDPQQNLNDLMLLQLDREANLTSSVTILPLPLQNATVEAGTRCQVAGWGSQRSGGRLSRFPRFVNVTVTPEDQCRPNNVCTGVLTRRGGICNGDGGTPLVCEGLAHGVASFSLGPCGRGPDFFTRVALFRDWIDGVLNNPGPGPA

SEQ ID NO: 1295 - protein, 71 aa, Homo sapiens
GFHPSDIEVDLLKNGERIEKVEHSDLSFSKDWSFYLLYYTEFTPTEKDEYACRVNHVTLSQPKIVKWDRDM

SEQ ID NO: 1296 - protein, 51 aa, Homo sapiens
MSRSVALAVLALLSLSGLEAIQHSGLLTSSSREWKVKFPELLCVWVSSIRH

SEQ ID NO: 1297 - protein, 101 aa, Homo sapiens
MSRSVALAVLALLSLSGLEAIQRTPKIQVYSRHPADIEVDLLKNGERIEKVEHSDLSFSKDWSFYLLYYTEFTPTEKDEYACRVNHVTLSQPKIVKWDRDM

SEQ ID NO: 1298 - protein, 119 aa, Homo sapiens
MSRSVALAVLALLSLSGLEAIQRTPKIQVYSRHPAENGKSNFLNCYVSGFHPSDIEVDLLKNGERIEKVEHSDLSFSKDWSFYLLYYTEFTPTEKDEYACRVNHVTLSQPKIVKWDRDM

SEQ ID NO: 1299 - protein, 119 aa, Homo sapiens; identical to SEQ ID NO: 1298

SEQ ID NO: 1300 - protein, 119 aa, Homo sapiens; identical to SEQ ID NO: 1298

SEQ ID NO: 1301 - protein, 57 aa, Homo sapiens
MSRSVALAVLALLSLSGLERELKKWSIQTCLSARTGLSISCTTLNSPPLKKMSMPAV

SEQ ID NO: 1302 - protein, 41 aa, Homo sapiens
MASALWTVLPSRMSLRSLKWSLLLLSLLSFFVMWYLSLPHY

SEQ ID NO: 1303 - protein, 46 aa, Homo sapiens
MASALWTVLPSRMSLRSLKWSLLLLSLLSFFVMWYLSLPHYNVIER

SEQ ID NO: 1304 - protein, 54 aa, Homo sapiens
MASALWTVLPSRMSLRSLKWSLLLLSLLSFFVMWYLSLPHYNVIERVNWMYFYE

SEQ ID NO: 1305 - protein, 91 aa, Homo sapiens
MASALWTVLPSRMSLRSLKWSLLLLSLLSFFVMWYLSLPHYNVIERVNWMYFYEIHLDVCQLRRVIAAHGFSSKEIITFWQVMLRNTTCHY

SEQ ID NO: 1306 - protein, 58 aa, Homo sapiens
MASALWTVLPSRMSLRSLKWSLLLLSLLSFFVMWYLSLPHYNVIERVNWMYFYEYEPI

SEQ ID NO: 1307 - protein, 65 aa, Homo sapiens
MASALWTVLPSRMSLRSLKWSLLLLSLLSFFVMWYLSLPHYNVIERVNWMYFYEYEPIYRQDFHF

SEQ ID NO: 1308 - protein, 111 aa, Homo sapiens
MASALWTVLPSRMSLRSLKWSLLLLSLLSFFVMWYLSLPHYNVIERVNWMYFYEYEPIYRQDFHFTLREHSNCSHQNPFLVILVTSHPSDVKARQAIRVTWGEKKSWWGYE

SEQ ID NO: 1309 - protein, 331 aa, Homo sapiens
MASALWTVLPSRMSLRSLKWSLLLLSLLSFFVMWYLSLPHYNVIERVNWMYFYEYEPIYRQDFHFTLREHSNCSHQNPFLVILVTSHPSDVKARQAIRVTWGEKKSWWGYEVLTFFLLGQEAEKEDKMLALSLEDEHLLYGDIIRQDFLDTYNNLTLKTIMAFRWVTEFCPNAKYVMKTDTDVFINTGNLVKYLLNLNHSEKFFTGYPLIDNYSYRGFYQKTHISYQEYPFKVFPPYCSGLGYIMSRDLVPRIYEMMGHVKPIKFEDVYVGICLNLLKVNIHIPEDTNLFFLYRIHLDVCQLRRVIAAHGFSSKEIITFWQVMLRNTTCHY

SEQ ID NO: 1310 - protein, 331 aa, Homo sapiens; identical to SEQ ID NO: 1309

SEQ ID NO: 1311 - protein, 331 aa, Homo sapiens; identical to SEQ ID NO: 1309

SEQ ID NO: 1312 - protein, 331 aa, Homo sapiens; identical to SEQ ID NO: 1309

SEQ ID NO: 1313 - protein, 331 aa, Homo sapiens; identical to SEQ ID NO: 1309

SEQ ID NO: 1314 - protein, 150 aa, Homo sapiens
MSFFLFSEFTTDLSVLIKHGIQKTTKNLSFNFIWNSTVFLAPWTRLTCWLFPLAALSRGALRLLTPSVKSCCSVAQAGVQWQDLSSLQSPSLRFKQFSCLSLPSRWDYRTFGSRASELLWMASALWTVLPSRMSLRSLKWSLLLLSLLSF

SEQ ID NO: 1315 - protein, 92 aa, Homo sapiens
MRNWLVLLCPCVLGAALHLWLRLRSPPPACASGAGPADQLALFPQWKSTHYDVVVGVLSARNNHELRNVIRSTWMRHLLQHPTLSQRFESGN

SEQ ID NO: 1316 - protein, 500 aa, Homo sapiens
MRNWLVLLCPCVLGAALHLWLRLRSPPPACASGAGPADQLALFPQWKSTHYDVVVGVLSARNNHELRNVIRSTWMRHLLQHPTLSQRVLVKFIIGAHGCEVPVEDREDPYSCKLLNITNPVLNQEIEAFSLSEDTSSGLPEDRVVSVSFRVLYPIVITSLGVFYDANDVGFQRNITVKLYQAEQEEALFIARFSPPSCGVQVNKLWYKPVEQFILPESFEGTIVWESQDLHGLVSRNLHKVTVNDGGGVLRVITAGEGALPHEFLEGVEGVAGGFIYTIQEGDALLHNLHSRPQRLIDHIRNLHEEDALLKEESSIYDDIVFVDVVDTYRNVPAKLLNFYRWTVETTSFNLLLKTDDDCYIDLEAVFNRIVQKNLDGPNFWWGNFRLNWAVDRTGKWQELEYPSPAYPAFACGSGYVISKDIVKWLASNSGRLKTYQGEDVSMGIWMAAIGPKRYQDSLWLCEKTCETGMLSSPQYSPWELTELWKLKERCGDPCRCQAR

SEQ ID NO: 1317 - protein, 326 aa, Homo sapiens
MRNWLVLLCPCVLGAALHLWLRLRSPPPACASGAGPAGGVSLLLPRLECNGAVSAHPNLHLPGSRDSPASASQVAGITDQLALFPQWKSTHYDVVVGVLSARNNHELRNVIRSTWMRHLLQHPTLSQRVLVKFIIGAHGCEVPVEDREDPYSCKLLNITNPVLNQEIEAFSLSEDTSSGLPEDRVVSVSFRVLYPIVITSLGVFYDANDVGFQRNITVKLYQAEQEEALFIARFSPPSCGVQVNKLWYKPVEQFILPESFEGTIVWESQDLHGLVSRNLHKVTVNDGGGVLRVITAGEGALPHEFLEGVEGVAGGFIYTIQGKFAS

SEQ ID NO: 1318 - protein, 326 aa, Homo sapiens
MASKVSCLYVLTVVCWASALWYLSITRPTSSYTGSKPFSHLTVARKNFTFGNIRTRPINPHSFEFLINEPNKCEKNIPFLVILISTTHKEFDARQAIRETWGDENNFKGIKIATLFLLGKNADPVLNQMVEQESQIFHDIIVEDFIDSYHNLTLKTLMGMRWVATFCSKAKYVMKTDSDIFVNMDNLIYKLLKPSTKPRRRYFTGYVINGGPIRDVRSKWYMPRDLYPDSNYPPFCSGTGYIFSADVAELIYKTSLHTRLLHLEDVYVGLCLRKLGIHPFQNSGFNHWKMAYSLCRYRRVITVHQISPEEMHRIWNDMSSKKHLRC

SEQ ID NO: 1319 - protein, 378 aa, Homo sapiens
MQLRLFRRLLLAALLLVIVWTLFGPSGLGEELLSLSLASLLPAPASPGPPLALPRLLIPNQEACSGPGAPPFLLILVCTAPENLNQRNAIRASWGGLREARGLRVQTLFLLGEPNAQHPVWGSQGSDLASESAAQGDILQAAFQDSYRNLTLKTLSGLNWAEKHCPMARYVLKTDDDVYVNVPELVSELVLRGGRWGQWERSTEPQREAEQEGGQVLHSEEVPLLYLGRVHWRVNPSRTPGGRHRVSEEQWPHTWGPFPPYASGTGYVLSASAVQLILKVASRAPLLPLEDVFVGVSARRGGLAPTQCVKLAGATHYPLDRCCYGKFLLTSHRLDPWKMQEAWKLVGGSDGERTAPFCSWFQGVLGILRCRAIAWLQS

SEQ ID NO: 1320 - protein, 310 aa, Homo sapiens
MAFPKMRLMYICLLVLGALCLYFSMYSLNPFKEQSFVYKKDGNFLKLPDTDCRQTPPFLVLLVTSSHKQLAERMAIRQTWGKERMVKGKQLKTFFLLGTTSSAAETKEVDQESQRHGDIIQKDFLDVYYNLTLKTMMGIEWVHRFCPQAAFVMKTDSDMFINVDYLTELLLKKNRTTRFFTGFLKLNEFPIRQPFSKWFVSKSEYPWDRYPPFCSGTGYVFSGDVASQVYNVSKSVPYIKLEDVFVGLCLERLNIRLEELHSQPTFFPGGLRFSVCLFRRIVACHFIKPRTLLDYWQALENSRGEDCPPV

SEQ ID NO: 1321 - protein, 310 aa, Homo sapiens; identical to SEQ ID NO: 1320

SEQ ID NO: 1322 - protein, 310 aa, Homo sapiens; identical to SEQ ID NO: 1320

SEQ ID NO: 1323 - protein, 310 aa, Homo sapiens; identical to SEQ ID NO: 1320

SEQ ID NO: 1324 - protein, 314 aa, Homo sapiens
MCLEMAFPKMRLMYICLLVLGALCLYFSMYSLNPFKEQSFVYKKDGNFLKLPDTDCRQTPPFLVLLVTSSHKQLAERMAIRQTWGKERMVKGKQLKTFFLLGTTSSAAETKEVDQESQRHGDIIQKDFLDVYYNLTLKTMMGIEWVHRFCPQAAFVMKTDSDMFINVDYLTELLLKKNRTTRFFTGFLKLNEFPIRQPFSKWFVSKSEYPWDRYPPFCSGTGYVFSGDVASQVYNVSKSVPYIKLEDVFVGLCLERLNIRLEELHSQPTFFPGGLRFSVCLFRRIVACHFIKPRTLLDYWQALENSRGEDCPPV

SEQ ID NO: 1325 - protein, 329 aa, Homo sapiens
MKLLRRAWRRRAALGLGTLALCGAALLYLARCAAEPGDPRAMSGRSPPPPAPARAAAFLAVLVASAPRAAERRSVIRSTWLARRGAPGDVWARFAVGTAGLGAEERRALEREQARHGDLLLLPALRDAYENLTAKVLAMLAWLDEHVAFEFVLKADDDSFARLDALLAELRAREPARRRRLYWGFFSGRGRVKPGGRWREAAWQLCDYYLPYALGGGYVLSADLVHYLRLSRDYLRAWHSEDVSLGAWLAPVDVQREHDPRFDTEYRSRGCSNQYLVTHKQSLEDMLEKHATLAREGRLCKREVQLRLSYVYDWSAPPSQCCQRREGIP

SEQ ID NO: 1326 - protein, 223 aa, Homo sapiens
MKLKLKNVFLAYFLVSIAGLLYALVQLAKGMDRTLPLMQRFRDSATALSSGQPCDCLPPLRAAAEQLRQKDLRISQLQAELRRPPPAPAQPPEPEALPTIYVVTPTYARLVQKAELVRLSQTLSLVPRLHWLLVEDAEGPTPLVSGLLAASGLLFTHLVVLTPKAQRLREGEPGWVHPRGVEQRNKALDWLRGRGGAVGGEKDPPPPGTQGVVYFADDDNTYS

SEQ ID NO: 1327 - protein, 335 aa, Homo sapiens
MKLKLKNVFLAYFLVSIAGLLYALVQLGQPCDCLPPLRAAAEQLRQKDLRISQLQAELRRPPPAPAQPPEPEALPTIYVVTPTYARLVQKAELVRLSQTLSLVPRLHWLLVEDAEGPTPLVSGLLAASGLLFTHLVVLTPKAQRLREGEPGWVHPRGVEQRNKALDWLRGRGGAVGGEKDPPPPGTQGVVYFADDDNTYSRELFEEMRWTRGVSVWPVGLVGGLRFEGPQVQDGRVVGFHTAWEPSRPFPVDMAGFAVALPLLLDKPNAQFDSTAPRGHLESSLLSHLVDPKDLEPRAANCTRVLVWHTRTEKPKMKQEEQLQRQGRGSDPAIEV

SEQ ID NO: 1328 - protein, 319 aa, Homo sapiens
MKLKLKNVFLAYFLVSIAGLLYALVQLGQPCDCLPPLRAAAEQLRQKDLRISQLQAELRRPPPAPAQPPEPEALPTIYVVTPTYARLVQKAELVRLSQTLSLVPRLHWLLVEDAEGPTPLVSGLLAASGLLFTHLVVLTPKAQRLREGEPGWVHPRGVEQRNKALDWLRGRGGAVGGEKDPPPPGTQGVVYFADDDNTYSRELFEEMRWTRGVSVWPVGLVGGLRFEGPQVQDGRVVGFHTAWEPSRPFPVDMAGFAVALPLLLDKPNAQFDSTAPRGHLESSLLSHLVDPKDLEPRAANCTRSLAVSPRLECSSAILA

SEQ ID NO: 1329 - protein, 315 aa, Homo sapiens
MKLKLKNVFLAYFLVSIAGLLYALVQLGQPCDCLPPLRAAAEQLRQKDLRISQLQAELRRPPPAPAQPPEPEALPTIYVVTPTYARLVQKAELVRLSQTLSLVPRLHWLLVEDAEGPTPLVSGLLAASGLLFTHLVVLTPKAQRLREGEPGWVHPRGVEQRNKALDWLRGRGGAVGGEKDPPPPGTQGVVYFADDDNTYSRELFEEMRWTRGVSVWPVGLVGGLRFEGPQVQDGRVVGFHTAWEPSRPFPVDMAGFAVALPLLLDKPNAQFDSTAPRGHLESSLLSHLVDPKDLEPRAANCTRTESRCVTQAGVQ

SEQ ID NO: 1330 - protein, 38 aa, Homo sapiens
MKLKLKNVFLAYFLVSIAGLLYALVQLVSASSTKQKAR

SEQ ID NO: 1331 - protein, 498 aa, Homo sapiens
MRPPACWWLLAPPALLALLTCSLAFGLASEDTKKEVKQSQDLEKSGISRKNDIDLKGIVFVIQSQSNSFHAKRAEQLKKSILKQAADLTQELPSVLLLHQLAKQEGAWTILPLLPHFSVTYSRNSSWIFFCEEETRIQIPKLLETLRRYDPSKEWFLGKALHDEEATIIHHYAFSENPTVFKYPDFAAGWALSIPLVNKLTKRLKSESLKSDFTIDLKHEIALYIWDKGGGPPLTPVPEFCTNDVDFYCATTFHSFLPLCRKPVKKKDIFVAVKTCKKFHGDRIPIVKQTWESQASLIEYYSDYTENSIPTVDLGIPNTDRGHCGKTFAILERFLNRSQDKTAWLVIVDDDTLISISRLQHLLSCYDSGEPVFLGERYGYGLGTGGYSYITGGGGMVFSREAVRRLLASKCRCYSNDAPDDMVLGMCFSGLGIPVTHSPLFHQARPVDYPKDYLSHQVPISFHKHWNIDPVKVYFTWLAPSDEDKARQETQKGFREEL

SEQ ID NO: 1332 - protein, 127 aa, Homo sapiens
MKYLRHRRPNATLILAIGAFTLLLFSLLVSPPTCKVQEQPPAIPEALAWPTPPTRPAPAPCHANTSMVTHPDFATQPQHVQNFLLYRHCRHFPLLQDVPPSKCAQPVFLLLVIKSSPSNYVRRELLR

SEQ ID NO: 1333 - protein, 250 aa, Homo sapiens
MKYLRHRRPNATLILAIGAFTLLLFSLLVSPPTCKVQEQPPAIPEALAWPTPPTRPAPAPCHANTSMVTHPDFATQPQHVQNFLLYRHCRHFPLLQDVPPSKCAQPVFLLLVIKSSPSNYVRRELLRRTWGRERKVRGLQLRLLFLVGTASNPHEARKVNRLLELEAQTHGDILQWDFHDSFFNLTLKQVLFLQWQETRCANASFVLNGDDDVFAHTDNMVFYLQDHDPGRHLFVGQLIQNVGPIRAFWS

SEQ ID NO: 1334 - protein, 372 aa, Homo sapiens
MKYLRHRRPNATLILAIGAFTLLLFSLLVSPPTCKVQEQPPAIPEALAWPTPPTRPAPAPCHANTSMVTHPDFATQPQHVQNFLLYRHCRHFPLLQDVPPSKCAQPVFLLLVIKSSPSNYVRRELLRRTWGRERKVRGLQLRLLFLVGTASNPHEARKVNRLLELEAQTHGDILQWDFHDSFFNLTLKQVLFLQWQETRCANASFVLNGDDDVFAHTDNMVFYLQDHDPGRHLFVGQLIQNVGPIRAFWSKYYVPEVVTQNERYPPYCGGGGFLLSRFTAAALRRAAHVLDIFPIDDVFLGMCLELEGLKPASHSGIRTSGVRAPSQRLSSFDPCFYRDLLLVHRFLPYEMLLMWDALNQPNLTCGNQTQIY

SEQ ID NO: 1335 - protein, 372 aa, Homo sapiens; identical to SEQ ID NO: 1334

SEQ ID NO: 1336 - protein, 353 aa, Homo sapiens
MLCRLCWLVSYSLAVLLLGCLLFLRKAAKPAGDPTAHQPFWAPPTPRHSRCPPNHTVSSASLSLPSRHRLFLTYRHCRNFSILLEPSGCSKDTFLLLAIKSQPGHVERRAAIRSTWGRVGGWARGRQLKLVFLLGVAGSAPPAQLLAYESREFDDILQWDFTEDFFNLTLKELHLQRWVVAACPQAHFMLKGDDDVFVHVPNVLEFLDGWDPAQDLLVGDVIRQALPNRNTKVKYFIPPSMYRATHYPPYAGGGGYVMSRATVRRLQAIMEDAELFPIDDVFVGMCLRRLGLSPMHHAGFKTFGIRRPLDPLDPCLYRGLLLVHRLSPLEMWTMWALVTDEGLKCAAGPIPQR

SEQ ID NO: 1337 - protein, 353 aa, Homo sapiens; identical to SEQ ID NO: 1336

SEQ ID NO: 1338 - protein, 378 aa, Homo sapiens
MLPPQPSAAHQGRGGRSGLLPKGPAMLCRLCWLVSYSLAVLLLGCLLFLRKAAKPAGDPTAHQPFWAPPTPRHSRCPPNHTVSSASLSLPSRHRLFLTYRHCRNFSILLEPSGCSKDTFLLLAIKSQPGHVERRAAIRSTWGRVGGWARGRQLKLVFLLGVAGSAPPAQLLAYESREFDDILQWDFTEDFFNLTLKELHLQRWVVAACPQAHFMLKGDDDVFVHVPNVLEFLDGWDPAQDLLVGDVIRQALPNRNTKVKYFIPPSMYRATHYPPYAGGGGYVMSRATVRRLQAIMEDAELFPIDDVFVGMCLRRLGLSPMHHAGFKTFGIRRPLDPLDPCLYRGLLLVHRLSPLEMWTMWALVTDEGLKCAAGPIPQR

SEQ ID NO: 1339 - protein, 55 aa, Homo sapiens
MLPPQPSAAHQGRGGRSGLLPKGWQDPLPQPSCWPMRVGSLMTSSSGTSLRTSST

SEQ ID NO: 1340 - protein, 121 aa, Homo sapiens
MAFPCRRSLTAKTLACLLVGVSFLALQQWFLQAPRSPREERSPQEETPEGPTDAPAADEPPSELVPGPPCVANASANATADFEQLPARIQDFLRYRHCRHFPLLWDAPAKCAGGRGVFLLL

SEQ ID NO: 1341 - protein, 384 aa, Homo sapiens
MAFPCRRSLTAKTLACLLVGVSFLALQQWFLQAPRSPREERSPQEETPEGPTDAPAADEPPSELVPGPPCVANASANATADFEQLPARIQDFLRYRHCRHFPLLWDAPAKCAGGRGVFLLLAVKSAPEHYERRELIRRTWGQERSYGGRPVRRLFLLGTPGPEDEARAERLAELVALEAREHGDVLQWAFADTFLNLTLKHLHLLDWLAARCPHARFLLSGDDDVFVHTANVVRFLQAQPPGRHLFSGQLMEGSVPIRDSWSKYFVPPQLFPGSAYPVYCSGGGFLLSGPTARALRAAARHTPLFPIDDAYMGMCLERAGLAPSGHEGIRPFGVQLPGAQQSSFDPCMYRELLLVHRFAPYEMLLMWKALHSPALSCDRGHRVS

SEQ ID NO: 1342 - protein, 401 aa, Homo sapiens
MSLWKKTVYRSLCLALALLVAVTVFQRSLTPGQFLQEPPPPTLEPQKAQKPNGQLVNPNNFWKNPKDVAAPTPMASQGPQAWDVTTTNCSANINLTHQPWFQVLEPQFRQFLFYRHCRYFPMLLNHPEKCRGDVYLLVVVKSVITQHDRREAIRQTWGRERQSAGGGRGAVRTLFLLGTASKQEERTHYQQLLAYEDRLYGDILQWGFLDTFFNLTLKEIHFLKWLDIYCPHVPFIFKGDDDVFVNPTNLLEFLADRQPQENLFVGDVLQHARPIRRKDNKYYIPGALYGKASYPPYAGGGGFLMAGSLARRLHHACDTLELYPIDDVFLGMCLEVLGVQPTAHEGFKTFGISRNRNSRMNKEPCFFRAMLVVHKLLPPELLAMWGLVHSNLTCSRKLQVL

SEQ ID NO: 1343 - protein, 397 aa, Homo sapiens
MRCPKCLLCLSALLTLLGLKVYIEWTSESRLSKAYPSPRGTPPSPTPANPEPTLPANLSTRLGQTIPLPFAYWNQQQWRLGSLPSGDSTETGGCQAWGAAAATEIPDFASYPKDLRRFLLSAACRSFPQWLPGGGGSQVSSCSDTDVPYLLLAVKSEPGRFAERQAVRETWGSPAPGIRLLFLLGSPVGEAGPDLDSLVAWESRRYSDLLLWDFLDVPFNQTLKDLLLLAWLGRHCPTVSFVLRAQDDAFVHTPALLAHLRALPPASARSLYLGEVFTQAMPLRKPGGPFYVPESFFEGGYPAYASGGGYVIAGRLAPWLLRAAARVAPFPFEDVYTGLCIRALGLVPQAHPGFLTAWPADRTADHCAFRNLLLVRPLGPQASIRLWKQLQDPRLQC

SEQ ID NO: 1344 - protein, 402 aa, Homo sapiens
MRRRLRLRRDALLTLLLGASLGLLLYAQRDGAAPTASAPRGRGRAAPRPTPGPRAFQLPDAGAAPPAYEGDTPAPPTPTGPFDFARYLRAKDQRRFPLLINQPHKCRGDGAPGGRPDLLIAVKSVAEDFERRQAVRQTWGAEGRVQGALVRRVFLLGVPRGAGSGGADEVGEGARTHWRALLRAESLAYADILLWAFDDTFFNLTLKEIHFLAWASAFCPDVRFVFKGDADVFVNVGNLLEFLAPRDPAQDLLAGDVIVHARPIRTRASKYYIPEAVYGLPAYPAYAGGGGFVLSGATLHRLAGACAQVELFPIDDVFLGMCLQRLRLTPEPHPAFRTFGIPQPSAAPHLSTFDPCFYRELVVVHGLSAADIWLMWRLLHGPHGPACAHPQPVAAGPFQWDS

SEQ ID NO: 1345 - protein, 96 aa, Homo sapiens
MWLGRRALCALVLLLACASLGLLYASTRDAPGLRLPLAPWAPPQSPRRPELPDLAPEPRYAHIPVRIKEQVVGAEGCLCHKRAGVPGLSVEEPVPS

SEQ ID NO: 1346 - protein, 81 aa, Homo sapiens
MWLGRRALCALVLLLACASLGLLYASTRDAPGLRLPLAPWAPPQSPRRPELPDLAPEPRYAHIPVRIKEQVVGLLAWNNCS

SEQ ID NO: 1347 - protein, 120 aa, Homo sapiens
MWLGRRALCALVLLLACASLGLLYASTRDAPGLRLPLAPWAPPQSPRRPELPDLAPEPRYAHIPVRIKEQVVGLLAWNNCSCESSGGGLPLPFQKQVRAIDLTKAFDPAELRAASATREQ

SEQ ID NO: 1348 - protein, 231 aa, Homo sapiens
MWLGRRALCALVLLLACASLGLLYASTRDAPGLRLPLAPWAPPQSPRRPELPDLAPEPRYAHIPVRIKEQVVGLLAWNNCSCESSGGGLPLPFQKQVRAIDLTKAFDPAELRAASATREQEFQAFLSRSQSPADQLLIAPANSPLQYPLQGVEVQPLRSILVPGEPDCLPRHLGRGRGSDWSYSHWRGSGRSHPCQPRAGPTQQATTTGHLQQPKLPDQHSRHSPVLHRGT

SEQ ID NO: 1349 - protein, 237 aa, Homo sapiens
MWLGRRALCALVLLLACASLGLLYASTRDAPGLRLPLAPWAPPQSPRRPELPDLAPEPRYAHIPVRIKEQVVGLLAWNNCSCESSGGGLPLPFQKQVRAIDLTKAFDPAELRAASATREQEFQAFLSRSQSPADQLLIAPANSPLQYPLQGVEVQPLRSILVPGLSLQAASGQEVYQVNLTASLGTWDVAGEVTGVTLTGEGQADLTLVSPGLDQLNRQLQLVTYSSRSYQTNTADT

SEQ ID NO: 1350 - protein, 304 aa, Homo sapiens
MWLGRRALCALVLLLACASLGLLYASTRDAPGLRLPLAPWAPPQSPRRPELPDLAPEPRYAHIPVRIKEQVVGLLAWNNCSCESSGGGLPLPFQKQVRAIDLTKAFDPAELRAASATREQEFQAFLSRSQSPADQLLIAPANSPLQYPLQGVEVQPLRSILVPGLSLQAASGQEVYQVNLTASLGTWDVAGEVTGVTLTGEGQADLTLVSPGLDQLNRQLQLVTYSSRSYQTNTADTAQYNISALVTIATKTFLRYDRLRALITSIRRFYPTVTVVIADDSDKPERVSGPYVEHYLMPFGKVCS

SEQ ID NO: 1351 - protein, 328 aa, Homo sapiens
MWLGRRALCALVLLLACASLGLLYASTRDAPGLRLPLAPWAPPQSPRRPELPDLAPEPRYAHIPVRIKEQVVGLLAWNNCSCESSGGGLPLPFQKQVRAIDLTKAFDPAELRAASATREQEFQAFLSRSQSPADQLLIAPANSPLQYPLQGVEVQPLRSILVPGLSLQAASGQEVYQVNLTASLGTWDVAGEVTGVTLTGEGQADLTLVSPGLDQLNRQLQLVTYSSRSYQTNTADTGARPGWRDGQAGQTEKNQKGWSGQMAEGMGGIWAMARAVQPHNGCFNWTSRARGRKGAFVHLGLEQARGKPEPWVCLPFRPTVGGPRKRLV

SEQ ID NO: 1352 - protein, 328 aa, Homo sapiens; identical to SEQ ID NO: 1351

SEQ ID NO: 1353 - protein, 533 aa, Homo sapiens
MWLGRRALCALVLLLACASLGLLYASTRDAPGLRLPLAPWAPPQSPRRPELPDLAPEPRYAHIPVRIKEQVVGLLAWNNCSCESSGGGLPLPFQKQVRAIDLTKAFDPAELRAASATREQEFQAFLSRSQSPADQLLIAPANSPLQYPLQGVEVQPLRSILVPGLSLQAASGQEVYQVNLTASLGTWDVAGEVTGVTLTGEGQADLTLVSPGLDQLNRQLQLVTYSSRSYQTNTADTVRFSTEGHEAAFTIRIRHPPNPRLYPPGSLPQGAQYNISALVTIATKTFLRYDRLRALITSIRRFYPTVTVVIADDSDKPERVSGPYVEHYLMPFGKGWFAGRNLAVSQVTTKYVLWVDDDFVFTARTRLERLVDVLERTPLDLVGGAVREISGFATTYRQLLSVEPGAPGLGNCLRQRRGFHHELVGFPGCVVTDGVVNFFLARTDKVREVGFDPRLSRVAHLEFFLDGLGSLRVGSCSDVVVDHASKLKLPWTSRDAGAETYARYRYPGSLDESQMAKHRLLFFKHRLQCMTSQ

SEQ ID NO: 1354 - protein, 478 aa, Homo sapiens
MWLGRRALCALVLLLACASLGLLYASTRDAPGLRLPLAPWAPPQSPRRPELPDLAPEPRYAHIPVRIKEQVVGSQSPADQLLIAPANSPLQYPLQGVEVQPLRSILVPGLSLQAASGQEVYQVNLTASLGTWDVAGEVTGVTLTGEGQADLTLVSPGLDQLNRQLQLVTYSSRSYQTNTADTVRFSTEGHEAAFTIRIRHPPNPRLYPPGSLPQGAQYNISALVTIATKTFLRYDRLRALITSIRRFYPTVTVVIADDSDKPERVSGPYVEHYLMPFGKGWFAGRNLAVSQVTTKYVLWVDDDFVFTARTRLERLVDVLERTPLDLVGGAVREISGFATTYRQLLSVEPGAPGLGNCLRQRRGFHHELVGFPGCVVTDGVVNFFLARTDKVREVGFDPRLSRVAHLEFFLDGLGSLRVGSCSDVVVDHASKLKLPWTSRDAGAETYARYRYPGSLDESQMAKHRLLFFKHRLQCMTSQ

SEQ ID NO: 1355 - protein, 151 aa, Homo sapiens
  SITE 1: note = misc_feature - Xaa can be any naturally occurring amino acid
XMPFGKGWFAGRNLAVSQVTTKYVLWVDDDFVFTARTRLERLVDVLERTPLDLARLEATSLSLQVGGAVREISGFATTYRQLLSVEPGAPGLGNCLRQRRGFHHELVGFPGCVVTDGVVNFFLARTDKVREVGFDPRLSRVAHLEFFLDGL

SEQ ID NO: 1356 - protein, 127 aa, Homo sapiens
  SITE 1: note = misc_feature - Xaa can be any naturally occurring amino acid
XSQSPADQLLIAPANSPLQYPLQGVEVQPLRSILVPGLSLQAASGQEVYQVNLTASLGTWDVAGEVTGVTLTGEGQADLTLVSPGLDQLNRQLQLVTYSSRSYQTNTADTGSNAMSFLPSPVLHRGT

SEQ ID NO: 1357 - protein, 637 aa, Homo sapiens [sequence omitted]

SEQ ID NO: 1358 - protein, 998 aa, Homo sapiens [sequence omitted]

SEQ ID NO: 1359 - protein, 53 aa, Homo sapiens
DASSIVFLCDLHIHFPPNILDGIRKHCVEGRLAFAPVVMRLSCGSSPRDPHGS

SEQ ID NO: 1360 - protein, 26 aa, Homo sapiens
DVERALRAARLPRDRACDSPSPGTST

SEQ ID NO: 1361 - protein, 1039 aa, Homo sapiens
MPRLPVKKIRKQMKLLLLLLLLSCAAWLTYVHLGLVRQGRALRQRLGYGRDGEKLTSETDGRGVHAAPSTQRAEDSSESREEEQAPEGRDLDMLFPGGAGRLPLNFTHQTPPWREEYKGQVNLHVFEDWCGGAVGHLRRNLHFPLFPHTRTTVKKLAVSPKWKNYGLRIFGFIHPARDGDVQFSVASDDNSEFWLSLDESPAAAQLVAFVGKTGSEWTAPGEFTKFSSQVSKPRRLMASRRYYFELLHKQDDRGSDHVEVGWRAFLPGLKFEVISSAHISLYTDESALKMDHVAHVPQSPASHVGGRPPQEETSADMLRPDPRDTFFLTPRMESSSLENVLEPCAYAPTYVVKDFPIARYQGLQFVYLSFVYPNDYTRLTHMETDNKCFYRESPLYLERFGFYKYMKMDKEEGDEDEEDEVQRRAFLFLNPDDFLDDEDEGELLDSLEPTEAAPPRSGPQSPAPAAPAQPGATLAPPTPPRPRDGGTPRHSRALSWAARAARPLPLFLGRAPPPRPAVEQPPPKVYVTRVRPGQRASPRAPAPRAPWPPFPGVFLHPRPLPRVQLRAPPRPPRPHGRRTGGPQATQPRPPARAQATQGGREGQARTLGPAAPTVDSNLSSEARPVTSFLSLSQVSGPQLPGEGEEEEEGEDDGAPGDEAASEDSEEAAGPALGRWREDAIDWQRTFSVGAVDFELLRSDWNDLRCNVSGNLQLPEAEAVDVTAQYMERLNARHGGRFALLRIVNVEKRRDSARGSRFLLELELQERGGGRLRLSEYVFLRLPGARVGDADGESPEPAPAASVRPDGRPELCRPLRLAWRQDVMVHFIVPVKNQARWVAQFLADMAALHARTGDSRFSVVLVDFESEDMDVERALRAARLPRYQYLRRTGNFERSAGLQAGVDAVEDASSIVFLCDLHIHFPPNILDGIRKHCVEGRLAFAPVVMRLSCGSSPRDPHGYWEVNGFGLFGIYKSDFDRVGGMNTEEFRDQWGGEDWELLDRVLQAGLEVERLRLRNFYHHYHSKRGMWSVRSRKGSRTGAS

SEQ ID NO: 1362 - protein, 62 aa, Homo sapiens
MANFHKTLILGKGKTLTNEASTKKVELDNCPSVSPYLRGQSKLIFKPDLTLEEVQEIRLLNV

SEQ ID NO: 1363 - protein, 6 aa, Homo sapiens
MGFNLT

SEQ ID NO: 1364 - protein, 21 aa, Homo sapiens
MGFNLTFHLSYKFRLLLLLTL

SEQ ID NO: 1365 - protein, 42 aa, Homo sapiens
MGFNLTFHLSYKFRLLLLLTLCLTVVGWATSNYFVGAIQEIP

SEQ ID NO: 1366 - protein, 55 aa, Homo sapiens
MGFNLTFHLSYKFRLLLLLTLCLTVVGWATSNYFVGAIQEIPKAKEFMANFHKTL

SEQ ID NO: 1367 - protein, 118 aa, Homo sapiens
MGFNLTFHLSYKFRLLLLLTLCLTVVGWATSNYFVGAIQEIPKAKEFMANFHKTLILGKGKTLTNEASTKKVELDNCPSVSPYLRGQSKLIFKPDLTLEEVQAENPKVSRGRYRPQEC

SEQ ID NO: 1368 - protein, 136 aa, Homo sapiens
MGFNLTFHLSYKFRLLLLLTLCLTVVGWATSNYFVGAIQEIPKAKEFMANFHKTLILGKGKTLTNEASTKKVELDNCPSVSPYLRGQSKLIFKPDLTLEEVQAENPKVSRGRYRPQECKALQRVAILVPHRNREKH

SEQ ID NO: 1369 - protein, 246 aa, Homo sapiens
MGFNLTFHLSYKFRLLLLLTLCLTVVGWATSNYFVGAIQEIPKAKEFMANFHKTLILGKGKTLTNEASTKKVELDNCPSVSPYLRGQSKLIFKPDLTLEEVQAENPKVSRGRYRPQECKALQRVAILVPHRNREKHLMYLLEHLHPFLQRQQLDYGIYVIHQAEGKKFNRAKLLNVGYLEALKEENWDCFIFHDVDLVPENDFNLYKCEEHPKHLVVGRNSTGYRLRYSGYFGGVTALSREQFFKG

SEQ ID NO: 1370 - protein, 344 aa, Homo sapiens
MGFNLTFHLSYKFRLLLLLTLCLTVVGWATSNYFVGAIQEIPKAKEFMANFHKTLILGKGKTLTNEASTKKVELDNCPSVSPYLRGQSKLIFKPDLTLEEVQAENPKVSRGRYRPQECKALQRVAILVPHRNREKHLMYLLEHLHPFLQRQQLDYGIYVIHQAEGKKFNRAKLLNVGYLEALKEENWDCFIFHDVDLVPENDFNLYKCEEHPKHLVVGRNSTGYRLRYSGYFGGVTALSREQFFKVNGFSNNYWGWGGEDDDLRLRVELQRMKISRPLPEVGKYTMVFHTRDKGNEVNAERMKLLHQVSRVWRTDGLSSCSYKLVSVEHNPLYINITVDFWFGA

SEQ ID NO: 1371 - protein, 344 aa, Homo sapiens; identical to SEQ ID NO: 1370

SEQ ID NO: 1372 - protein, 344 aa, Homo sapiens; identical to SEQ ID NO: 1370

SEQ ID NO: 1373 - protein, 301 aa, Homo sapiens
MGFNLTFHLSYKFRLLLLLTLCLTVVGWATSNYFVGAIQEIPKAKEFMANFHKTLILGKGKTLTNEASTKKVELDNCPSVSPYLRGQSKLIFKPDLTLEEVQAENPKVSRGRYRPQECKALQRVAILVPHRNREKHLMYLLEHLHPFLQRQQLDYGIYVIHQAEGKKFNRAKLLNVGYLEALKEENWDCFIFHDVDLVPENDFNLYKCEEHPKHLVVGRNSTGYRLRYSGYFGGVTALSREQFFKVNGFSNNYWGWGGEDDDLRLRVELQRMKISRPLPEVGKYTMVFHTRDKGNEVNAER

SEQ ID NO: 1374 - protein, 25 aa, Homo sapiens
MYLLEHLHPFLQRQQLDYGIYVIHQ

SEQ ID NO: 1375 - protein, 388 aa, Homo sapiens
MRARRGLLRLPRRSLLAALFFFSLSSSLLYFVYVAPGIVNTYLFMMQAQGILIRDNVRTIGAQVYEQVLRSAYAKRNSSVNDSDYPLDLNHSETFLQTTTFLPEDFTYFANHTCPERLPSMKGPIDINMSEIGMDYIHELFSKDPTIKLGGHWKPSDCMPRWKVAILIPFRNRHEHLPVLFRHLLPMLQRQRLQFAFYVVEQVGTQPFNRAMLFNVGFQEAMKDLDWDCLIFHDVDHIPESDRNYYGCGQMPRHFATKLDKYMYLLPYTEFFGGVSGLTVEQFRKINGFPNAFWGWGGEDDDLWNRVQNAGYSVSRPEGDTGKYKSIPHHHRGEVQFLGRYALLRKSKERQGLDGLNNLNYFANITYDALYKNITVNLTPELAQVNEY

SEQ ID NO: 1376 - protein, 343 aa, Homo sapiens
MSVLRRMMRVSNRSLLAFIFFFSLSSSCLYFIYVAPGIANTYLFMVQARGIMLRENVKTIGHMIRLYTNKNSTLNGTDYPEGNNSSDYLVQTTTYLPENFTYSPYLPCPEKLPYMRGFLNVNVSEVSFDEIHQLFSKDLDIEPGGHWRPKDCKPRWKTGTQPFNRAMLFNVGFKEAMKDSVWDCVIFHDVDHLPENDRNYYGCGEMPRHFAAKLDKYMYILPYKEFFGGVSGLTVEQFRKINGFPNAFWGWGGEDDDLWNRVHYAGYNVTRPEGDLGKYKSIPHHHRGEVQFLGRYKLLRYSKERQYIDGLNNLIYRPKILVDRLYTNISVNLMPELAPIEDY

SEQ ID NO: 1377 - protein, 382 aa, Homo sapiens
MSVLRRMMRVSNRSLLAFIFFFSLSSSCLYFIYVAPGIANTYLFMVQARGIMLRENVKTIGHMIRLYTNKNSTLNGTDYPEGNNSSDYLVQTTTYLPENFTYSPYLPCPEKLPYMRGFLNVNVSEVSFDEIHQLFSKDLDIEPGGHWRPKDCKPRWKVAVLIPFRNRHEHLPIFFLHLIPMLQKQRLEFAFYVIEQTGTQPFNRAMLFNVGFKEAMKDSVWDCVIFHDVDHLPENDRNYYGCGEMPRHFAAKLDKYMYILPYKEFFGGVSGLTVEQFRKINGFPNAFWGWGGEDDDLWNRVHYAGYNVTRPEGDLGKYKSIPHHHRGEVQFLGRYKLLRYSKERQYIDGLNNLIYRPKILVDRLYTNISVNLMPELAPIEDY

SEQ ID NO: 1378 - protein, 343 aa, Homo sapiens
MSVLRRMMRVSNRSLLAFIFFFSLSSSCLYFIYVAPGIDYPEGNNSSDYLVQTTTYLPENFTYSPYLPCPEKLPYMRGFLNVNVSEVSFDEIHQLFSKDLDIEPGGHWRPKDCKPRWKVAVLIPFRNRHEHLPIFFLHLIPMLQKQRLEFAFYVIEQTGTQPFNRAMLFNVGFKEAMKDSVWDCVIFHDVDHLPENDRNYYGCGEMPRHFAAKLDKYMYILPYKEFFGGVSGLTVEQFRKINGFPNAFWGWGGEDDDLWNRVHYAGYNVTRPEGDLGKYKSIPHHHRGEVQFLGRYKLLRYSKERQYIDGLNNLIYRPKILVDRLYTNISVNLMPELAPIEDY

SEQ ID NO: 1379 - protein, 72 aa, Homo sapiens
MVQARGIMLRENVKTIGHMIRLYTNKNSTLNGTDYPEGNNSSDYLVQTTTYLPENFTYSPYLPCPEKLPYMR

SEQ ID NO: 1380 - protein, 415 aa, Homo sapiens
MQMSYAIRCAFYQLLLAALMLVAMLQLLYLSLLSGLHGQEEQDQYFEFFPPSPRSVDQVKAQLRTALASGGVLDASGDYRVYRGLLKTTMDPNDVILATHASVDNLLHLSGLLERWEGPLSVSVFAATKEEAQLATVLAYALSSHCPDMRARVAMHLVCPSRYEAAVPDPREPGEFALLRSCQEVFDKLARVAQPGINYALGTNVSYPNNLLRNLAREGANYALVIDVDMVPSEGLWRGLREMLDQSNQWGGTALVVPAFEIRRARRMPMNKNELVQLYQVGEVRPFYYGLCTPCQAPTNYSRWVNLPEESLLRPAYVVPWQDPWEPFYVAGGKVPTFDERFRQYGFNRISQACELHVAGFDFEVLNEGFLVHKGFKEALKFHPQKEAENQHNKILYRQFKQELKAKYPNSPRRC

SEQ ID NO: 1381 - protein, 92 aa, Homo sapiens
IDVTFKSTNPYGWPQIVLSVYGPDVFGNDVVRGYGAVHVPFSPGRHKRTIPMFVPESTSKLQKFTSWFMGRRPEYTDPKVVAQGEGREAQPG

SEQ ID NO: 1382 - protein, 133 aa, Homo sapiens
LLMVNGQVESAQFPEYDDLYCKYCFVYGQDWAPTAGLEEGISQITSKSQDVRQALVWNFPIDVTFKSTNPYGWPQIVLSVYGPDVFGNDVVRGYGAVHVPFSPGRHKRTIPMFVPESTSKLQKFTRSASCSTH

SEQ ID NO: 1383 - protein, 135 aa, Homo sapiens
MATASPSVFLLMVNGQVESAQFPEYDDLYCKYCFVYGQDWAPTAGLEEGISQITSKSQDVRQALVWNFPIDVTFKSTNPYGWPQIVLSVYGPDVFGNDVVRGYGAVHVPFSPGRHKRTIPMFVPESTSKLQKFTR

SEQ ID NO: 1384 - protein, 153 aa, Homo sapiens
MATASPSVFLLMVNGQVESAQFPEYDDLYCKYCFVYGQDWAPTAGLEEGISQITSKSQDVRQALVWNFPIDVTFKSTNPYGWPQIVLSVYGPDVFGNDVVRGYGAVHVPFSPGRHKRTIPMFVPESTSKLQKFTSLCLVASSDLQAAPPTEDK

SEQ ID NO: 1385 - protein, 186 aa, Homo sapiens
MATASPSVFLLMVNGQVESAQFPEYDDLYCKYCFVYGQDWAPTAGLEEGISQITSKSQDVRQALVWNFPIDVTFKSTNPYGWPQIVLSVYGPDVFGNDVVRGYGAVHVPFSPGRHKRTIPMFVPESTSKLQKFTSWFMGRRPEYTDPKVVAQGEGREAITAPRKAVFSVHGLTSPRALALVHIKGT

SEQ ID NO: 1386 - protein, 161 aa, Homo sapiens
MATASPSVFLLMVNGQVESAQFPEYDDLYCKYCFVYGQDWAPTAGLEEGISQITSKSQDVRQALVWNFPIDVTFKSTNPYGWPQIVLSVYGPDVFGNDVVRGYGAVHVPFSPGRHKRTIPMFVPESTSKLQKFTSWFMGRRPEYTDPKVVAQGEGREAQPG

SEQ ID NO: 1387 - protein, 187 aa, Homo sapiens
MATASPSVFLLMVNGQVESAQFPEYDDLYCKYCFVYGQDWAPTAGLEEGISQITSKSQDVRQALVWNFPIDVTFKSTNPYGWPQIVLSVYGPDVFGNDVVRGYGAVHVPFSPGRHKRTIPMFVPESTSKLQKFTSWFMGRRPEYTDPKVVAQGEGREDENAEAEIPRSTWVSLCPSPAWLMLPFCPQ

SEQ ID NO: 1388 - protein, 183 aa, Homo sapiens
MATASPSVFLLMVNGQVESAQFPEYDDLYCKYCFVYGQDWAPTAGLEEGISQITSKSQDVRQALVWNFPIDVTFKSTNPYGWPQIVLSVYGPDVFGNDVVRGYGAVHVPFSPGRHKRTIPMFVPESTSKLQKFTSWFMGRRPEYTDPKVVAQGEGREGKAPSPLLPPSPIQVTAWEWVGPGLG

SEQ ID NO: 1389 - protein, 204 aa, Homo sapiens
MATASPSVFLLMVNGQVESAQFPEYDDLYCKYCFVYGQDWAPTAGLEEGISQITSKSQDVRQALVWNFPIDVTFKSTNPYGWPQIVLSVYGPDVFGNDVVRGYGAVHVPFSPGRHKRTIPMFVPESTSKLQKFTSWFMGRRPEYTDPKVVAQGEGREVTRVRSQGFVTLLFNVVTKDMRKLGYDTGPSDTQGVLGPSPPQSFPQ

SEQ ID NO: 1390 - protein, 125 aa, Homo sapiens
MATASPSVFLLMVNGQVESAQFPEYDDLYCKYCFVYGQDWAPTAGLEEGISQITSKSQDVRQALVWNFPIDVTFKSTNPYGYRAQRVWTRCVRERCGSRLWGRARALLTWPAQKDHPHVCPRIYV

SEQ ID NO: 1391 - protein, 19 aa, Homo sapiens
MMTSTASTALCTARTGPPQ

SEQ ID NO: 1392 - protein, 106 aa, Homo sapiens
MMTSTASTALCTARTGPPQRVWRRGSHRSHPRAKMCGKHWCGTSPLMSPLKAPTPTAGHRSCSACMDQMCSGTMWFEAMGPCTCPSHLAGTKGPSPCLSQNLRLNC

SEQ ID NO: 1393 - protein, 133 aa, Homo sapiens
MMTSTASTALCTARTGPPQRVWRRGSHRSHPRAKMCGKHWCGTSPLMSPLKAPTPTAGHRSCSACMDQMCSGTMWFEAMGPCTCPSHLAGTKGPSPCLSQNLRLNCRSLQAGSWGGGPSTQTPRWWLRVKAGK

SEQ ID NO: 1394 - protein, 147 aa, Homo sapiens
MMTSTASTALCTARTGPPQRVWRRGSHRSHPRAKMCGKHWCGTSPLMSPLKAPTPTAGHRSCSACMDQMCSGTMWFEAMGPCTCPSHLAGTKGPSPCLSQNLRLNCRSLQAGSWGGGPSTQTPRWWLRVKAGKPPSGLSVKDSSVSR

SEQ ID NO: 1395 - protein, 153 aa, Homo sapiens
MMTSTASTALCTARTGPPQRVWRRGSHRSHPRAKMCGKHWCGTSPLMSPLKAPTPTAGHRSCSACMDQMCSGTMWFEAMGPCTCPSHLAGTKGPSPCLSQNLRLNCRSLQAGSWGGGPSTQTPRWWLRVKAGKVKLPPLSYPHPPYRLQPGSG

SEQ ID NO: 1396 - protein, 213 aa, Homo sapiens
MMTSTASTALCTARTGPPQRVWRRGSHRSHPRAKMCGKHWCGTSPLMSPLKAPTPTAGHRSCSACMDQMCSGTMWFEAMGPCTCPSHLAGTKGPSPCLSQNLRLNCRSLQAGSWGGGPSTQTPRWWLRVKAGKVKLPPLSYPHPPYRLQPGSGWAQGWGECRGPARHIGASPQMFPDEGLVGAQRVCHVCLSRQPLYLPVRGLGQALLSPFYR

SEQ ID NO: 1397 - protein, 112 aa, Homo sapiens
SNRARPRWVPPAPPDLPWRPRVLASFYSWSTGRWRAPSFQSMMTSTASTALCTARTGPPQRVWRRGSHRSHPRAKMCGKHWCGTSPLMSPLKAPTPTAAVQLAFWKFRVHQG

SEQ ID NO: 1398 - protein, 396 aa, Homo sapiens
MGALARALLLPLLAQWLLRAAPELAPAPFTLPLRVAAATNRVVAPTPGPGTPAERHADGLALALEPALASPAGAANFLAMVDNLQGDSGRGYYLEMLIGTPPQKLQILVDTGSSNFAVAGTPHSYIDTYFDTERSSTYRSKGFDVTVKYTQGSWTGFVGEDLVTIPKGFNTSFLVNIATIFESENFFLPGIKWNGILGLAYATLAKPSSSLETFFDSLVTQANIPNVFSMQMCGAGLPVAGSGTNGGSLVLGGIEPSLYKGDIWYTPIKEEWYYQIEILKLEIGGQSLNLDCREYNADKAIVDSGTTLLRLPQKVFDAVVEAVARASLIPEFSDGFWTGSQLACWTNSETPWSYFPKISIYLRDENSSRSFRITILPQKLQVLQCLKFPGLSQQRM

SEQ ID NO: 1399 - protein, 518 aa, Homo sapiens
MGALARALLLPLLAQWLLRAAPELAPAPFTLPLRVAAATNRVVAPTPGPGTPAERHADGLALALEPALASPAGAANFLAMVDNLQGDSGRGYYLEMLIGTPPQKLQILVDTGSSNFAVAGTPHSYIDTYFDTERSSTYRSKGFDVTVKYTQGSWTGFVGEDLVTIPKGFNTSFLVNIATIFESENFFLPGIKWNGILGLAYATLAKPSSSLETFFDSLVTQANIPNVFSMQMCGAGLPVAGSGTNGGSLVLGGIEPSLYKGDIWYTPIKEEWYYQIEILKLEIGGQSLNLDCREYNADKAIVDSGTTLLRLPQKVFDAVVEAVARASLIPEFSDGFWTGSQLACWTNSETPWSYFPKISIYLRDENSSRSFRITILPQLYIQPMMGAGLNYECYRFGISPSTNALVIGATVMEGFYVIFDRAQKRVGFAASPCAEIAGAAVSEISGPFSTEDVASNCVPAQSLSEPILWIVSYALMSVCGAILLVLIVLLLLPFRCQRRPRDPEVVNDESSLVRHRWK

SEQ ID NO: 1400 - protein, 468 aa, Homo sapiens
MGALARALLLPLLAQWLLRAAPELAPAPFTLPLRVAAATNRVVAPTPGPGTPAERHADGLALALEPALASPAGAANFLAMVDNLQGDSGRGYYLEMLIGTPPQKLQILVDTGSSNFAVAGTPHSYIDTYFDTERSSTYRSKGFDVTVKYTQGSWTGFVGEDLVTIPKGFNTSFLVNIATIFESENFFLPGIKWNGILGLAYATLAKPSSSLETFFDSLVTQANIPNVFSMQMCGAGLPVAGSGTNGGSLVLGGIEPSLYKGDIWYTPIKEEWYYQIEILKLEIGGQSLNLDCREYNADKAIVDSGTTLLRLPQKVFDAVVEAVARASLLYIQPMMGAGLNYECYRFGISPSTNALVIGATVMEGFYVIFDRAQKRVGFAASPCAEIAGAAVSEISGPFSTEDVASNCVPAQSLSEPILWIVSYALMSVCGAILLVLIVLLLLPFRCQRRPRDPEVVNDESSLVRHRWK

SEQ ID NO: 1401 - protein, 43 aa, Homo sapiens
MAAGAVFLALSAQLLQARLMKEESPVVSWRLEPEDGTALCFIF

SEQ ID NO: 1402 - protein, 628 aa, Homo sapiens
MEPPDAPAQARGAPRLLLLAVLLAAHPDAQAEVRLSVPPLVEVMRGKSVILDCTPTGTHDHYMLEWFLTDRSGARPRLASAEMQGSELQVTMHDTRGRSPPYQLDSQGRLVLAEAQVGDERDYVCVVRAGAAGTAEATARLNVFAKPEATEVSPNKGTLSVMEDSAQEIATCNSRNGNPAPKITWYRNGQRLEVPVEMNPEGYMTSRTVREASGLLSLTSTLYLRLRKDDRDASFHCAAHYSLPEGRHGRLDSPTFHLTLHYPTEHVQFWVGSPSTPAGWVREGDTVQLLCRGDGSPSPEYTLFRLQDEQEEVLNVNLEGNLTLEGVTRGQSGTYGCRVEDYDAADDVQLSKTLELRVAYLDPLELSEGKVLSLPLNSSAVVNCSVHGLPTPALRWTKDSTPLGDGPMLSLSSITFDSNGTYVCEASLPTVPVLSRTQNFTLLVQGSPELKTAEIEPKADGSWREGDEVTLICSARGHPDPKLSWSQLGGSPAEPIPGRQGWVSSSLTLKVTSALSRDGISCEASNPHGNKRHVFHFGTVSPQTSQAGVAVMAVAVSVGLLLLVVAVFYCVRRKGGPCCRQRREKGAPPPGEPGLSHSGSEQPEQTGLLMGGASGGARGGSGGFGDEC

SEQ ID NO: 1403 - protein, 588 aa, Homo sapiens
MEPPDAPAQARGAPRLLLLAVLLAAHPDAQAEVRLSVPPLVEVMRGKSVILDCTPTGTHDHYMLEWFLTDRSGARPRLASAEMQGSELQVTMHDTRGRSPPYQLDSQGRLVLAEAQVGDERDYVCVVRAGAAGTAEATARLNVFAKPEATEVSPNKGTLSVMEDSAQEIATCNSRNGNPAPKITWYRNGQRLEVPVEMNPEGYMTSRTVREASGLLSLTSTLYLRLRKDDRDASFHCAAHYSLPEGRHGRLDSPTFHLTLHYPTEHVQFWVGSPSTPAGWVREGDTVQLLCRGDGSPSPEYTLFRLQDEQEEVLNVNLEGNLTLEGVTRGQSGTYGCRVEDYDAADDVQLSKTLELRVAYLDPLELSEGKVLSLPLNSSAVVNCSVHGLPTPALRWTKDSTPLGDGPMLSLSSITFDSNGTYVCEASLPTVPVLSRTQNFTLLVQGSPELKTAEIEPKADGSWREGDEVTLICSARGHPDPKLSWSQLGGSPAEPIPGRQGWVSSSLTLKVTSALSRDGISCEASNPHGNKRHVFHFGTVSPQTSQAGVAVMAVAVSVGLLLLVVAVFYCVRRKGGPCCRQRREKGAP

SEQ ID NO: 1404 - protein, 286 aa, Homo sapiens
MEPPDAPAQARGAPRLLLLAVLLAAHPDAQAEVRLSVPPLVEVMRGKSVILDCTPTGTHDHYMLEWFLVTMHDTRGRSPPYQLDSQGRLVLAEAQVGDERDYVCVVRAGAAGTAEATARLNVFAKPEATEVSPNKGTLSVMEDSAQEIATCNSRNGNPAPKITWYRNGQRLEVPVEMNPEGYMTSRTVREASGLLSLTSTLYLRLRKDDRDASFHCAAHYSLPEGRHGRLDSPTFHLTLHYPTEHVQFWVGSPSTPAGWVREGDTVQLLCRGDGSPSPEYTLFRLQ

SEQ ID NO: 1405 - protein, 61 aa, Homo sapiens
  SITE 1: note = misc_feature - Xaa can be any naturally occurring amino acid
XGYMTSRTVREASGLLSLTSTLYLRLRKDDRDASFHCAAHYSLPEGRHGRLDSPTFHLTLH

SEQ ID NO: 1406 - protein, 145 aa, Homo sapiens
MAQLFLPLLAALVLAQAPAALADVLEGDSSEDRAFRVRIAGDAPLQGVLGGALTIPCHVHYLRPPPSRRAVLGSPRVKWTFLSRGREAEVLVARGVRVKVNEAYRFRVALPAYPASLTDVSLALSELRPNDSGIYRCEVQHGIDD

SEQ ID NO: 1407 - protein, 196 aa, Homo sapiens
MAQLFLPLLAALVLAQAPAALADVLEGDSSEDRAFRVRIAGDAPLQGVLGGALTIPCHVHYLRPPPSRRAVLGSPRVKWTFLSRGREAEVLVARGVRVKVNEAYRFRVALPAYPASLTDVSLALSELRPNDSGIYRCEVQHGIDDSSDAVEVKVKGIPSRPHERPVTETWMASPGSGTMVWWTRMTSMMCTVMLKT

SEQ ID NO: 1408 - protein, 213 aa, Homo sapiens
MAQLFLPLLAALVLAQAPAALADVLEGDSSEDRAFRVRIAGDAPLQGVLGGALTIPCHVHYLRPPPSRRAVLGSPRVKWTFLSRGREAEVLVARGVRVKVNEAYRFRVALPAYPASLTDVSLALSELRPNDSGIYRCEVQHGIDDSSDAVEVKVKGVVFLYREGSARYAFSFSGAQEACARIGAHIATPEQLYAAYLGGYEQCDAGWLSDQTV

SEQ ID NO: 1409 - protein, 911 aa, Homo sapiens
MAQLFLPLLAALVLAQAPAALADVLEGDSSEDRAFRVRIAGDAPLQGVLGGALTIPCHVHYLRPPPSRRAVLGSPRVKWTFLSRGREAEVLVARGVRVKVNEAYRFRVALPAYPASLTDVSLALSELRPNDSGIYRCEVQHGIDDSSDAVEVKVKGVVFLYREGSARYAFSFSGAQEACARIGAHIATPEQLYAAYLGGYEQCDAGWLSDQTVRYPIQTPREACYGDMDGFPGVRNYGVVDPDDLYDVYCYAEDLNGELFLGDPPEKLTLEEARAYCQERGAEIATTGQLYAAWDGGLDHCSPGWLADGSVRYPIVTPSQRCGGGLPGVKTLFLFPNQTGFPNKHSRFNVYCFRDSAQPSAIPEASNPASNPASDGLEAIVTVTETLEELQLPQEATESESRGAIYSIPIMEDGGGGSSTPEDPAEAPRTLLEFETQSMVPPTGFSEEEGKALEEEEKYEDEEEKEEEEEEEEVEDEALWAWPSELSSPGPEASLPTEPAAQEESLSQAPARAVLQPGASPLPDGESEASRPPRVHGPPTETLPTPRERNLASPSPSTLVEAREVGEATGGPELSGVPRGESEETGSSEGAPSLLPATRAPEGTRELEAPSEDNSGRTAPAGTSVQAQPVLPTDSASRGGVAVVPASGDCVPSPCHNGGTCLEEEEGVRCLCLPGYGGDLCDVGLRFCNPGWDAFQGACYKHFSTRRSWEEAETQCRMYGAHLASISTPEEQDFINNRYREYQWIGLNDRTIEGDFLWSDGVPLLYENWNPGQPDSYFLSGENCVVMVWHDQGQWSDVPCNYHLSYTCKMGLVSCGPPPELPLAQVFGRPRLRYEVDTVLRYRCREGLAQRNLPLIRCQENGRWEAPQISCVPRRPARALHPEEDPEGRQGRLLGRWKALLIPPSSPMPGP

SEQ ID NO: 1410 - protein, 671 aa, Homo sapiens
MAQLFLPLLAALVLAQAPAALADVLEGDSSEDRAFRVRIAGDAPLQGVLGGALTIPCHVHYLRPPPSRRAVLGSPRVKWTFLSRGREAEVLVARGVRVKVNEAYRFRVALPAYPASLTDVSLALSELRPNDSGIYRCEVQHGIDDSSDAVEVKVKGVVFLYREGSARYAFSFSGAQEACARIGAHIATPEQLYAAYLGGYEQCDAGWLSDQTVRYPIQTPREACYGDMDGFPGVRNYGVVDPDDLYDVYCYAEDLNGELFLGDPPEKLTLEEARAYCQERGAEIATTGQLYAAWDGGLDHCSPGWLADGSVRYPIVTPSQRCGGGLPGVKTLFLFPNQTGFPNKHSRFNVYCFRDSAQPSAIPEASNPASNPASDGLEAIVTVTETLEELQLPQEATESESRGAIYSIPIMEDGGGGSSTPEDPAEAPRTLLEFETQSMVPPTGFSEEEGKALEEEEKYEDEEEKEEEEEEEEVEDEALWAWPSELSSPGPEASLPTEPAAQEESLSQAPARAVLQPGASPLPDGESEASRPPRVHGPPTETLPTPRERNLASPSPSTLVEAREVGEATGGPELSGVPRGESEETGSSEGAPSLLPATRAPEGTRELEAPSEDNSGRTAPAGTSVQAQPVLPTDSASRGGVAVVPASGNSAQGSTALSILLLFFPLQLWVT

SEQ ID NO: 1411 - protein, 231 aa, Homo sapiens
MAQLFLPLLAALVLAQAPAALADVLEGDSSGIYRCEVQHGIDDSSDAVEVKVKGVVFLYREGSARYAFSFSGAQEACARIGAHIATPEQLYAAYLGGYEQCDAGWLSDQTVRYPIQTPREACYGDMDGFPGVRNYGVVDPDDLYDVYCYAEDLNGELFLGDPPEKLTLEEARAYCQERGAEIATTGQLYAAWDGGLDHCSPGWLADGSVRYPIVTPSQRCGGGLPGVKTLF

SEQ ID NO: 1412 - protein, 26 aa, Homo sapiens
  SITE 1: note = misc_feature - Xaa can be any naturally occurring amino acid
XHGIDDSSDAVEVKVKGGGHSTHNLT

SEQ ID NO: 1413 - protein, 294 aa, Homo sapiens
IATFWNKAFLTIIILLIVLFLDAVREVRKYSSVHTIEKSSTSRPDAYEHTQMKLFRSQRNLYISGFSLFFWLVLRRLVTLITQLAKELSNKGVLKTQAENTNKAAKKFMEENEKLKRILKSHGKDEECVLEAENKKLVEDQEKLKTELRKTSDALSKAQNDVMEMKMQSERLSKEYDQLLKEHSELQKQREILPHRRGESTVTTEAEIGVMEPQQRNADSHQKLEEAKNRFFPRASSSRSMALQIPIKLILDFLASRTMGINLLFQAIKFVIICYCCHSKLIQEHAGQICNGLN

SEQ ID NO: 1414 - protein, 147 aa, Homo sapiens
MKLFRSQRNLYISGFSLFFWLVLRRLVTLITQLAKELSNKGVLKTQAENTNKAAKKFMEENEKLKRILKSHGKDEECVLEAENKKLVEDQEKLKTELRKTSDALSKAQNDVMEMKMQSERLSKEYDQLLKEHSELQDRLERGNKKRL

SEQ ID NO: 1415 - protein, 64 aa, Homo sapiens
MTLQWAAVATFLYAEIGLILIFCLPFIPPQRWQKIFSFNVWGKIATFWNKAFLTIIILLIVLFL

SEQ ID NO: 1416 - protein, 133 aa, Homo sapiens
MTLQWAAVATFLYAEIGLILIFCLPFIPPQRWQKIFSFNVWGKIATFWNKAFLTIIILLIVLFLDAVREVRKYSSVHTIEKSSTSRPDAYEHTQMKLFRSQRNLYISGFSLFFWLVLRRLVTLITQLAKELSN

SEQ ID NO: 1417 - protein, 171 aa, Homo sapiens
MTLQWAAVATFLYAEIGLILIFCLPFIPPQRWQKIFSFNVWGKIATFWNKAFLTIIILLIVLFLDAVREVRKYSSVHTIEKSSTSRPDAYEHTQMKLFRSQRNLYISGFSLFFWLVLRRLVTLITQLAKELSNKGVLKTQAENTNKAAKKFMEENEKLKRFLLAKVHCRKL

SEQ ID NO: 1418 - protein, 196 aa, Homo sapiens
MTLQWAAVATFLYAEIGLILIFCLPFIPPQRWQKIFSFNVWGKIATFWNKAFLTIIILLIVLFLDAVREVRKYSSVHTIEKSSTSRPDAYEHTQMKLFRSQRNLYISGFSLFFWLVLRRLVTLITQLAKELSNKGVLKTQAENTNKAAKKFMEENEKLKRILKSHGKDEECVLEAENKKLVEDQEKLKTELRKTSD

SEQ ID NO: 1419 - protein, 230 aa, Homo sapiens
MTLQWAAVATFLYAEIGLILIFCLPFIPPQRWQKIFSFNVWGKIATFWNKAFLTIIILLIVLFLDAVREVRKYSSVHTIEKSSTSRPDAYEHTQMKLFRSQRNLYISGFSLFFWLVLRRLVTLITQLAKELSNKGVLKTQAENTNKAAKKFMEENEKLKRILKSHGKDEECVLEAENKKLVEDQEKLKTELRKTSDALSKAQNDVMEMKMQSERLSKEYDQLLKEHSELQ

SEQ ID NO: 1420 - protein, 241 aa, Homo sapiens
MTLQWAAVATFLYAEIGLILIFCLPFIPPQRWQKIFSFNVWGKIATFWNKAFLTIIILLIVLFLDAVREVRKYSSVHTIEKSSTSRPDAYEHTQMKLFRSQRNLYISGFSLFFWLVLRRLVTLITQLAKELSNKGVLKTQAENTNKAAKKFMEENEKLKRILKSHGKDEECVLEAENKKLVEDQEKLKTELRKTSDALSKAQNDVMEMKMQSERLSKEYDQLLKEHSELQDRLERGNKKRL

SEQ ID NO: 1421 - protein, 241 aa, Homo sapiens; identical to SEQ ID NO: 1420

SEQ ID NO: 1422 - protein, 348 aa, Homo sapiens
MTLQWAAVATFLYAEIGLILIFCLPFIPPQRWQKIFSFNVWGKIATFWNKAFLTIIILLIVLFLDAVREVRKYSSVHTIEKSSTSRPDAYEHTQMKLFRSQRNLYISGFSLFFWLVLRRLVTLITQLAKELSNKGVLKTQAENTNKAAKKFMEENEKLKRILKSHGKDEECVLEAENKKLVEDQEKLKTELRKTSDALSKAQNDVMEMKMQSERLSKEYDQLLKEHSELQHSSFGEFLSKRSHKNGSIGKQTGSRKGSFRKRQQEKTVNFIKDTCNILCQNDNFVMLASRKFKFRKMHYDRFVIFLMPHIGCIVMALSKYLMMFQIYCKVCIPALKKNISMLNTIFTY

SEQ ID NO: 1423 - protein, 348 aa, Homo sapiens; identical to SEQ ID NO: 1422

SEQ ID NO: 1424 - protein, 66 aa, Homo sapiens
MTLQWAAVATFLYAEIGLILIFCLPFIPPQRWQKIFSFNVWGKIATFWNKAFLTIIILLIVLFLEF

SEQ ID NO: 1425 - protein, 163 aa, Homo sapiens
  SITE 1: note = misc_feature - Xaa can be any naturally occurring amino acid
XDAYEHTQMKLFRSQRNLYISGFSLFFWLVLRRLVTLITQLAKELSNKGVLKTQAENTNKAAKKFMEENEKLKRILKSHGKDEECVLEAENKKLVEDQEKLKTELRKTSDALSKAQNDVMEMKMQSERLSKEYDQLLKEHSELQKSHSQPGAAAFLVKEVESF

SEQ ID NO: 1426 - protein, 868 aa, Homo sapiens
MENVLAKALYDNVAESPDELSFRKGDIMTVLEQDTQGLDGWWLCSLHGRQGIVPGNRLKILVGMYDKKPAGPGPGPPATPAQPQPGLHAPAPPASQYTPMLPNTYQPQPDSVYLVPTPSKAQQGLYQVPGPSPQFQSPPAKQTSTFSKQTPHHPFPSPATDLYQVPPGPGGPAQDIYQVPPSAGMGHDIYQVPPSMDTRSWEGTKPPAKVVVPTRVGQGYVYEAAQPEQDEYDIPRHLLAPGPQDIYDVPPVRGLLPSQYGQEVYDTPPMAVKGPNGRDPLLEVYDVPPSVEKGLPPSNHHAVYDVPPSVSKDVPDGPLLREETYDVPPAFAKAKPFDPARTPLVLAAPPPDSPPAEDVYDVPPPAPDLYDVPPGLRRPGPGTLYDVPRERVLPPEVADGGVVDSGVYAVPPPAEREAPAEGKRLSASSTGSTRSSQSASSLEVAGPGREPLELEVAVEALARLQQGVSATVAHLLDLAGSAGATGSWRSPSEPQEPLVQDLQAAVAAVQSAVHELLEFARSAVGNAAHTSDRALHAKLSRQLQKMEDVHQTLVAHGQALDAGRGGSGATLEDLDRLVACSRAVPEDAKQLASFLHGNASLLFRRTKATAPGPEGGGTLHPNPTDKTSSIQSRPLPSPPKFTSQDSPDGQYENSEGGWMEDYDYVHLQGKEEFEKTQKELLEKGSITRQGKSQLELQQLKQFERLEQEVSRPIDHDLANWTPAQPLAPGRTGGLGPSDRQLLLFYLEQCEANLTTLTNAVDAFFTAVATNQPPKIFVAHSKFVILSAHKLVFIGDTLSRQAKAADVRSQVTHYSNLLCDLLRGIVATTKAAALQYPSPSAAQDMVERVKELGHSTQQFRRVLGQLAAA

SEQ ID NO: 1427 - protein, 888 aa, Homo sapiens
MHCPGEAPLAAPRPTPKDPCLRNVLAKALYDNVAESPDELSFRKGDIMTVLEQDTQGLDGWWLCSLHGRQGIVPGNRLKILVGMYDKKPAGPGPGPPATPAQPQPGLHAPAPPASQYTPMLPNTYQPQPDSVYLVPTPSKAQQGLYQVPGPSPQFQSPPAKQTSTFSKQTPHHPFPSPATDLYQVPPGPGGPAQDIYQVPPSAGMGHDIYQVPPSMDTRSWEGTKPPAKVVVPTRVGQGYVYEAAQPEQDEYDIPRHLLAPGPQDIYDVPPVRGLLPSQYGQEVYDTPPMAVKGPNGRDPLLEVYDVPPSVEKGLPPSNHHAVYDVPPSVSKDVPDGPLLREETYDVPPAFAKAKPFDPARTPLVLAAPPPDSPPAEDVYDVPPPAPDLYDVPPGLRRPGPGTLYDVPRERVLPPEVADGGVVDSGVYAVPPPAEREAPAEGKRLSASSTGSTRSSQSASSLEVAGPGREPLELEVAVEALARLQQGVSATVAHLLDLAGSAGATGSWRSPSEPQEPLVQDLQAAVAAVQSAVHELLEFARSAVGNAAHTSDRALHAKLSRQLQKMEDVHQTLVAHGQALDAGRGGSGATLEDLDRLVACSRAVPEDAKQLASFLHGNASLLFRRTKATAPGPEGGGTLHPNPTDKTSSIQSRPLPSPPKFTSQDSPDGQYENSEGGWMEDYDYVHLQGKEEFEKTQKELLEKGSITRQGKSQLELQQLKQFERLEQEVSRPIDHDLANWTPAQPLAPGRTGGLGPSDRQLLLFYLEQCEANLTTLTNAVDAFFTAVATNQPPKIFVAHSKFVILSAHKLVFIGDTLSRQAKAADVRSQVTHYSNLLCDLLRGIVATTKAAALQYPSPSAAQDMVERVKELGHSTQQFRRVLGQLAAA

SEQ ID NO: 1428 - protein, 888 aa, Homo sapiens
MLTHRPQEAEQRGRTPGPSFEWNVLAKALYDNVAESPDELSFRKGDIMTVLEQDTQGLDGWWLCSLHGRQGIVPGNRLKILVGMYDKKPAGPGPGPPATPAQPQPGLHAPAPPASQYTPMLPNTYQPQPDSVYLVPTPSKAQQGLYQVPGPSPQFQSPPAKQTSTFSKQTPHHPFPSPATDLYQVPPGPGGPAQDIYQVPPSAGMGHDIYQVPPSMDTRSWEGTKPPAKVVVPTRVGQGYVYEAAQPEQDEYDIPRHLLAPGPQDIYDVPPVRGLLPSQYGQEVYDTPPMAVKGPNGRDPLLEVYDVPPSVEKGLPPSNHHAVYDVPPSVSKDVPDGPLLREETYDVPPAFAKAKPFDPARTPLVLAAPPPDSPPAEDVYDVPPPAPDLYDVPPGLRRPGPGTLYDVPRERVLPPEVADGGVVDSGVYAVPPPAEREAPAEGKRLSASSTGSTRSSQSASSLEVAGPGREPLELEVAVEALARLQQGVSATVAHLLDLAGSAGATGSWRSPSEPQEPLVQDLQAAVAAVQSAVHELLEFARSAVGNAAHTSDRALHAKLSRQLQKMEDVHQTLVAHGQALDAGRGGSGATLEDLDRLVACSRAVPEDAKQLASFLHGNASLLFRRTKATAPGPEGGGTLHPNPTDKTSSIQSRPLPSPPKFTSQDSPDGQYENSEGGWMEDYDYVHLQGKEEFEKTQKELLEKGSITRQGKSQLELQQLKQFERLEQEVSRPIDHDLANWTPAQPLAPGRTGGLGPSDRQLLLFYLEQCEANLTTLTNAVDAFFTAVATNQPPKIFVAHSKFVILSAHKLVFIGDTLSRQAKAADVRSQVTHYSNLLCDLLRGIVATTKAAALQYPSPSAAQDMVERVKELGHSTQQFRRVLGQLAAA

SEQ ID NO: 1429 - protein, 870 aa, Homo sapiens
MNHLNVLAKALYDNVAESPDELSFRKGDIMTVLEQDTQGLDGWWLCSLHGRQGIVPGNRLKILVGMYDKKPAGPGPGPPATPAQPQPGLHAPAPPASQYTPMLPNTYQPQPDSVYLVPTPSKAQQGLYQVPGPSPQFQSPPAKQTSTFSKQTPHHPFPSPATDLYQVPPGPGGPAQDIYQVPPSAGMGHDIYQVPPSMDTRSWEGTKPPAKVVVPTRVGQGYVYEAAQPEQDEYDIPRHLLAPGPQDIYDVPPVRGLLPSQYGQEVYDTPPMAVKGPNGRDPLLEVYDVPPSVEKGLPPSNHHAVYDVPPSVSKDVPDGPLLREETYDVPPAFAKAKPFDPARTPLVLAAPPPDSPPAEDVYDVPPPAPDLYDVPPGLRRPGPGTLYDVPRERVLPPEVADGGVVDSGVYAVPPPAEREAPAEGKRLSASSTGSTRSSQSASSLEVAGPGREPLELEVAVEALARLQQGVSATVAHLLDLAGSAGATGSWRSPSEPQEPLVQDLQAAVAAVQSAVHELLEFARSAVGNAAHTSDRALHAKLSRQLQKMEDVHQTLVAHGQALDAGRGGSGATLEDLDRLVACSRAVPEDAKQLASFLHGNASLLFRRTKATAPGPEGGGTLHPNPTDKTSSIQSRPLPSPPKFTSQDSPDGQYENSEGGWMEDYDYVHLQGKEEFEKTQKELLEKGSITRQGKSQLELQQLKQFERLEQEVSRPIDHDLANWTPAQPLAPGRTGGLGPSDRQLLLFYLEQCEANLTTLTNAVDAFFTAVATNQPPKIFVAHSKFVILSAHKLVFIGDTLSRQAKAADVRSQVTHYSNLLCDLLRGIVATTKAAALQYPSPSAAQDMVERVKELGHSTQQFRRVLGQLAAA

SEQ ID NO: 1430 - protein, 888 aa, Homo sapiens
MNHLNVLAKALYDNVAESPDELSFRKGDIMTVLEQDTQGLDGWWLCSLHGRQGIVPGNRLKILVGMYDKKPAGPGPGPPATPAQPQPGLHAPAPPASQYTPMLPNTYQPQPDSVYLVPTPSKAQQGLYQVPGPSPQFQSPPAKQTSTFSKQTPHHPFPSPATDLYQVPPGPGGPAQDIYQVPPSAGMGHDIYQVPPSMDTRSWEGTKPPAKVVVPTRVGQGYVYEAAQPEQDEYDIPRHLLAPGPQDIYDVPPVRGLLPSQYGQEVYDTPPMAVKGPNGRDPLLEVYDVPPSVEKGLPPSNHHAVSKCQGNARARLRLWGVWVYDVPPSVSKDVPDGPLLREETYDVPPAFAKAKPFDPARTPLVLAAPPPDSPPAEDVYDVPPPAPDLYDVPPGLRRPGPGTLYDVPRERVLPPEVADGGVVDSGVYAVPPPAEREAPAEGKRLSASSTGSTRSSQSASSLEVAGPGREPLELEVAVEALARLQQGVSATVAHLLDLAGSAGATGSWRSPSEPQEPLVQDLQAAVAAVQSAVHELLEFARSAVGNAAHTSDRALHAKLSRQLQKMEDVHQTLVAHGQALDAGRGGSGATLEDLDRLVACSRAVPEDAKQLASFLHGNASLLFRRTKATAPGPEGGGTLHPNPTDKTSSIQSRPLPSPPKFTSQDSPDGQYENSEGGWMEDYDYVHLQGKEEFEKTQKELLEKGSITRQGKSQLELQQLKQFERLEQEVSRPIDHDLANWTPAQPLAPGRTGGLGPSDRQLLLFYLEQCEANLTTLTNAVDAFFTAVATNQPPKIFVAHSKFVILSAHKLVFIGDTLSRQAKAADVRSQVTHYSNLLCDLLRGIVATTKAAALQYPSPSAAQDMVERVKELGHSTQQFRRVLGQLAAA

SEQ ID NO: 1431 - protein, 916 aa, Homo sapiens
MPAKPFLSSVLLSWKVLDFSGPGPQGTGQPCSCGHWAEGQGGPPEPAGGPNVLAKALYDNVAESPDELSFRKGDIMTVLEQDTQGLDGWWLCSLHGRQGIVPGNRLKILVGMYDKKPAGPGPGPPATPAQPQPGLHAPAPPASQYTPMLPNTYQPQPDSVYLVPTPSKAQQGLYQVPGPSPQFQSPPAKQTSTFSKQTPHHPFPSPATDLYQVPPGPGGPAQDIYQVPPSAGMGHDIYQVPPSMDTRSWEGTKPPAKVVVPTRVGQGYVYEAAQPEQDEYDIPRHLLAPGPQDIYDVPPVRGLLPSQYGQEVYDTPPMAVKGPNGRDPLLEVYDVPPSVEKGLPPSNHHAVYDVPPSVSKDVPDGPLLREETYDVPPAFAKAKPFDPARTPLVLAAPPPDSPPAEDVYDVPPPAPDLYDVPPGLRRPGPGTLYDVPRERVLPPEVADGGVVDSGVYAVPPPAEREAPAEGKRLSASSTGSTRSSQSASSLEVAGPGREPLELEVAVEALARLQQGVSATVAHLLDLAGSAGATGSWRSPSEPQEPLVQDLQAAVAAVQSAVHELLEFARSAVGNAAHTSDRALHAKLSRQLQKMEDVHQTLVAHGQALDAGRGGSGATLEDLDRLVACSRAVPEDAKQLASFLHGNASLLFRRTKATAPGPEGGGTLHPNPTDKTSSIQSRPLPSPPKFTSQDSPDGQYENSEGGWMEDYDYVHLQGKEEFEKTQKELLEKGSITRQGKSQLELQQLKQFERLEQEVSRPIDHDLANWTPAQPLAPGRTGGLGPSDRQLLLFYLEQCEANLTTLTNAVDAFFTAVATNQPPKIFVAHSKFVILSAHKLVFIGDTLSRQAKAADVRSQVTHYSNLLCDLLRGIVATTKAAALQYPSPSAAQDMVERVKELGHSTQQFRRVLGQLAAA

SEQ ID NO: 1432 - protein, 57 aa, Homo sapiens
MPAKPFLSSVLLSWKVLDFSGPGPQGTGQPCSCGHWAEGQGGPPEPAGGPVSQGSSD

SEQ ID NO: 1433 - protein, 57 aa, Homo sapiens; identical to SEQ ID NO: 1432

SEQ ID NO: 1434 - protein, 722 aa, Homo sapiens
MQGKNVLAKALYDNVAESPDELSFRKGDIMTVLEQDTQGLDGWWLCSLHGRQGIVPGNRLKILVVVPTRVGQGYVYEAAQPEQDEYDIPRHLLAPGPQDIYDVPPVRGLLPSQYGQEVYDTPPMAVKGPNGRDPLLEVYDVPPSVEKGLPPSNHHAVYDVPPSVSKDVPDGPLLREETYDVPPAFAKAKPFDPARTPLVLAAPPPDSPPAEDVYDVPPPAPDLYDVPPGLRRPGPGTLYDVPRERVLPPEVADGGVVDSGVYAVPPPAEREAPAEGKRLSASSTGSTRSSQSASSLEVAGPGREPLELEVAVEALARLQQGVSATVAHLLDLAGSAGATGSWRSPSEPQEPLVQDLQAAVAAVQSAVHELLEFARSAVGNAAHTSDRALHAKLSRQLQKMEDVHQTLVAHGQALDAGRGGSGATLEDLDRLVACSRAVPEDAKQLASFLHGNASLLFRRTKATAPGPEGGGTLHPNPTDKTSSIQSRPLPSPPKFTSQDSPDGQYENSEGGWMEDYDYVHLQGKEEFEKTQKELLEKGSITRQGKSQLELQQLKQFERLEQEVSRPIDHDLANWTPAQPLAPGRTGGLGPSDRQLLLFYLEQCEANLTTLTNAVDAFFTAVATNQPPKIFVAHSKFVILSAHKLVFIGDTLSRQAKAADVRSQVTHYSNLLCDLLRGIVATTKAAALQYPSPSAAQDMVERVKELGHSTQQFRRVLGQLAAA

SEQ ID NO: 1435 - protein, 870 aa, Homo sapiens
MSVPNVLAKALYDNVAESPDELSFRKGDIMTVLEQDTQGLDGWWLCSLHGRQGIVPGNRLKILVGMYDKKPAGPGPGPPATPAQPQPGLHAPAPPASQYTPMLPNTYQPQPDSVYLVPTPSKAQQGLYQVPGPSPQFQSPPAKQTSTFSKQTPHHPFPSPATDLYQVPPGPGGPAQDIYQVPPSAGMGHDIYQVPPSMDTRSWEGTKPPAKVVVPTRVGQGYVYEAAQPEQDEYDIPRHLLAPGPQDIYDVPPVRGLLPSQYGQEVYDTPPMAVKGPNGRDPLLEVYDVPPSVEKGLPPSNHHAVYDVPPSVSKDVPDGPLLREETYDVPPAFAKAKPFDPARTPLVLAAPPPDSPPAEDVYDVPPPAPDLYDVPPGLRRPGPGTLYDVPRERVLPPEVADGGVVDSGVYAVPPPAEREAPAEGKRLSASSTGSTRSSQSASSLEVAGPGREPLELEVAVEALARLQQGVSATVAHLLDLAGSAGATGSWRSPSEPQEPLVQDLQAAVAAVQSAVHELLEFARSAVGNAAHTSDRALHAKLSRQLQKMEDVHQTLVAHGQALDAGRGGSGATLEDLDRLVACSRAVPEDAKQLASFLHGNASLLFRRTKATAPGPEGGGTLHPNPTDKTSSIQSRPLPSPPKFTSQDSPDGQYENSEGGWMEDYDYVHLQGKEEFEKTQKELLEKGSITRQGKSQLELQQLKQFERLEQEVSRPIDHDLANWTPAQPLAPGRTGGLGPSDRQLLLFYLEQCEANLTTLTNAVDAFFTAVATNQPPKIFVAHSKFVILSAHKLVFIGDTLSRQAKAADVRSQVTHYSNLLCDLLRGIVATTKAAALQYPSPSAAQDMVERVKELGHSTQQFRRVLGQLAAA

SEQ ID NO: 1436 - protein, 50 aa, Homo sapiens
MTVLEQDTQGLDGWWLCSLHGRQGIVPGNRLKILVGMYDKKPAGPGPGPP

SEQ ID NO: 1437 - protein, 59 aa, Homo sapiens
MTVLEQDTQGLDGWWLCSLHGRQGIVPGNRLKILVGMYDKKPAGPGPGPPATPAQPQPG

SEQ ID NO: 1438 - protein, 80 aa, Homo sapiens
MTVLEQDTQGLDGWWLCSLHGRQGIVPGNRLKILVGMYDKKPAGPGPGPPATPAQPQPGLHAPAPPASQYTPMLPNTYQP

SEQ ID NO: 1439 - protein, 120 aa, Homo sapiens
MTVLEQDTQGLDGWWLCSLHGRQGIVPGNRLKILVGMYDKKPAGPGPGPPATPAQPQPGLHAPAPPASQYTPMLPNTYQPQPDSVYLVPTPSKAQQGLYQVPGPSPQFQSPPAKQTSTFS

SEQ ID NO: 1440 - protein, 128 aa, Homo sapiens
MTVLEQDTQGLDGWWLCSLHGRQGIVPGNRLKILVGMYDKKPAGPGPGPPATPAQPQPGLHAPAPPASQYTPMLPNTYQPQPDSVYLVPTPSKAQQGLYQVPGPSPQFQSPPAKQTSTFSKQTPHHPF

SEQ ID NO: 1441 - protein, 133 aa, Homo sapiens
MTVLEQDTQGLDGWWLCSLHGRQGIVPGNRLKILVGMYDKKPAGPGPGPPATPAQPQPGLHAPAPPASQYTPMLPNTYQPQPDSVYLVPTPSKAQQGLYQVPGPSPQFQSPPAKQTSTFSKQTPHHPFPSPAT

SEQ ID NO: 1442 - protein, 135 aa, Homo sapiens
MTVLEQDTQGLDGWWLCSLHGRQGIVPGNRLKILVGMYDKKPAGPGPGPPATPAQPQPGLHAPAPPASQYTPMLPNTYQPQPDSVYLVPTPSKAQQGLYQVPGPSPQFQSPPAKQTSTFSKQTPHHPFPSPATDL

SEQ ID NO: 1443 - protein, 238 aa, Homo sapiens
  SITE 1: note = misc_feature - Xaa can be any naturally occurring amino acid
XPQFQSPPAKQTSTFSKQTPHHPFPSPATDLYQVPPGPGGPAQDIYQVPPSAGMGHDIYQVPPSMDTRSWEGTKPPAKVVVPTRVGQGYVYEAAQPEQDEYDIPRHLLAPGPQDIYDVPPVRGLLPSQYGQEVYDVPPSVSKDVPDGPLLREETYDVPPAFAKAKPFDPARTPLVLAAPPPDSPPAEDVYDVPPPAPDLYDVPPGLRRPGPGTLYDVPRERVLPPEVADGGVVDSGVY

SEQ ID NO: 1444 - protein, 120 aa, Homo sapiens
AVQFTGWSSSCILHFPEVLHDFHSLQTLPSLLQRIGNPNETQNNSTSWPVFKSTEQKYLTLNTESTRIMTKLRAQQCRFWTSFFPKVLEMTEPICCYCEPGTALAARAAQMKMTGSAYSQ

SEQ ID NO: 1445 - protein, 132 aa, Homo sapiens
AVQFTGWSSSCILHFPEVLHDFHSLQTLPSLLQRIGNPNETQNNSTSWPVFKSTEQKYLTLNTESTRIMTKLRAQQCRFWTSFFPKVLEMTGNIDEAEWEWKAGFHRWNNYMMDWKNQFNDYTSKKESCVGL

SEQ ID NO: 1446 - protein, 602 aa, Homo sapiens
MHSKVTIICIRFLFWFLLLCMLIGKSHTEDDIIIATKNGKVRGMNLTVFGGTVTAFLGIPYAQPPLGRLRFKKPQSLTKWSDIWNATKYANSCCQNIDQSFPGFHGSEMWNPNTDLSEDCLYLNVWIPAPKPKNATVLIWIYGGGFQTGTSSLHVYDGKFLARVERVIVVSMNYRVGALGFLALPGNPEAPGNMGLFDQQLALQWVQKNIAAFGGNPKSVTLFGESAGAASVSLHLLSPGSHSLFTRAILQSGSFNAPWAVTSLYEARNRTLNLAKLTGCSRENETEIIKCLRNKDPQEILLNEAFVVPYGTPLSVNFGPTVDGDFLTDMPDILLELGQFKKTQILVGVNKDEGTAFLVYGAPGFSKDNNSIITRKEFQEGLKIFFPGVSEFGKESILFHYTDWVDDQRPENYREALGDVVGDYNFICPALEFTKKFSEWGNNAFFYYFEHRSSKLPWPEWMGVMHGYEIEFVFGLPLERRDNYTKAEEILSRSIVKRWANFAKYGNPNETQNNSTSWPVFKSTEQKYLTLNTESTRIMTKLRAQQCRFWTSFFPKVLEMTGNIDEAEWEWKAGFHRWNNYMMDWKNQFNDYTSKKESCVGL

SEQ ID NO: 1447 - protein, 525 aa, Homo sapiens
MHSKVTIICIRFLFWFLLLCMLIGKSHTEDDIIIATKNGKVRGMNLTVFGGTVTAFLGIPYAQPPLGRLRFKKPQSLTKWSDIWNATKYANSCCQNIDQSFPGFHGSEMWNPNTDLSEDCLYLNVWIPAPKPKNATVLIWIYGGGFQTGTSSLHVYDGKFLARVERVIVVSMNYRVGALGFLALPGNPEAPGNMGLFDQQLALQWVQKNIAAFGGNPKSVTLFGESAGAASVSLHLLSPGSHSLFTRAILQSGSFNAPWAVTSLYEARNRTLNLAKLTGCSRENETEIIKCLRNKDPQEILLNEAFVVPYGTPLSVNFGPTVDGDFLTDMPDILLELGQFKKTQILVGVNKDEGTAFLVYGAPGFSKDNNSIITRKEFQEGLKIFFPGVSEFGKESILFHYTDWVDDQRPENYREALGDVVGDYNFICPALEFTKKFSEWGNNAFFYYFEHRSSKLPWPEWMGVMHGYEIEFVFGLPLERRDNYTKAEEILSRSIVKRWANFAKYGCSSSTILNYVLETEPVVLI

SEQ ID NO: 1448 - protein, 562 aa, Homo sapiens
MHSKVTIICIRFLFWFLLLCMLIGKSHTEDDIIIATKNGKVRGMNLTVFGGTVTAFLGIPYAQPPLGRLRFKKPQSLTKWSDIWNATKYANSCCQNIDQSFPGFHGSEMWNPNTDLSEDCLYLNVWIPAPKPKNATVLIWIYGGGFQTGTSSLHVYDGKFLARVERVIVVSMNYRVGALGFLALPGNPEAPGNMGLFDQQLALQWVQKNIAAFGGNPKSVTLFGESAGAASVSLHLLSPGSHSLFTRAILQSGSFNAPWAVTSLYEARNRTLNLAKLTGCSRENETEIIKCLRNKDPQEILLNEAFVVPYGTPLSVNFGPTVDGDFLTDMPDILLELGQFKKTQILVGVNKDEGTAFLVYGAPGFSKDNNSIITRKEFQEGLKIFFPGVSEFGKESILFHYTDWVDDQRPENYREALGDVVGDYNFICPALEFTKKFSEWGNNAFFYYFEHRSSKLPWPEWMGVMHGYEIEFVFGLPLERRDNYTKAEEILSRSIVKRWANFAKYGNPNETQNNSTSWPVFKSTEQKYLTLNTESTRIMTKLRAQQCRFWTSFFPKVLEMTG

SEQ ID NO: 1449 - protein, 218 aa, Homo sapiens
MAVVAAAAGWLLRLRAAGAEGHWRRLPGAGLARGFLHPAATVEDAAQRRQVAHFTFQPDPEPREYGQTQKMNLFQSVTSALDNSLAKDPTAVIFGEDVAFGGVFRCTVGLRDKYGKDRVFNTPLCEQGIVGFGIGIAVTGATAIAEIQFADYIFPAFDQIVNEAAKYRYRSGDLFNCGSLTIRSPWGCVGHGALYHSQSPEAFFAHCPGIKIKVISLS

SEQ ID NO: 1450 - protein, 392 aa, Homo sapiens
MAVVAAAAGWLLRLRAAGAEGHWRRLPGAGLARGFLHPAATVEDAAQRRQVAHFTFQPDPEPREYGQTQKMNLFQSVTSALDNSLAKDPTAVIFGEDVAFGGVFRCTVGLRDKYGKDRVFNTPLCEQGIVGFGIGIAVTGATAIAEIQFADYIFPAFDQIVNEAAKYRYRSGDLFNCGSLTIRSPWGCVGHGALYHSQSPEAFFAHCPGIKVVIPRSPFQAKGLLLSCIEDKNPCIFFEPKILYRAAAEEVPIEPYNIPLSQAEVIQEGSDVTLVAWGTQVHVIREVASMAKEKLGVSCEVIDLRTIIPWDVDTICKSVIKTGRLLISHEAPLTGGFASEISSTVQEECFLNLEAPISRVCGYDTPFPHIFEPFYIPDKWKCYDALRKMINY

SEQ ID NO: 1451 - protein, 392 aa, Homo sapiens; identical to SEQ ID NO: 1450

SEQ ID NO: 1452 - protein, 329 aa, Homo sapiens
MCGATSFLHECTRLILVTTQNAEFLQKGLQVHTCFGVYPHASVWHDCASQKKGCAVYLHVSVEFNKLIPENGFIKFHQVRRVMTILFLTMVISYFGCMKAAPMKEANIRGQGGLAYPGVRTHGTLESVNGPKAGSRGLTSLADTFEHVIEELLDEDQKVRPNEENNKDADLYTSRVMLSSQVPLEPPLLFLLEEYKNYLDAANMSMRVRRHSDPARRGELSVCDSISEWVTAADKKTAVDMSGGTVTVLEKVPVSKGQLKQYFYETKCNPMGYTKEGCRGIDKRHWNSQCRTTQSYVRALTMDSKKRIGWRFIRIDTSCVCTLTIKRGR

SEQ ID NO: 1453 - protein, 77 aa, Homo sapiens
MCGATSFLHECTRLILVTTQNAEFLQKGLQVHTCFGVYPHASVWHDCASQKKGCAVYLHVSVEFNKLIPENGFIKGW

SEQ ID NO: 1454 - protein, 255 aa, Homo sapiens
MFHQVRRVMTILFLTMVISYFGCMKAAPMKEANIRGQGGLAYPGVRTHGTLESVNGPKAGSRGLTSLADTFEHVIEELLDEDQKVRPNEENNKDADLYTSRVMLSSQVPLEPPLLFLLEEYKNYLDAANMSMRVRRHSDPARRGELSVCDSISEWVTAADKKTAVDMSGGTVTVLEKVPVSKGQLKQYFYETKCNPMGYTKEGCRGIDKRHWNSQCRTTQSYVRALTMDSKKRIGWRFIRIDTSCVCTLTIKRGR

SEQ ID NO: 1455 - protein, 262 aa, Homo sapiens
MQSREEEWFHQVRRVMTILFLTMVISYFGCMKAAPMKEANIRGQGGLAYPGVRTHGTLESVNGPKAGSRGLTSLADTFEHVIEELLDEDQKVRPNEENNKDADLYTSRVMLSSQVPLEPPLLFLLEEYKNYLDAANMSMRVRRHSDPARRGELSVCDSISEWVTAADKKTAVDMSGGTVTVLEKVPVSKGQLKQYFYETKCNPMGYTKEGCRGIDKRHWNSQCRTTQSYVRALTMDSKKRIGWRFIRIDTSCVCTLTIKRGR

SEQ ID NO: 1456 - protein, 247 aa, Homo sapiens
MTILFLTMVISYFGCMKAAPMKEANIRGQGGLAYPGVRTHGTLESVNGPKAGSRGLTSLADTFEHVIEELLDEDQKVRPNEENNKDADLYTSRVMLSSQVPLEPPLLFLLEEYKNYLDAANMSMRVRRHSDPARRGELSVCDSISEWVTAADKKTAVDMSGGTVTVLEKVPVSKGQLKQYFYETKCNPMGYTKEGCRGIDKRHWNSQCRTTQSYVRALTMDSKKRIGWRFIRIDTSCVCTLTIKRGR

SEQ ID NO: 1457 - protein, 247 aa, Homo sapiens; identical to SEQ ID NO: 1456

SEQ ID NO: 1458 - protein, 247 aa, Homo sapiens; identical to SEQ ID NO: 1456

SEQ ID NO: 1459 - protein, 247 aa, Homo sapiens; identical to SEQ ID NO: 1456

SEQ ID NO: 1460 - protein, 247 aa, Homo sapiens; identical to SEQ ID NO: 1456

SEQ ID NO: 1461 - protein, 247 aa, Homo sapiens; identical to SEQ ID NO: 1456

SEQ ID NO: 1462 - protein, 247 aa, Homo sapiens; identical to SEQ ID NO: 1456

SEQ ID NO: 1463 - protein, 247 aa, Homo sapiens; identical to SEQ ID NO: 1456

SEQ ID NO: 1464 - protein, 247 aa, Homo sapiens; identical to SEQ ID NO: 1456

SEQ ID NO: 1465 - protein, 247 aa, Homo sapiens; identical to SEQ ID NO: 1456

SEQ ID NO: 1466 - protein, 247 aa, Homo sapiens; identical to SEQ ID NO: 1456

SEQ ID NO: 1467 - protein, 247 aa, Homo sapiens; identical to SEQ ID NO: 1456

SEQ ID NO: 1468 - protein, 247 aa, Homo sapiens; identical to SEQ ID NO: 1456

SEQ ID NO: 1469 - protein, 247 aa, Homo sapiens; identical to SEQ ID NO: 1456

SEQ ID NO: 1470 - protein, 100 aa, Homo sapiens
MRALTLLALLALAALCIAGQAGAKPSGAESSKGAAFVSKQEGSEVVKRPRRYLYQWLGAPVPYPDPLEPRREVCELNPDCDELADHIGFQEAYRRFYGPV

SEQ ID NO: 1471 - protein, 368 aa, Homo sapiens
MWPLWRLVSLLALSQALPFEQRGFWDFTLDDGPFMMNDEEASGADTSGVLDPDSVTPTYSAMCPFGCHCHLRVVQCSDLGLKSVPKEISPDTTLLDLQNNDISELRKDDFKGLQHLYALVLVNNKISKIHEKAFSPLRKLQKLYISKNHLVEIPPNLPSSLVELRIHDNRIRKVPKGVFSGLRNMNCIEMGGNPLENSGFEPGAFDGLKLNYLRISEAKLTGIPKDLPETLNELHLDHNKIQAIELEDLLRYSKLYRLGLGHNQIRMIENGSLSFLPTLRELHLDNNKLARVPSGLPDLKLLQVVYLHSNNITKVGVNDFCPMGFGVKRAYYNGISLFNNPVPYWEVQPATFRCVTDRLAIQFGNYKK

SEQ ID NO: 1472 - protein, 238 aa, Homo sapiens
MWPLWRLVSLLALSQALPFEQRGFWDFTLDDGPFMMNDEEASGADTSGVLDPDSVTPTYSAMCPFGCHCHLRVVQCSDLGLKSVPKEISPDTTLLDLQNNDISELRKDDFKGLQHLYVRSWEEPAGLQQRAGVRALVLVNNKISKIHEKAFSPLRKLQKLYISKNHLVEIPPNLPSSLVELRIHDNRIRKVPKGVFSGLRNMNCIEMGGNPLENSGFEPGAFDGLKLNYLRISEAKLT

SEQ ID NO: 1473 - protein, 121 aa, Homo sapiens
MAVKKIAIFGATGQTGLTTLAQAVQAGYEVTVLVRDSSRLPSEGPRPAHVVVGDVLQAADVDKTVAGQDAVIVLLGTRNDLSPTTVMSEGARNIVAAMKAHGVDKLSCSGTLPRCPHDCRL

SEQ ID NO: 1474 - protein, 206 aa, Homo sapiens
MAVKKIAIFGATGQTGLTTLAQAVQAGYEVTVLVRDSSRLPSEGPRPAHVVVGDVLQAADVDKTVAGQDAVIVLLGTRNDLSPTTVMSEGARNIVAAMKAHGVDKVVACTSAFLLWDPTKVPPRLQAVTDDHIRMHKVLRESGLKYVAVMPPHIGDQPLTGAYTVTLDGRGPSRVISKHDLGHFMLRCLTTDEYDGHSTYPSHQYQ

SEQ ID NO: 1475 - protein, 163 aa, Homo sapiens
MAVKKIAIFGATGQTGLTTLAQAVQAGYEVTVLVRDSSRLPSEGPRPAHVVVGDVLQAADVDKTVAGQDAVIVLLGTRNDLSPTTVMSEGARNIVAAMKAHGVDKVVACTSGDQPLTGAYTVTLDGRGPSRVISKHDLGHFMLRCLTTDEYDGHSTYPSHQYQ

SEQ ID NO: 1476 - protein, 154 aa, Homo sapiens
MAVKKIAIFGATGQTGLTTLAQAVQAGYEVTVLVRDSSRLPSEGPRPAHVVVGDVLQAADVDKTVAGQDAVIVLLGTRNDLSPTTVMSEGARNIVAAMKAHGVDKVVACTSGGWWDHGGGAELGGTGEAAQGPLKGDAEAIPCYCAFTEHQLCA

SEQ ID NO: 1477 - protein, 245 aa, Homo sapiens
MAVKKIAIFGATGQTGLTTLAQAVQAGYEVTVLVRDSSRLPSEGPRPAHVVVGDVLQAADVDKTVAGQDAVIVLLGTRNDLSTEPPLCPRPSPTPRPPAPPPPPAPPLPPLPPPPPTSDSHSLSPLRSHDSDVRGRPEHCGSHEGSWCGQAFLLWDPTKVPPRLQAVTDDHIRMHKVLRESGLKYVAVMPPHIGDQPLTGAYTVTLDGRGPSRVISKHDLGHFMLRCLTTDEYDGHSTYPSHQYQ

SEQ ID NO: 1478 - protein, 730 aa, Homo sapiens
MPGVARLPLLLGLLLLPRPGRPLDLADYTYDLAEEDDSEPLNYKDPCKAAAFLGDIALDEEDLRAFQVQQAVDLRRHTARKSSIKAAVPGNTSTPSCQSTNGQPQRGACGRWRGRSRSRRAATSRPERVWPDGVIPFVIGGNFTGSQRAVFRQAMRHWEKHTCVTFLERTDEDSYIVFTYRPCGCCSYVGRRGGGPQAISIGKNCDKFGIVVHELGHVVGFWHEHTRPDRDRHVSIVRENIQPGQEYNFLKMEPQEVESLGETYDFDSIMHYARNTFSRGIFLDTIVPKYEVNGVKPPIGQRTRLSKGDIAQARKLYKCPACGETLQDSTGNFSSPEYPNGYSAHMHCVWRISVTPGEKIILNFTSLDLYRSRLCWYDYVEVRDGFWRKAPLRGRFCGSKLPEPIVSTDSRLWVEFRSSSNWVGKGFFAVYEAICGGDVKKDYGHIQSPNYPDDYRPSKVCIWRIQVSEGFHVGLTFQSFEIERHDSCAYDYLEVRDGHSESSTLIGRYCGYEKPDDIKSTSSRLWLKFVSDGSINKAGFAVNFFKEVDECSRPNRGGCEQRCLNTLGSYKCSCDPGYELAPDKRRCEAACGGFLTKLNGSITSPGWPKEYPPNKNCIWQLVAPTQYRISLQFDFFETEGNDVCKYDFVEVRSGLTADSKLHGKFCGSEKPEVITSQYNNMRVEFKSDNTVSKKGFKAHFFSEKRPALQPPRGRPHQLKFRVQKRNRTPQ

SEQ ID NO: 1479 - protein, 986 aa, Homo sapiens
MPGVARLPLLLGLLLLPRPGRPLDLADYTYDLAEEDDSEPLNYKDPCKAAAFLGDIALDEEDLRAFQVQQAVDLRRHTARKSSIKAAVPGNTSTPSCQSTNGQPQRGACGRWRGRSRSRRAATSRPERVWPDGVIPFVIGGNFTGSQRAVFRQAMRHWEKHTCVTFLERTDEDSYIVFTYRPCGCCSYVGRRGGGPQAISIGKNCDKFGIVVHELGHVVGFWHEHTRPDRDRHVSIVRENIQPGQEYNFLKMEPQEVESLGETYDFDSIMHYARNTFSRGIFLDTIVPKYEVNGVKPPIGQRTRLSKGDIAQARKLYKCPACGETLQDSTGNFSSPEYPNGYSAHMHCVWRISVTPGEKIILNFTSLDLYRSRLCWYDYVEVRDGFWRKAPLRGRFCGSKLPEPIVSTDSRLWVEFRSSSNWVGKGFFAVYEAICGGDVKKDYGHIQSPNYPDDYRPSKVCIWRIQVSEGFHVGLTFQSFEIERHDSCAYDYLEVRDGHSESSTLIGRYCGYEKPDDIKSTSSRLWLKFVSDGSINKAGFAVNFFKEVDECSRPNRGGCEQRCLNTLGSYKCSCDPGYELAPDKRRCEAACGGFLTKLNGSITSPGWPKEYPPNKNCIWQLVAPTQYRISLQFDFFETEGNDVCKYDFVEVRSGLTADSKLHGKFCGSEKPEVITSQYNNMRVEFKSDNTVSKKGFKAHFFSDKDECSKDNGGCQQDCVNTFGSYECQCRSGFVLHDNKHDCKEAGCDHKVTSTSGTITSPNWPDKYPSKKECTWAISSTPGHRVKLTFMEMDIESQPECAYDHLEVFDGRDAKAPVLGRFCGSKKPEPVLATGSRMFLRFYSDNSVQRKGFQASHATECGGQVRADVKTKDLYSHAQFGDNNYPGGVDCEWVIVAEEGYGVELVFQTFEVEEETDCGYDYMELFDGYDSTAPRLGRYCGSGPPEEVYSAGDSVLVKFHSDDTITKKGFHLRYTSTKFQDTLHSRK

SEQ ID NO: 1480 - protein, 622 aa, Homo sapiens
MPGVARLPLLLGLLLLPRPGRPLDLADYTYDLAEEDDSEPLNYKDPCKAAAFLGDIALDEEDLRAFQVQQAVDLRRHTARKSSIKAAVPGNTSTPSCQSTNGQPQRGACGRWRGRSRSRRAATSRPERVWPDGVIPFVIGGNFTGSQRAVFRQAMRHWEKHTCVTFLERTDEDSYIVFTYRPCGCCSYVGRRGGGPQAISIGKNCDKFGIVVHELGHVVGFWHEHTRPDRDRHVSIVRENIQPGQEYNFLKMEPQEVESLGETYDFDSIMHYARNTFSRGIFLDTIVPKYEVNGVKPPIGQRTRLSKGDIAQARKLYKCPACGETLQDSTGNFSSPEYPNGYSAHMHCVWRISVTPGEKIILNFTSLDLYRSRLCWYDYVEVRDGFWRKAPLRGRFCGSKLPEPIVSTDSRLWVEFRSSSNWVGKGFFAVYEAICGGDVKKDYGHIQSPNYPDDYRPSKVCIWRIQVSEGFHVGLTFQSFEIERHDSCAYDYLEVRDGHSESSTLIGRYCGYEKPDDIKSTSSRLWLKFVSDGSINKAGFAVNFFKEVDECSRPNRGGCEQRCLNTLGSYKCSCDPGYELAPDKRRCEGCYDLQVGKPLLWDRHCFRLSTHGPEMLGTALRG

SEQ ID NO: 1481 - protein, 717 aa, Homo sapiens
MPGVARLPLLLGLLLLPRPGRPLDLADYTYDLAEEDDSEPLNYKDPCKAAAFLGDIALDEEDLRAFQVQQAVDLRRHTARKSSIKAAVPGNTSTPSCQSTNGQPQRGACGRWRGRSRSRRAATSRPERVWPDGVIPFVIGGNFTGSQRAVFRQAMRHWEKHTCVTFLERTDEDSYIVFTYRPCGCCSYVGRRGGGPQAISIGKNCDKFGIVVHELGHVVGFWHEHTRPDRDRHVSIVRENIQPGQEYNFLKMEPQEVESLGETYDFDSIMHYARNTFSRGIFLDTIVPKYEVNGVKPPIGQRTRLSKGDIAQARKLYKCPACGETLQDSTGNFSSPEYPNGYSAHMHCVWRISVTPGEKIILNFTSLDLYRSRLCWYDYVEVRDGFWRKAPLRGRFCGSKLPEPIVSTDSRLWVEFRSSSNWVGKGFFAVYEAICGGDVKKDYGHIQSPNYPDDYRPSKVCIWRIQVSEGFHVGLTFQSFEIERHDSCAYDYLEVRDGHSESSTLIGRYCGYEKPDDIKSTSSRLWLKFVSDGSINKAGFAVNFFKEVDECSRPNRGGCEQRCLNTLGSYKCSCDPGYELAPDKRRCEAACGGFLTKLNGSITSPGWPKEYPPNKNCIWQLVAPTQYRISLQFDFFETEGNDVCKYDFVEVRSGLTADSKLHGKFCGSEKPEVITSQYNNMRVEFKSDNTVSKKGFKAHFFSGGELFGLLGHPPRRP

SEQ ID NO: 1482 - protein, 730 aa, Homo sapiens; identical to SEQ ID NO: 1478

SEQ ID NO: 1483 - protein, 302 aa, Homo sapiens
MPGVARLPLLLGLLLLPRPGRPLDLADYTYDLAEEDDSEPLNYKDPCKAAAFLGDIALDEEDLRAFQVQQAVDLRRHTARKSSIKAAVPGNTSTPSCQSTNGQPQRGACGRWRGRSRSRRAATSRPERVWPDGVIPFVIGGNFTGSQRAVFRQAMRHWEKHTCVTFLERTDEDSYIVFTYRPCGCCSYVGRRGGGPQAISIGKNCDKFGIVVHELGHVVGFWHEHTRPDRDRHVSIVRENIQPGVLHSSLLLLSCGSRNGASFPCSLESSIHQALCWTGLFLRPSPFPRLPLAAPRTLRAGV

SEQ ID NO: 1484 - protein, 302 aa, Homo sapiens; identical to SEQ ID NO: 1483

SEQ ID NO: 1485 - protein, 189 aa, Homo sapiens
MPGVARLPLLLGLLLLPRPGRPLDLADYTYDLAEEDDSEPLNYKDPCKAAAFLGDIALDEEDLRAFQVQQAVDLRRHTARKSSIKAAVPGNTSTPSCQSTNGQPQRGACGRWRGRSRSRRAATSRPERVWPDGVIPFVIGGNFTGSQRAVFRQAMRHWEKHTCVTFLERTDEDSYIVFTYRPCGSGPPP

SEQ ID NO: 1486 - protein, 189 aa, Homo sapiens; identical to SEQ ID NO: 1485

SEQ ID NO: 1487 - protein, 189 aa, Homo sapiens; identical to SEQ ID NO: 1485

SEQ ID NO: 1488 - protein, 189 aa, Homo sapiens; identical to SEQ ID NO: 1485

SEQ ID NO: 1489 - protein, 61 aa, Homo sapiens
MPGVARLPLLLGLLLLPRPGRPLDLADYTYDLAEEDDSEPLNYKDPCKLPFLGTLPWTKRT

SEQ ID NO: 1490 - protein, 424 aa, Homo sapiens
MGSLVLTLCALFCLAAYLVSGSPIMNLEQSPLEEDMSLFGDVFSEQDGVDFNTLLQSMKDEFLKTLNLSDIPTQDSAKVDPPEYMLELYNKFATDRTSMPSANIIRSFKNEDLFSQPVSFNGLRKYPLLFNVSIPHHEEVIMAELRLYTLVQRDRMIYDGVDRKITIFEVLESKGDNEGERNMLVLVSGEIYGTNSEWETFDVTDAIRRWQKSGSSTHQLEVHIESKHDEAEDASSGRLEIDTSAQNKHNPLLIVFSDDQSSDKERKEELNEMISHEQLPELDNLGLDSFSSGPGEEALLQMRSNIIYDSTARIRRNAKGNYCKRTPLYIDFKEIGWDSWIIAPPGYEAYECRGVCNYPLAEHLTPTKHAIIQALVHLKNSQKASKACCVPTKLEPISILYLDKGVVTYKFKYEGMAVSECGCR

SEQ ID NO: 1491 - protein, 392 aa, Homo sapiens
MVLLSILRILFLCELVLFMEHRAQMAEGGQSSIALLAEAPTLPLIEELLEESPGEQPRKPRLLGHSLRYMLELYRRSADSHGHPRENRTIGATMVRLVKPLTNVARPHRGTWHIQILGFPLRPNRGLYQLVRATVVYRHHLQLTRFNLSCHVEPWVQKNPTNHFPSSEGDSSKPSLMSNAWKEMDITQLVQQRFWNNKGHRILRLRFMCQQQKDSGGLELWHGTSSLDIAFLLLYFNDTHKSIRKAKFLPRGMEEFMERESLLRRTRQADGISAEVTASSSKHSGPENNQCSLHPFQISFRQLGWDHWIIAPPFYTPNYCKGTCLRVLRDGLNSPNHAIIQNLINQLVDQSVPRPSCVPYKYVPISVLMIEANGSILYKEYEGMIAESCTCR

SEQ ID NO: 1492 - protein, 396 aa, Homo sapiens
MVAGTRCLLALLLPQVLLGGAAGLVPELGRRKFAAASSGRPSSQPSDEVLSEFELRLLSMFGLKQRPTPSRDAVVPPYMLDLYRRHSGQPGSPAPDHRLERAASRANTVRSFHHEESLEELPETSGKTTRRFFFNLSSIPTEEFITSAELQVFREQMQDALGNNSSFHHRINIYEIIKPATANSKFPVTRLLDTRLVNQNASRWESFDVTPAVMRWTAQGHANHGFVVEVAHLEEKQGVSKRHVRISRSLHQDEHSWSQIRPLLVTFGHDGKGHPLHKREKRQAKHKQRKRLKSSCKRHPLYVDFSDVGWNDWIVAPPGYHAFYCHGECPFPLADHLNSTNHAIVQTLVNSVNSKIPKACCVPTELSAISMLYLDENEKVVLKNYQDMVVEGCGCR

SEQ ID NO: 1493 - protein, 472 aa, Homo sapiens
MAGASRLLFLWLGCFCVSLAQGERPKPPFPELRKAVPGDRTAGGGPDSELQPQDKVSEHMLRLYDRYSTVQAARTPGSLEGGSQPWRPRLLREGNTVRSFRAAAAETLERKGLYIFNLTSLTKSENILSATLYFCIGELGNISLSCPVSGGCSHHAQRKHIQIDLSAWTLKFSRNQSQLLGHLSVDMAKSHRDIMSWLSKDITQLLRKAKENEEFLIGFNITSKGRQLPKRRLPFPEPYILVYANDAAISEPESVVSSLQGHRNFPTGTVPKWDSHIRAALSIERRKKRSTGVLLPLQNNELPGAEYQYKKDEVWEERKPYKTLQAQAPEKSKNKKKQRKGPHRKSQTLQFDEQTLKKARRKQWIEPRNCARRYLKVDFADIGWSEWIISPKSFDAYYCSGACQFPMPKSLKPSNHATIQSIVRAVGVVPGIPEPCCVPEKMSSLSILFFDENKNVVLKVYPNMTVESCACR

SEQ ID NO: 1494 - protein, 104 aa, Homo sapiens
LIPETGKKKVAEIQGHAGGRRSGQSHELLRDFEATLLQMFGLRRRPQPSKSAVIPDYMRDLYRLQSGEEEEEQIHSTGLEYPERPASRANTVRSFHHEASLRTR

SEQ ID NO: 1495 - protein, 271 aa, Homo sapiens
MFGLRRRPQPSKSAVIPDYMRDLYRLQSGEEEEEQIHSTGLEYPERPASRANTVRSFHHEEHLENIPGTSENSAFRFLFNLSSIPENEVISSAELRLFREQVDQGPDWERGFHRINIYEVMKPPAEVVPGHLITRLLDTRLVHHNVTRWETFDVSPAVLRWTREKQPNYGLAIEVTHLHQTRTHQGQHVRISRSLPQGSGNWAQLRPLLVTFGHDGRGHALTRRRRAKRSPKHHSQRARKKNKNCRRHSLYVDFSDVGWNDWIVAPPGYQA

SEQ ID NO: 1496 - protein, 110 aa, Homo sapiens
MIPGNRMLMVVLLCQVLLGGASHASLIPETGKKKVAEIQGHAGGRRSGQSHELLRDFEATLLQMFGLRRRPQPSKSAVIPDYMRDLYRLQSGEEEEEQIHSTGLEYPERP

SEQ ID NO: 1497 - protein, 408 aa, Homo sapiens
MIPGNRMLMVVLLCQVLLGGASHASLIPETGKKKVAEIQGHAGGRRSGQSHELLRDFEATLLQMFGLRRRPQPSKSAVIPDYMRDLYRLQSGEEEEEQIHSTGLEYPERPASRANTVRSFHHEEHLENIPGTSENSAFRFLFNLSSIPENEVISSAELRLFREQVDQGPDWERGFHRINIYEVMKPPAEVVPGHLITRLLDTRLVHHNVTRWETFDVSPAVLRWTREKQPNYGLAIEVTHLHQTRTHQGQHVRISRSLPQGSGNWAQLRPLLVTFGHDGRGHALTRRRRAKRSPKHHSQRARKKNKNCRRHSLYVDFSDVGWNDWIVAPPGYQAFYCHGDCPFPLADHLNSTNHAIVQTLVNSVNSSIPKACCVPTELSAISMLYLDEYDKVVLKNYQEMVVEGCGCR

SEQ ID NO: 1498 - protein, 408 aa, Homo sapiens; identical to SEQ ID NO: 1497

SEQ ID NO: 1499 - protein, 408 aa, Homo sapiens; identical to SEQ ID NO: 1497

SEQ ID NO: 1500 - protein, 408 aa, Homo sapiens; identical to SEQ ID NO: 1497

SEQ ID NO: 1501 - protein, 29 aa, Homo sapiens
NTVRSFHHEGQSLPPVCVGEGWWDWLEGQ

SEQ ID NO: 1502 - protein, 513 aa, Homo sapiens
MPGLGRRAQWLCWWWGLLCSCCGPPPLRPPLPAAAAAAAGGQLLGDGGSPGRTEQPPPSPQSSSGFLYRRLKTQEKREMQKEILSVLGLPHRPRPLHGLQQPQPPALRQQEEQQQQQQLPRGEPPPGRLKSAPLFMLDLYNALSADNDEDGASEGERQQSWPHEAASSSQRRQPPPGAAHPLNRKSLLAPGSGSGGASPLTSAQDSAFLNDADMVMSFVNLVEYDKEFSPRQRHHKEFKFNLSQIPEGEVVTAAEFRIYKDCVMGSFKNQTFLISIYQVLQEHQHRDSDLFLLDTRVVWASEEGWLEFDITATSNLWVVTPQHNMGLQLSVVTRDGVHVHPRAAGLVGRDGPYDKQPFMVAFFKVSEVHVRTTRSASSRRRQQSRNRSTQSQDVARVSSASDYNSSELKTACRKHELYVSFQDLGWQDWIIAPKGYAANYCDGECSFPLNAHMNATNHAIVQTLVHLMNPEYVPKPCCAPTKLNAISVLYFDDNSNVILKKYRNMVVRACGCH

SEQ ID NO: 1503 - protein, 365 aa, Homo sapiens
MHVRSLRAAAPHSFVALWAPLFLLRSALADFSLDNEVHSSFIHRRLRSQERREMQREILSILGLPHRPRPHLQGKHNSAPMFMLDLYNAMAVEEGGGPGGQGFSYPYKAVFSTQGPPLASLQDSHFLTDADMVMSFVNLVEHDKEFFHPRYHHREFRFDLSKIPEGEAVTAAEFRIYKDYIRERFDNETFRISVYQVLQEHLGRESDLFLLDSRTLWASEEGWLVFDITATSNHWVVNPRHNLGLQLSVETLDENSSSDQRQACKKHELYVSFRDLGWQDWIIAPEGYAAYYCEGECAFPLNSYMNATNHAIVQTLVHFINPETVPKPCCAPTQLNAISVLYFDDSSNVILKKYRNMVVRACGCH

SEQ ID NO: 1504 - protein, 431 aa, Homo sapiens
MHVRSLRAAAPHSFVALWAPLFLLRSALADFSLDNEVHSSFIHRRLRSQERREMQREILSILGLPHRPRPHLQGKHNSAPMFMLDLYNAMAVEEGGGPGGQGFSYPYKAVFSTQGPPLASLQDSHFLTDADMVMSFVNLVEHDKEFFHPRYHHREFRFDLSKIPEGEAVTAAEFRIYKDYIRERFDNETFRISVYQVLQEHLGRESDLFLLDSRTLWASEEGWLVFDITATSNHWVVNPRHNLGLQLSVETLDGQSINPKLAGLIGRHGPQNKQPFMVAFFKATEVHFRSIRSTGSKQRSQNRSKTPKNQEALRMANVAENSSSDQRQACKKHELYVSFRDLGWQDWIIAPEGYAAYYCEGECAFPLNSYMNATNHAIVQTLVHFINPETVPKPCCAPTQLNAISVLYFDDSSNVILKKYRNMVVRACGCH

SEQ ID NO: 1505 - protein, 412 aa, Homo sapiens
MHVRSLRAAAPHSFVALWAPLFLLRSALADFSLDNEVHSSFIHRRLRSQERREMQREILSILGLPHRPRPHLQGKHNSAPMFMLDLYNAMAVEEGGGPGGQGFSYPYKAVFSTQGPPLASLQDSHFLTDADMVMSFVNLVEHDKEFFHPRYHHREFRFDLSKIPEGEAVTAAEFRIYKDYIRERFDNETFRISVYQVLQEHLGRESDLFLLDSRTLWASEEGWLVFDITATSNHWVVNPRHNLGLQLSVETLDGQSINPKLAGLIGRHGPQNKQPFMVAFFKATEVHFRSIRSTGSKQRSQNRSKTPKNQEALRMANVAENSSSDQRQACKKHELYVSFRDLGWQDWIIAPEGYAAYYCEGECAFPLNSYMNATNHAIVQTLVGVTPSWGVVTWAGQAAGPPDPAASKLGPE

SEQ ID NO: 1506 - protein, 297 aa, Homo sapiens
  SITE 1: note = misc_feature - Xaa can be any naturally occurring amino acid
XPPLASLQDSHFLTDADMVMSFVNLVEHDKEFFHPRYHHREFRFDLSKIPEGEAVTAAEFRIYKDYIRERFDNETFRISVYQVLQEHLGSTGTCCMPCLRASTRTNQTRVPALWKLTFQQRRGHGRESDLFLLDSRTLWASEEGWLVFDITATSNHWVVNPRHNLGLQLSVETLDGQSINPKLAGLIGRHGPQNKQPFMVAFFKATEVHFRSIRSTGSKQRSQNRSKTPKNQEALRMANVAENSSSDQRQACKKHELYVSFRDLGWQDWIIAPEGYAAYYCEGECAFPLNSYMNATN

SEQ ID NO: 1507 - protein, 402 aa, Homo sapiens
MAARPGPLWLLGLTLCALGGGGPGLRPPPGCPQRRLGARERRDVQREILAVLGLPGRPRPRAPPAASRLPASAPLFMLDLYHAMAGDDDEDGAPAEQRLGRADLVMSFVNMVERDRALGHQEPHWKEFRFDLTQIPAGEAVTAAEFRIYKVPSIHLLNRTLHVSMFQVVQEQSNRESDLFFLDLQTLRAGDEGWLVLDVTAASDCWLLKRHKDLGLRLYVETEDGHSVDPGLAGLLGQRAPRSQQPFVVTFFRASPSPIRTPRAVRPLRRRQPKKSNELPQANRLPGIFDDVRGSHGRQVCRRHELYVSFQDLGWLDWVIAPQGYSAYYCEGECSFPLDSCMNATNHAILQSLVHLMKPNAVPKACCAPTKLSATSVLYYDSSNNVILRKHRNMVVKACGCH

SEQ ID NO: 1508 - protein, 402 aa, Homo sapiens
MTALPGPLWLLGLALCALGGGGPGLRPPPGCPQRRLGARERRDVQREILAVLGLPGRPRPRAPPAASRLPASAPLFMLDLYHAMAGDDDEDGAPAERRLGRADLVMSFVNMVERDRALGHQEPHWKEFRFDLTQIPAGEAVTAAEFRIYKVPSIHLLNRTLHVSMFQVVQEQSNRESDLFFLDLQTLRAGDEGWLVLDVTAASDCWLLKRHKDLGLRLYVETEDGHSVDPGLAGLLGQRAPRSQQPFVVTFFRASPSPIRTPRAVRPLRRRQPKKSNELPQANRLPGIFDDVHGSHGRQVCRRHELYVSFQDLGWLDWVIAPQGYSAYYCEGECSFPLDSCMNATNHAILQSLVHLMMPDAVPKACCAPTKLSATSVLYYDSSNNVILRKHRNMVVKACGCH

SEQ ID NO: 1509 - protein, 90 aa, Homo sapiens
MLWFSGVGALAERYCRRSPGITCCVLLLLNCSGVPMSLASSFLTGSVAKCENEGEVLQIPFITDNPCIMCVCLHEPTRWSNLTQNPGFYD

SEQ ID NO: 1510 - protein, 685 aa, Homo sapiens
MLWFSGVGALAERYCRRSPGITCCVLLLLNCSGVPMSLASSFLTGSVAKCENEGEVLQIPFITDNPCIMCVCLNKEVTCKREKCPVLSRDCALAIKQRGACCEQCKGCTYEGNTYNSSFKWQSPAEPCVLRQCQEGVVTESGVRCVVHCKNPLEHLGMCCPTCPGCVFEGVQYQEGEEFQPEGSKCTKCSCTGGRTQCVREVCPILSCPQHLSHIPPGQCCPKCLGQRKVFDLPFGSCLFRSDVYDNGSSFLYDNCTACTCRDSTVVCKRKCSHPGGCDQGQEGCCEECLLRVPPEDIKVCKFGNKIFQDGEMWSSINCTICACVKGRTECRNKQCIPISSCPQGKILNRKGCCPICTEKPGVCTVFGDPHYNTFDGRTFNFQGTCQYVLTKDCSSPASPFQVLVKNDARRTRSFSWTKSVELVLGESRVSLQQHLTVRWNGSRIALPCRAPHFHIDLDGYLLKVTTKAGLEISWDGDSFVEVMAAPHLKGKLCGLCGNYNGHKRDDLIGGDGNFKFDVDDFAESWRVESNEFCNRPQRKPVPELCQGTVKVKLRAHRECQKLKSWEFQTCHSTVDYATFYRSCVTDMCECPVHKNCYCESFLAYTRACQREGIKVHWEPQQNCAATQCKHGAVYDTCGPGCIKTCDNWNEIGPCNKPCVAGCHCPANLVLHKGRCIKPVLCPQR

SEQ ID NO: 1511 - protein, 133 aa, Homo sapiens
MLWFSGVGALAERYCRRSPGITCCVLLLLNCSGVPMSLASSFLTGSVAKCENEGEVLQIPFITDNPCIMCVCLNKEVTCKREKCPVLSRDCALAIKQRGACCEQCKVLVSRVLRDTVLFTLKYWRLPVFWLHL

SEQ ID NO: 1512 - protein, 161 aa, Homo sapiens
MLWFSGVGALAERYCRRSPGITCCVLLLLNCSGVPMSLASSFLTGSVAKCENEGEVLQIPFITDNPCIMCVCLVAPMKEIPITAPSNGRARLSLVFYASARRALSQSLGCAVLFIVKTLWSIWECAAPHVQAVCLRVCSIKKGRNFSQKEANVPSVPALEA

SEQ ID NO: 1513 - protein, 987 aa, Homo sapiens
MRCRNMFFSFKASLCGCGAATAPSLTAISCTLNCSCQSFKPGKINHRQCDQCKHGWVAHALSKLRIPPMYPTSQVEIVQSNVVFDISSLMLYGTQAIPVRLKILLDRLFSVLKQDEVLQILHALDWTLQDYIRGYVLQDASGKVLDHWSIMTSEEEVATLQQFLRFGETKSIVELMAIQEKEEQSIIIPPSTANVDIRAFIESCSHRSSSLPTPVDKGNPSSIHPFENLISNMTFMLPFQFFNPLPPALIGSLPEQYMLEQGHDQSQDPKQEVHGPFPDSSFLTSSSTPFQVEKDQCLNCPDAITKKEDSTHLSDSSSYNIVTKFERTQLSPEAKVKPERNSLGTKKGRVFCTACEKTFYDKGTLKIHYNAVHLKIKHKCTIEGCNMVFSSLRSRNRHSANPNPRLHMPMNRNNRDKDLRNSLNLASSENYKCPGFTVTSPDCRPPPSYPGSGEDSKGQPAFPNIGQNGVLFPNLKTVQPVLPFYRSPATPAEVANTPGILPSLPLLSSSIPEQLISNEMPFDALPKKKSRKSSMPIKIEKEAVEIANEKRHNLSSDEDMPLQVVSEDEQEACSPQSHRVSEEQHVQSGGLGKPFPEGERPCHRESVIESSGAISQTPEQATHNSERETEQTPALIMVPREVEDGGHEHYFTPGMEPQVPFSDYMELQQRLLAGGLFSALSNRGMAFPCLEDSKELEHVGQHALARQIEENRFQCDICKKTFKNACSVKIHHKNMHVKEMHTCTVEGCNATFPSRRSRDRHSSNLNLHQKALSQEALESSEDHFRAAYLLKDVAKEAYQDVAFTQQASQTSVIFKGTSRMGSLVYPITQVHSASLESYNSGPLSEGTILDLSTTSSMKSESSSHSSWDSDGVSEEGTVLMEDSDGNCEGSSLVPGEDEYPICVLMEKADQSLASLPSGLPITCHLCQKTYSNKGTFRAHYKTVHLRQLHKCKVPGCNTMFSSVRSRNRHSQNPNLHKSLASSPSHLQ

SEQ ID NO: 1514 - protein, 994 aa, Homo sapiens
MRRRPPSRGGRGAARARETRRQPRHRSGRRMAEAISCTLNCSCQSFKPGKINHRQCDQCKHGWVAHALSKLRIPPMYPTSQVEIVQSNVVFDISSLMLYGTQAIPVRLKILLDRLFSVLKQDEVLQILHALDWTLQDYIRGYVLQDASGKVLDHWSIMTSEEEVATLQQFLRFGETKSIVELMAIQEKEEQSIIIPPSTANVDIRAFIESCSHRSSSLPTPVDKGNPSSIHPFENLISNMTFMLPFQFFNPLPPALIGSLPEQYMLEQGHDQSQDPKQEVHGPFPDSSFLTSSSTPFQVEKDQCLNCPDAITKKEDSTHLSDSSSYNIVTKFERTQLSPEAKVKPERNSLGTKKGRVFCTACEKTFYDKGTLKIHYNAVHLKIKHKCTIEGCNMVFSSLRSRNRHSANPNPRLHMPMNRNNRDKDLRNSLNLASSENYKCPGFTVTSPDCRPPPSYPGSGEDSKGQPAFPNIGQNGVLFPNLKTVQPVLPFYRSPATPAEVANTPGILPSLPLLSSSIPEQLISNEMPFDALPKKKSRKSSMPIKIEKEAVEIANEKRHNLSSDEDMPLQVVSEDEQEACSPQSHRVSEEQHVQSGGLGKPFPEGERPCHRESVIESSGAISQTPEQATHNSERETEQTPALIMVPREVEDGGHEHYFTPGMEPQVPFSDYMELQQRLLAGGLFSALSNRGMAFPCLEDSKELEHVGQHALARQIEENRFQCDICKKTFKNACSVKIHHKNMHVKEMHTCTVEGCNATFPSRRSRDRHSSNLNLHQKALSQEALESSEDHFRAAYLLKDVAKEAYQDVAFTQQASQTSVIFKGTSRMGSLVYPITQVHSASLESYNSGPLSEGTILDLSTTSSMKSESSSHSSWDSDGVSEEGTVLMEDSDGNCEGSSLVPGEDEYPICVLMEKADQSLASLPSGLPITCHLCQKTYSNKGTFRAHYKTVHLRQLHKCKVPGCNTMFSSVRSRNRHSQNPNLHKSLASSPSHLQ

SEQ ID NO: 1515 - protein, 22 aa, Homo sapiens
MLRGTMTAWRGMRPEVTLACLL

SEQ ID NO: 1516 - protein, 32 aa, Homo sapiens
MLRGTMTAWRGMRPEVTLACLLLATAGCFADL

SEQ ID NO: 1517 - protein, 85 aa, Homo sapiens
MLRGTMTAWRGMRPEVTLACLLLATAGCFADLNEVPQVTVQPASTVQKPGGTVILGCVVEPPRMNVTWRLNGKELNGSDDALGVL

SEQ ID NO: 1518 - protein, 1115 aa, Homo sapiens
MLRGTMTAWRGMRPEVTLACLLLATAGCFADLNEVPQVTVQPASTVQKPGGTVILGCVVEPPRMNVTWRLNGKELNGSDDALGVLITHGTLVITALNNHTVGRYQCVARMPAGAVASVPATVTLANLQDFKLDVQHVIEVDEGNTAVIACHLPESHPKAQVRYSVKQEWLEASRGNYLIMPSGNLQIVNASQEDEGMYKCAAYNPVTQEVKTSGSSDRLRVRRSTAEAARIIYPPEAQTIIVTKGQSLILECVASGIPPPRVTWAKDGSSVTGYNKTRFLLSNLLIDTTSEEDSGTYRCMADNGVGQPGAAVILYNVQVFEPPEVTMELSQLVIPWGQSAKLTCEVRGNPPPSVLWLRNAVPLISSQRLRLSRRALRVLSMGPEDEGVYQCMAENEVGSAHAVVQLRTSRPSITPRLWQDAELATGTPPVSPSKLGNPEQMLRGQPALPRPPTSVGPASPQCPGEKGQGAPAEAPIILSSPRTSKTDSYELVWRPRHEGSGRAPILYYVVKHRKQVTNSSDDWTISGIPANQHRLTLTRLDPGSLYEVEMAAYNCAGEGQTAMVTFRTGRRPKPEIMASKEQQIQRDDPGASPQSSSQPDHGRLSPPEAPDRPTISTASETSVYVTWIPRGNGGFPIQSFRVEYKKLKKVGDWILATSAIPPSRLSVEITGLEKGTSYKFRVRALNMLGESEPSAPSRPYVVSGYSGRVYERPVAGPYITFTDAVNETTIMLKWMYIPASNNNTPIHGFYIYYRPTDSDNDSDYKKDMVEGDKYWHSISHLQPETSYDIKMQCFNEGGESEFSNVMICETKARKSSGQPGRLPPPTLAPPQPPLPETIERPVGTGAMVARSSDLPYLIVGVVLGSIVLIIVTFIPFCLWRAWSKQKHTTDLGFPRSALPPSCPYTMVPLGGLPGHQASGQPYLSGISGRACANGIHMNRGCPSAAVGYPGMKPQQHCPGELQQQSDTSSLLRQTHLGNGYDPQSHQITRGPKSSPDEGSFLYTLPDDSTHQLLQPHHDCCQRQEQPAAVGQSGVRRAPDSPVLEAVWDPPFHSGPPCCLGLVPVEEVDSPDSCQVSGGDWCPQHPVGAYVGQEPGMQLSPGPLVRVSFETPPLTI

SEQ ID NO: 1519 - protein, 1114 aa, Homo sapiens
MLRGTMTAWRGMRPEVTLACLLLATAGCFADLNEVPQVTVQPASTVQKPGGTVILGCVVEPPRMNVTWRLNGKELNGSDDALGVLITHGTLVITALNNHTVGRYQCVARMPAGAVASVPATVTLANLQDFKLDVQHVIEVDEGNTAVIACHLPESHPKAQVRYSVKQEWLEASRGNYLIMPSGNLQIVNASQEDEGMYKCAAYNPVTQEVKTSGSSDRLRVRRSTAEAARIIYPPEAQTIIVTKGQSLILECVASGIPPPRVTWAKDGSSVTGYNKTRFLLSNLLIDTTSEEDSGTYRCMADNGVGQPGAAVILYNVQVFEPPEVTMELSQLVIPWGQSAKLTCEVRGNPPPSVLWLRNAVPLISSQRLRLSRRALRVLSMGPEDEGVYQCMAENEVGSAHAVVQLRTSRPSITPRLWQDAELATGTPPVSPSKLGNPEQMLRGQPALPRPPTSVGPASPQCPGEKGQGAPAEAPIILSSPRTSKTDSYELVWRPRHEGSGRAPILYYVVKHRKVTNSSDDWTISGIPANQHRLTLTRLDPGSLYEVEMAAYNCAGEGQTAMVTFRTGRRPKPEIMASKEQQIQRDDPGASPQSSSQPDHGRLSPPEAPDRPTISTASETSVYVTWIPRGNGGFPIQSFRVEYKKLKKVGDWILATSAIPPSRLSVEITGLEKGTSYKFRVRALNMLGESEPSAPSRPYVVSGYSGRVYERPVAGPYITFTDAVNETTIMLKWMYIPASNNNTPIHGFYIYYRPTDSDNDSDYKKDMVEGDKYWHSISHLQPETSYDIKMQCFNEGGESEFSNVMICETKARKSSGQPGRLPPPTLAPPQPPLPETIERPVGTGAMVARSSDLPYLIVGVVLGSIVLIIVTFIPFCLWRAWSKQKHTTDLGFPRSALPPSCPYTMVPLGGLPGHQASGQPYLSGISGRACANGIHMNRGCPSAAVGYPGMKPQQHCPGELQQQSDTSSLLRQTHLGNGYDPQSHQITRGPKSSPDEGSFLYTLPDDSTHQLLQPHHDCCQRQEQPAAVGQSGVRRAPDSPVLEAVWDPPFHSGPPCCLGLVPVEEVDSPDSCQVSGGDWCPQHPVGAYVGQEPGMQLSPGPLVRVSFETPPLTI

SEQ ID NO: 1520 - protein, 1114 aa, Homo sapiens; identical to SEQ ID NO: 1519

SEQ ID NO: 1521 - protein, 157 aa, Homo sapiens
MLRGTMTAWRGMRPEVTLACLLLATAGCFADLNEVPQVTVQPASTVQKPGGTVILGCVVEPPRMNVTWRLNGKELNGSDDALGVLITHGTLVITALNNHTVGRYQCVARMPAGAVASVPATVTLASESAPLPPCHGAVPPHLSHPEAPTIHAASCYS

SEQ ID NO: 1522 - protein, 157 aa, Homo sapiens; identical to SEQ ID NO: 1521

SEQ ID NO: 1523 - protein, 65 aa, Homo sapiens
MTHEVLSTFIPSEGSSSKVEEVDLQDFKLDVQHVIEVDEGNTAVIACHLPESHPKAQVRYSVKQE

SEQ ID NO: 1524 - protein, 39 aa, Homo sapiens
  SITE 1: note = misc_feature - Xaa can be any naturally occurring amino acid
XQQQSDTSSLLRQTHLGNGYDPQSHQITRAPMLLGPCAS

SEQ ID NO: 1525 - protein, 84 aa, Homo sapiens
  SITE 1: note = misc_feature - Xaa can be any naturally occurring amino acid
XRACANGIHMNRGCPSAAVGYPGMKPQQHCPGELQQQSDTSSLLRQTHLGNGYDPQSHQITSCCSPITTAANARSSLLLWASQG

SEQ ID NO: 1526 - protein, 85 aa, Homo sapiens
MADGGGGGGTGAVGGGGTSQASAGAATGATGASGGGGPINPASLPPGDPQLIALIVEQLKSRGLFDSFRRDCLADVDTKNTPDTF

SEQ ID NO: 1527 - protein, 129 aa, Homo sapiens
MADGGGGGGTGAVGGGGTSQASAGAATGATGASGGGGPINPASLPPGDPQLIALIVEQLKSRGLFDSFRRDCLADVDTKPAYQNLRQKVDNFVSTHLDKQEWNPTMNKNQLRNGLRQSVVQIRQTPFES

SEQ ID NO: 1528 - protein, 185 aa, Homo sapiens
MADGGGGGGTGAVGGGGTSQASAGAATGATGASGGGGPINPASLPPGDPQLIALIVEQLKSRGLFDSFRRDCLADVDTKPAYQNLRQKVDNFVSTHLDKQEWNPTMNKNQLRNGLRQSVVQSGMLEAGVDRIISQVVDPKLNHIFRPQIERAIHEFLAAQKKAAVPAPPPEPEGQDPPAPSQDTS

SEQ ID NO: 1529 - protein, 42 aa, Homo sapiens
MNKNQLRNGLRQSVVQSGMLEAGVDRIISQVVDPKLNHIFRP

SEQ ID NO: 1530 - protein, 118 aa, Homo sapiens
  SITE 1: note = misc_feature - Xaa can be any naturally occurring amino acid
XLALLGPAGAVAPSTRPRCLPATRSSSLSSWSSSRAGAFLTASAGTAWPTWTPRSGMLEAGVDRIISQVVDPKLNHIFRPQIERAIHEFLAAQKKAAVPAPPPEPEGQDPPAPSQDTS

SEQ ID NO: 1531 - protein, 137 aa, Homo sapiens
MLSGRLVLGLVSMAGRVCLCQGSAGSGAIGPVEAAIRTKLEEALSPEVLELRNESGGHAVPPGSETHFRVAVVSSRFEGLSPLQRHRLVHAALAEELGGPVHALAIQARTPAQWRENSQLDTSPPCLGGNKKTLGTP

SEQ ID NO: 1532 - protein, 137 aa, Homo sapiens; identical to SEQ ID NO: 1531

SEQ ID NO: 1533 - protein, 137 aa, Homo sapiens; identical to SEQ ID NO: 1531

SEQ ID NO: 1534 - protein, 55 aa, Homo sapiens
MENVCEKVTNSVSSELQPYFQTLPVMTKIDSVAGINYGLVAPPATTAETLDVQMK

SEQ ID NO: 1535 - protein, 286 aa, Homo sapiens
MENVCEKVTNSVSSELQPYFQTLPVMTKIDSVAGINYGLVAPPATTAETLDVQMKGEFYSENHHNPPPFAPPVMEFPAAHDRMVYLGLSDYFFNTAGLVYQEAGVLKMTLRDDMIPKESKFRLTTKFFGTFLPEVAKKFPNMKIQIHVSASTPPHLSVQPTGLTFYPAVDVQAFAVLPNSSLASLFLIGMHTTGSMEVSAESNRLVGELKLDRLLLELKHSNIGPFPVELLQDIMNYIVPILVLPRVNEKLQKGFPLPTPARVQLYNVVLQPHQNFLLFGADVVYK

SEQ ID NO: 1536 - protein, 487 aa, Homo sapiens
MRENMARGPCNAPRWASLMVLVAIGTAVTAAVNPGVVVRISQKGLDYASQQGTAALQKELKRIKIPDYSDSFKIKHLGKGHYSFYSMDIREFQLPSSQISMVPNVGLKFSISNANIKISGKWKAQKRFLKMSGNFDLSIEGMSISADLKLGSNPTSGKPTITCSSCSSHINSVHVHISKSKVGWLIQLFHKKIESALRNKMNSQVCEKVTNSVSSELQPYFQTLPVMTKIDSVAGINYGLVAPPATTAETLDVQMKGEFYSENHHNPPPFAPPVMEFPAAHDRMVYLGLSDYFFNTAGLVYQEAGVLKMTLRDDMIPKESKFRLTTKFFGTFLPEVAKKFPNMKIQIHVSASTPPHLSVQPTGLTFYPAVDVQAFAVLPNSSLASLFLIGMHTTGSMEVSAESNRLVGELKLDRLLLELKHSNIGPFPVELLQDIMNYIVPILVLPRVNEKLQKGFPLPTPARVQLYNVVLQPHQNFLLFGADVVYK

SEQ ID NO: 1537 - protein, 261 aa, Homo sapiens
MTKIDSVAGINYGLVAPPATTAETLDVQMKGEFYSENHHNPPPFAPPVMEFPAAHDRMVYLGLSDYFFNTAGLVYQEAGVLKMTLRDDMIPKESKFRLTTKFFGTFLPEVAKKFPNMKIQIHVSASTPPHLSVQPTGLTFYPAVDVQAFAVLPNSSLASLFLIGMHTTGSMEVSAESNRLVGELKLDRLLLELKHSNIGPFPVELLQDIMNYIVPILVLPRVNEKLQKGFPLPTPARVQLYNVVLQPHQNFLLFGADVVYK

SEQ ID NO: 1538 - protein, 242 aa, Homo sapiens
MFQTGGLIVFYGLLAQTLPLNVNPALPLSPTGLAGSLTNALSNGLLSGGLLGILENLPLLDILKPGGGTSGGLLGGLLGKVTSVIPGLNNIIDIKVTDPQLLELGLVQSPDGHRLYVTIPLGIKLQVNTPLVGASLLRLAVKLDITAEILAVRDKQERIHLVLGDCTHSPGSLQISLLDGLGPLPIQGLLDSLTGILNKVLPELVQGNVCPLVNEVLRGLDITLVHDIVNMLIHGLQFVIKV

SEQ ID NO: 1539 - protein, 256 aa, Homo sapiens
MFQTGGLIVFYGLLAQTMAQFGGLPVPLDQTLPLNVNPALPLSPTGLAGSLTNALSNGLLSGGLLGILENLPLLDILKPGGGTSGGLLGGLLGKVTSVIPGLNNIIDIKVTDPQLLELGLVQSPDGHRLYVTIPLGIKLQVNTPLVGASLLRLAVKLDITAEILAVRDKQERIHLVLGDCTHSPGSLQISLLDGLGPLPIQGLLDSLTGILNKVLPELVQGNVCPLVNEVLRGLDITLVHDIVNMLIHGLQFVIKV

SEQ ID NO: 1540 - protein, 256 aa, Homo sapiens; identical to SEQ ID NO: 1539

SEQ ID NO: 1541 - protein, 256 aa, Homo sapiens; identical to SEQ ID NO: 1539

SEQ ID NO: 1542 - protein, 249 aa, Homo sapiens
MLQLWKLVLLCGVLTGTSESLLDNLGNDLSNVVDKLEPVLHEGLETVDNTLKGILEKLKVDLGVLQKSSAWQLAKQKAQEAEKLLNNVISKLLPTNTDIFGLKISNSLILDVKAEPIDDGKGLNLSFPVTANVTVAGPIIGQIINLKASLDLLTAVTIETDPQTHQPVAVLGECASDPTSISLSLLDKHSQIINKFVNSVINTLKSTVSSLLQKEICPLIRIFIHSLDVNVIQQVVDNPQHKTQLQTLI

SEQ ID NO: 1543 - protein, 249 aa, Homo sapiens; identical to SEQ ID NO: 1542

SEQ ID NO: 1544 - protein, 218 aa, Homo sapiens
MMCPLWRLLIFLGLLALPLAPHKQPWPGLAQAHRDNKSTLARIIAQGLIKHNAESRIQNIHFGDRLNASAQVAPGLVGWLISGRKHQQQQESRSFDNNIVKMCAHMSIVVEFWLEKDEFGRRDLVIGKCDAEPSSVHVAILTEAIPPKMNQFLYNLKENLQKVLPHMVESQVCPLIGEILGQLDVKLLKSLIEQEAAHEPTHHETSQPSACQAGESPS

SEQ ID NO: 1545 - protein, 254 aa, Homo sapiens
MMCPLWRLLIFLGLLALPLAPHKQPWPGLAQAHRDNKSTLARIIAQGLIKHNAESRIQNIHFGDRLNASAQVAPGLVGWLISGRKHQQQQESSINITNIQLDCGGIQISFHKEWFSANISLEFDLELRPSFDNNIVKMCAHMSIVVEFWLEKDEFGRRDLVIGKCDAEPSSVHVAILTEAIPPKMNQFLYNLKENLQKVLPHMVESQVCPLIGEILGQLDVKLLKSLIEQEAAHEPTHHETSQPSACQAGESPS

SEQ ID NO: 1546 - protein, 147 aa, Homo sapiens
MAGPWTFTLLCGLLAATLIQATLSPTAVLILGPKVIKEKLTQELKDHNATSILQQLPLLSAMREKPAGGIPVLGSLVNTVLKHIIWLKVITANILQLQVKPSANDQELLVKIPLDMVAGFNTPLVKTIVEFHMTTEAQATIRMDTSA

SEQ ID NO: 1547 - protein, 484 aa, Homo sapiens
MAGPWTFTLLCGLLAATLIQATLSPTAVLILGPKVIKEKLTQELKDHNATSILQQLPLLSAMREKPAGGIPVLGSLVNTVLKHIIWLKVITANILQLQVKPSANDQELLVKIPLDMVAGFNTPLVKTIVEFHMTTEAQATIRMDTSASGPTRLVLSDCATSHGSLRIQLLHKLSFLVNALAKQVMNLLVPSLPNLVKNQLCPVIEASFNGMYADLLQLVKVPISLSIDRLEFDLLYPAIKGDTIQLYLGAKLLDSQGKVTKWFNNSAASLTMPTLDNIPFSLIVSQDVVKAAVAAVLSPEEFMVLLDSVLPESAHRLKSSIGLINEKAADKLGSTQIVKILTQDTPEFFIDQGHAKVAQLIVLEVFPSSEALRPLFTLGIEASSEAQFYTKGDQLILNLNNISSDRIQLMNSGIGWFQPDVLKNIITEIIHSILLPNQNGKLRSGVPVSLVKALGFEAAESSLTKDALVLTPASLWKPSSPVSQ

SEQ ID NO: 1548 - protein, 458 aa, Homo sapiens
MAWASRLGLLLALLLPVVGASTPGTVVRLNKAALSYVSEIGKAPLQRALQVTVPHFLDWSGEALQPTRIRILNVHVPRLHLKFIAGFGVRLLAAANFTFKVFRAPEPLELTLPVELLADTRVTQSSIRTPVVSISACSLFSGHANEFDGSNSTSHALLVLVQKHIKAVLSNKLCLSISNLVQGVNVHLGTLIGLNPVGPESQIRYSMVSVPTVTSDYISLEVNAVLFLLGKPIILPTDATPFVLPRHVGTEGSMATVGLSQQLFDSALLLLQKAGALNLDITGQLRSDDNLLNTSALGRLIPEVARQFPEPMPVVLKVRLGATPVAMLHTNNATLRLQPFVEVLATASNSAFQSLFSLDVVVNLRLQLSVSKVKLQGTTSVLGDVQLTVASSNVGFIDTDQVRTLMGTVFEKPLLDHLNALLAMGIALPGVVNLHYVAPEIFVYEGYVVISSGLFYQS

SEQ ID NO: 1549 - protein, 476 aa, Homo sapiens
MQPVMLALWSLLLLWGLATPCQELLETVGTLARIDKDELGKAIQNSLVGEPILQNVLGSVTAVNRGLLGSGGLLGGGGLLGHGGVFGVVEELSGLKIEELTLPKVLLKLLPGFGVQLSLHTKVGMHCSGPLGGLLQLAAEVNVTSRVALAVSSRGTPILILKRCSTLLGHISLFSGLLPTPLFGVVEQMLFKVLPGLLCPVVDSVLGVVNELLGAVLGLVSLGALGSVEFSLATLPLISNQYIELDINPIVKSVAGDIIDFPKSRAPAKVPPKKDHTSQVMVPLYLFNTTFGLLQTNGALDMDITPELVPSDVPLTTTDLAALLPEALGKLPLHQQLLLFLRVREAPTVTLHNKKALVSLPANIHVLFYVPKGTPESLFELNSVMTVRAQLAPSATKLHISLSLERLSVKVASSFTHAFDGSRLEEWLSHVVGAVYAPKLNVALDVGIPLPKVLNINFSNSVLEIVENAVVLTVAS

SEQ ID NO: 1550 - protein, 614 aa, Homo sapiens
MWMAWCVAALSVVAVCGTSHETNTVLRVTKDVLSNAISGMLQQSDALHSALREVPLGVGDIPYNDFHVRGPPPVYTNGKKLDGIYQYGHIETNDNTAQLGGKYRYGEILESEGSIRDLRNSGYRSAENAYGGHRGLGRYRAAPVGRLHRRELQPGEIPPGVATGAVGPGGLLGTGGMLAADGILAGQGGLLGGGGLLGDGGLLGGGGVLGVLGEGGILSTVQGITGLRIVELTLPRVSVRLLPGVGVYLSLYTRVAINGKSLIGFLDIAVEVNITAKVRLTMDRTGYPRLVIERCDTLLGGIKVKLLRGLLPNLVDNLVNRVLADVLPDLLCPIVDVVLGLVNDQLGLVDSLIPLGILGSVQYTFSSLPLVTGEFLELDLNTLVGEAGGGLIDYPLGWPAVSPKPMPELPPMGDNTKSQLAMSANFLGSVLTLLQKQHALDLDITNGMFEELPPLTTATLGALIPKVFQQYPESCPLIIRIQVLNPPSVMLQKDKALVKVLATAEVMVSQPKDLETTICLIDVDTEFLASFSTEGDKLMIDAKLEKTSLNLRTSNVGNFDIGLMEVLVEKIFDLAFMPAMNAVLGSGVPLPKILNIDFSNADIDVLEDLLVLSA

SEQ ID NO: 1551 - protein, 44 aa, Homo sapiens
MWMAWCVAALSVVAVCGTSHETNTVLRVTKDVLSNGFSPISWTI

SEQ ID NO: 1552 - protein, 453 aa, Homo sapiens
MLRILCLALCSLLTGTRADPGALLRLGMDIMNQVQSAMDESHILEKMAAEAGKKQPGMKPIKGITNLKVKDVQLPVITLNFVPGVGIFQCVSTGMTVTGKSFMGGNMEIIVALNITATNRLLRDEETGLPVFKSEGCEVILVNVKTNLPSNMLPKMVNKFLDSTLHKVLPGLMCPAIDAVLVYVNRKWTNLSDPMPVGQMGTVKYVLMSAPATTASYIQLDFSPVVQQQKGKTIKLADAGEALTFPEGYAKGSSQLLLPATFLSAELALLQKSFHVNIQDTMIGELPPQTTKTLARFIPEVAVAYPKSKPLTTQIKIKKPPKVTMKTGKSLLHLHSTLEMFAARWRSKAPMSLFLLEVHFNLKVQYSVHENQLQMATSLDRLLSLSRKSSSIGNFNERELTGFITSYLEEAYIPVVNDVLQVGLPLPDFLAMNYNLAELDIVENALMLDLKLG

SEQ ID NO: 1553 - protein, 88 aa, Homo sapiens
MLRILCLALCSLLTGTRADPGALLRLGMDIMNREVQSAMDESHILEKMAAEAGKKQPGMKPIKGITNEQGHFEEEMRLESQISTLHAT

SEQ ID NO: 1554 - protein, 82 aa, Homo sapiens
MCTKTIPVLWGCFLLWNLYVSSSQTIYPGIKARITQRALDYGVQAGMKMIEQMLKEKKLPDLSGSESLEFLKVDYVNYNFSK

SEQ ID NO: 1555 - protein, 507 aa, Homo sapiens
MCTKTIPVLWGCFLLWNLYVSSSQTIYPGIKARITQRALDYGVQAGMKMIEQMLKEKKLPDLSGSESLEFLKVDYVNYNFSNIKISAFSFPNTSLAFVPGVGIKALTNHGTANISTDWGFESPLFQDTGGADLFLSGVYFTGIIILTRNDFGHPTLKLQDCYAQLSHAHVSFSGELSVLYNSFAEPMEKPILKNLNEMLCPIIASEVKALNANLSTLEVLTKIDNYTLLDYSLISSPEITENYLDLNLKGVFYPLENLTDPPFSPVPFVLPERSNSMLYIGIAEYFFKSASFAHFTAGVFNVTLSTEEISNHFVQNSQGLGNVLSRIAEIYILSQPFMVRIMATEPPIINLQPGNFTLDIPASIMMLTQPKNSTVETIVSMDFVASTSVGLVILGQRLVCSLSLNRFRLALPESNRSNIEVLRFENILSSILHFGVLPLANAKLQQGFPLSNPHKFLFVNSDIEVLEGFLLISTDLKYETSSKQQPSFHVWEGLNLISRQWRGKSAP

SEQ ID NO: 1556 - protein, 507 aa, Homo sapiens; identical to SEQ ID NO: 1555

SEQ ID NO: 1557 - protein, 264 aa, Homo sapiens
MEKPILKNLNEMLCPIIASEVKALNANLSTLEVLTKIDNYTLLDYSLISSPEITENYLDLNLKGVFYPLENLTDPPFSPVPFVLPERSNSMLYIGIAEYFFKSASFAHFTAGVFNVTLSTEEISNHFVQNSQGLGNVLSRVASTSVGLVILGQRLVCSLSLNRFRLALPESNRSNIEVLRFENILSSILHFGVLPLANAKLQQGFPLSNPHKFLFVNSDIEVLEGFLLISTDLKYETSSKQQPSFHVWEGLNLISRQWRGKSAP

SEQ ID NO: 1558 - protein, 64 aa, Homo sapiens
MAVSRHLTRGRKMAHVIAACLYLVCRTEGTPHMLLDLSDLLQVNVYVLGKTFLLLARELCINAP

SEQ ID NO: 1559 - protein, 562 aa, Homo sapiens
MAVSRHLTRGRKMAHVIAACLYLVCRTEGTPHMLLDLSDLLQVNVYVLGKTFLLLARELCINAPAIDPCLYIPRFAHLLEFGEKNHEVSMTALRLLQRMKRDWMHTGRRPSGLCGAALLVAARMHDFRRTVKEVISVVKVCESTLRKRLTEFEDTPTSQLTIDEFMKIDLEEECDPPSYTAGQRKLRMKQLEQVLSKKLEEVEGEISSYQDAIEIELENSRPKAKGGLASLAKDGSTEDTASSLCGEEDTEDEELEAAASHLNKDLYRELLGGAPGSSEAAGSPEWGGRPPALGSLLDPLPTAASLGISDSIRECISSQSSDPKDASGDGELDLSGIDDLEIDRYILNESEARVKAELWMRENAEYLREQREKEARIAKEKELGIYKEHKPKKSCKRREPIQASTAREAIEKMLEQKKISSKINYSVLRGLSSAGGGSPHREDAQPEHSASARKLSRRRTPASRSGADPVTSVGKRLRPLVSTQPAKKVATGEALLPSSPTLGAEPARPQAVLVESGPVSYHADEEADEEEPDEEDGEPCVSALQMMGSNDYGCDGDEDDGY

SEQ ID NO: 1560 - protein, 584 aa, Homo sapiens
MAVSRHLTRGRKMAHVIAACLYLVCRTEGTPHMLLDLSDLLQVNVYVLGKTFLLLARELCINAPAIDPCLYIPRFAHLLEFGEKNHEVSMTALRLLQRMKRDWMHTGRRPSGLCGAALLVAARMHDFRRTVKEVISVVKVCESTLRKRLTEFEDTPTSQLTIDEFMKIDLEEECDPPSYTAGQRKLRMKQLEQVLSKKLEEVEGEISSYQDAIEIELENSRPKAKGGLASLAKDGSTEDTASSLCGEEDTEDEELEAAASHLNKDLYRELLGGAPGSSEAAGSPEWGGRPPALGSLLDPLPTAASLGISDSIRECISSQSSDPKDASGDGELDLSGIDDLEIDRRDLSMPRCAKAKSQPHFPVLAQYILNESEARVKAELWMRENAEYLREQREKEARIAKEKELGIYKEHKPKKSCKRREPIQASTAREAIEKMLEQKKISSKINYSVLRGLSSAGGGSPHREDAQPEHSASARKLSRRRTPASRSGADPVTSVGKRLRPLVSTQPAKKVATGEALLPSSPTLGAEPARPQAVLVESGPVSYHADEEADEEEPDEEDGEPCVSALQMMGSNDYGCDGDEDDGY

SEQ ID NO: 1561 - protein, 439 aa, Homo sapiens
MHDFRRTVKEVISVVKVCESTLRKRLTEFEDTPTSQLTIDEFMKIDLEEECDPPSYTAGQRKLRMKQLEQVLSKKLEEVEGEISSYQDAIEIELENSRPKAKGGLASLAKDGSTEDTASSLCGEEDTEDEELEAAASHLNKDLYRELLGGAPGSSEAAGSPEWGGRPPALGSLLDPLPTAASLGISDSIRECISSQSSDPKDASGDGELDLSGIDDLEIDRYILNESEARVKAELWMRENAEYLREQREKEARIAKEKELGIYKEHKPKKSCKRREPIQASTAREAIEKMLEQKKISSKINYSVLRGLSSAGGGSPHREDAQPEHSASARKLSRRRTPASRSGADPVTSVGKRLRPLVSTQPAKKVATGEALLPSSPTLGAEPARPQAVLVESGPVSYHADEEADEEEPDEEDGEPCVSALQMMGSNDYGCDGDEDDGY

SEQ ID NO: 1562 - protein, 14 aa, Homo sapiens
MTALRLLQRMKRDW

SEQ ID NO: 1563 - protein, 45 aa, Homo sapiens
MTALRLLQRMKRDWMHTGRRPSGLCGAALLVAARMHDFRRTVKEV

SEQ ID NO: 1564 - protein, 134 aa, Homo sapiens [sequence omitted]

SEQ ID NO: 1565 - protein, 184 aa, Homo sapiens
MTALRLLQRMKRDWMHTGRRPSGLCGAALLVAARMHDFRRTVKEVISVVKVCESTLRKRLTEFEDTPTSQLTIDEFMKIDLEEECDPPSYTAGQRKLRMKQLEQVLSKKLEEVEGEISSYQDAIEIELENSPPSRREGRRRPESLPRPLRGKAPVPLVGGLSSGMAAPDVAEGASPCVLRRGWP

SEQ ID NO: 1566 - protein, 155 aa, Homo sapiens
MTALRLLQRMKRDWMHTGRRPSGLCGAALLVAARMHDFRRTVKEVISVVKVCESTLRKRLTEFEDTPTSQLTIDEFMKIDLEEECDPPSYTAGQRKLRMKQLEQVLSKKLEEVEGEISSYQDAIEIELENSRPKAKGGLASLAKDGSTEDTASSL

SEQ ID NO: 1567 - protein, 234 aa, Homo sapiens
MTALRLLQRMKRDWMHTGRRPSGLCGAALLVAARMHDFRRTVKEVISVVKVCESTLRKRLTEFEDTPTSQLTIDEFMKIDLEEECDPPSYTAGQRKLRMKQLEQVLSKKLEEVEGEISSYQDAIEIELENSRPKAKGGLASLAKDGSTEDTASSLCGEEDTEDEELEAAASHLNKDLYRELLGGAPGSSEAAGSPEWGGRPPALGSLLDPLPTAASLGISDSIRECISSQSSDP

SEQ ID NO: 1568 - protein, 473 aa, Homo sapiens
MTALRLLQRMKRDWMHTGRRPSGLCGAALLVAARMHDFRRTVKEVISVVKVCESTLRKRLTEFEDTPTSQLTIDEFMKIDLEEECDPPSYTAGQRKLRMKQLEQVLSKKLEEVEGEISSYQDAIEIELENSRPKAKGGLASLAKDGSTEDTASSLCGEEDTEDEELEAAASHLNKDLYRELLGGAPGSSEAAGSPEWGGRPPALGSLLDPLPTAASLGISDSIRECISSQSSDPKDASGDGELDLSGIDDLEIDRYILNESEARVKAELWMRENAEYLREQREKEARIAKEKELGIYKEHKPKKSCKRREPIQASTAREAIEKMLEQKKISSKINYSVLRGLSSAGGGSPHREDAQPEHSASARKLSRRRTPASRSGADPVTSVGKRLRPLVSTQPAKKVATGEALLPSSPTLGAEPARPQAVLVESGPVSYHADEEADEEEPDEEDGEPCVSALQMMGSNDYGCDGDEDDGY

SEQ ID NO: 1569 - protein, 161 aa, Homo sapiens
MTALRLLQRMKRDWMHTGRRPSGLCGAALLVAARMHDFRRTVKEVISVVKVCESTLRKRLTEFEDTPTSQLTIDEFMKIDLEEECDPPSYTAGQRKLRMKQLEQVLSKKLEEVEGEISSYQDAIEIELENSRPKAPHRGGRADGGPRASPGLFVGRPQYHS

SEQ ID NO: 1570 - protein, 208 aa, Homo sapiens
MTGRVCRGCGGTDIELDAARGDAVCTACGSVLEDNIIVSEVQFVESSGGGSSAVGQFVSLDGAGKTPTLGGGFHVNLGKESRAQTLQNGRRHIHHLGNQLQLNQHCLDTAFNFFKMAVSRHLTRGRKMAHVIAACLYLVCRTEGTPHMLLDLSDLLQVDSLRPASFPTWGCDLGVVTRVVTGVYPRCLHASQWPVCAACPVRKFWSVG

SEQ ID NO: 1571 - protein, 677 aa, Homo sapiens
MTGRVCRGCGGTDIELDAARGDAVCTACGSVLEDNIIVSEVQFVESSGGGSSAVGQFVSLDGAGKTPTLGGGFHVNLGKESRAQTLQNGRRHIHHLGNQLQLNQHCLDTAFNFFKMAVSRHLTRGRKMAHVIAACLYLVCRTEGTPHMLLDLSDLLQVNVYVLGKTFLLLARELCINAPAIDPCLYIPRFAHLLEFGEKNHEVSMTALRLLQRMKRDWMHTGRRPSGLCGAALLVAARMHDFRRTVKEVISVVKVCESTLRKRLTEFEDTPTSQLTIDEFMKIDLEEECDPPSYTAGQRKLRMKQLEQVLSKKLEEVEGEISSYQDAIEIELENSRPKAKGGLASLAKDGSTEDTASSLCGEEDTEDEELEAAASHLNKDLYRELLGGAPGSSEAAGSPEWGGRPPALGSLLDPLPTAASLGISDSIRECISSQSSDPKDASGDGELDLSGIDDLEIDRYILNESEARVKAELWMRENAEYLREQREKEARIAKEKELGIYKEHKPKKSCKRREPIQASTAREAIEKMLEQKKISSKINYSVLRGLSSAGGGSPHREDAQPEHSASARKLSRRRTPASRSGADPVTSVGKRLRPLVSTQPAKKVATGEALLPSSPTLGAEPARPQAVLVESGPVSYHADEEADEEEPDEEDGEPCVSALQMMGSNDYGCDGDEDDGY

SEQ ID NO: 1572 - protein, 650 aa, Homo sapiens
MTGRVCRGCGGTDIELDAARGDAVCTACGSVLEDNIIVSEVQFVESSGGGSSAVGQFVSLDGRRHIHHLGNQLQLNQHCLDTAFNFFKMAVSRHLTRGRKMAHVIAACLYLVCRTEGTPHMLLDLSDLLQVNVYVLGKTFLLLARELCINAPAIDPCLYIPRFAHLLEFGEKNHEVSMTALRLLQRMKRDWMHTGRRPSGLCGAALLVAARMHDFRRTVKEVISVVKVCESTLRKRLTEFEDTPTSQLTIDEFMKIDLEEECDPPSYTAGQRKLRMKQLEQVLSKKLEEVEGEISSYQDAIEIELENSRPKAKGGLASLAKDGSTEDTASSLCGEEDTEDEELEAAASHLNKDLYRELLGGAPGSSEAAGSPEWGGRPPALGSLLDPLPTAASLGISDSIRECISSQSSDPKDASGDGELDLSGIDDLEIDRYILNESEARVKAELWMRENAEYLREQREKEARIAKEKELGIYKEHKPKKSCKRREPIQASTAREAIEKMLEQKKISSKINYSVLRGLSSAGGGSPHREDAQPEHSASARKLSRRRTPASRSGADPVTSVGKRLRPLVSTQPAKKVATGEALLPSSPTLGAEPARPQAVLVESGPVSYHADEEADEEEPDEEDGEPCVSALQMMGSNDYGCDGDEDDGY

SEQ ID NO: 1573 - protein, 185 aa, Homo sapiens
  SITE 1: note = misc_feature - Xaa can be any naturally occurring amino acid
XGQFVSLDGAGKTPTLGGGFHVNLGKESRAQTLQNDPCLYIPRFAHLLEFGEKNHEVSMTALRLLQRMKRDWMHTGRRPSGLCGAALLVAARMHDFRRTVKEVISVVKVCESTLRKRLTEFEDTPTSQLTIDEFMKIDLEEECDPPSYTAGQRKLRMKQLEQVLSKKLEEVEGEISSYQDAIEIE

SEQ ID NO: 1574 - protein, 761 aa, Homo sapiens
MNWRFVELLYFLFIWGRISVQPSHQEPAGTDQHVSKEFDWLISDRGPFHHSRSYLSFVERHRQGFTTRYKIYREFARWKVRNTAIERRDLVRHPVPLMPEFQRSIRLLGRRPTTQQFIDTIIKKYGTHLLISATLGGEEALTMYMDKSRLDRKSGNATQSVEALHQLASSYFVDRDGTMRRLHEIQISTGAIKVTETRTGPLGCNSYDNLDSVSSVLLQSTESKLHLQGLQIIFPQYLQEKFVQSALSYIMCNGEGEYLCQNSQCRCQCAEEFPQCNCPITDIQIMEYTLANMAKSWAEAYKDLENSDEFKSFMKRLPSNHFLTIGSIHQHWGNDWDLQNRYKLLQSATEAQRQKIQRTARKLFGLSVRCRHNPNHQLPRERTIQQWLARVQSLLYCNENGFWGTFLESQRSCVCHGSTTLCQRPIPCVIGGNNSCAMCSLANISLCGSCNKGYKLYRGRCEPQNVDSERSEQFISFETDLDFQDLELKYLLQKMDSRLYVHTTFISNEIRLDTFFDPRWRKRMSLTLKSNKNRMDFIHMVIGMSMRICQMRNSSLDPMFFVYVNPFSGSHSEGWNMPFGEFGYPRWEKIRLQNSQCYNWTLLLGNRWKTFFETVHIYLRSRTRLPTLLRNETGQGPVDLSDPSKRQFYIKISDVQVFGYSLRFNADLLRSAVQQVNQSYTQGGQFYSSSSVMLLLLDIRDRINRLAPPVAPGKPQLDLFSCMLKHRLKLTNSEIIRVNHALDLYNTEILKQSDQMTAKLC

SEQ ID NO: 1575 - protein, 320 aa, Homo sapiens
MNWRFVELLYFLFIWGRISVQPSHQEPAGTDQHVSKEFDWLISDRGPFHHSRSYLSFVERHRQGFTTRYKIYREFARWKVRNTAIERRDLVRHPVPLMPEFQRSIRLLGRRPTTQQFIDTIIKKYGTHLLISATLGGEEALTMYMDKSRLDRKSGNATQSVEALHQLASSYFVDRDGTMRRLHEIQISTGAIKVTETRTGPLGCNSYDNLDSVSSVLLQSTESKLHLQGLQIIFPQYLQEKFVQSALSYIMCNGEGEYLCQNSQCRCQCAEEFPQCNCPITDIQIMEYTLANMAKSWAEAYKDLENSGRESHSVPLHEWP

SEQ ID NO: 1576 - protein, 783 aa, Homo sapiens
MRWQCGTRFRGLRPAVAPWTALLALGLPGWVLAVSATAAAVVPEQHASVAGQHPLDWLLTDRGPFHRAQEYADFMERYRQGFTTRYRIYREFARWKVNNLALERKDFFSLPLPLAPEFIRNIRLLGRRPNLQQVTENLIKKYGTHFLLSATLGGEESLTIFVDKQKLGRKTETTGGASIIGGSGNSTAVSLETLHQLAASYFIDRESTLRRLHHIQIATGAIKVTETRTGPLGCSNYDNLDSVSSVLVQSPENKVQLLGLQVLLPEYLRERFVAAALSYITCSSEGELVCKENDCWCKCSPTFPECNCPDADIQAMEDSLLQIQDSWATHNRQFEESEEFQALLKRLPDDRFLNSTAISQFWAMDTSLQHRYQQLGAGLKVLFKKTHRILRRLFNLCKRCHRQPRFRLPKERSLSYWWNRIQSLLYCGESTFPGTFLEQSHSCTCPYDQSSCQGPIPCALGEGPACAHCAPDNSTRCGSCNPGYVLAQGLCRPEVAESLENFLGLETDLQDLELKYLLQKQDSRIEVHSIFISNDMRLGSWFDPSWRKRMLLTLKSNKYKPGLVHVMLALSLQICLTKNSTLEPVMAIYVNPFGGSHSESWFMPVNEGSFPDWERTNVDAAAQCQNWTITLGNRWKTFFETVHVYLRSRIKSLDDSSNETIYYEPLEMTDPSKNLGYMKINTLQVFGYSLPFDPDAIRDLILQLDYPYTQGSQDSALLQLIELRDRVNQLSPPGKVRLDLFSCLLRHRLKLANNEVGRIQSSLRAFNSKLPNPVEYETGKLCS

SEQ ID NO: 1577 - protein, 28 aa, Homo sapiens
MIWRSRAGAELFSLMALWEWIALSLHCW

SEQ ID NO: 1578 - protein, 158 aa, Homo sapiens
MIWRSRAGAELFSLMALWEWIALSLHCWVLAVAAVSDQHATSPFDWLLSDKGPFHRSQEYTDFVDRSRQGFSTRYKIYREFGRWKVNNLAVERRNFLGSPLPLAPEFFRNIRLLGRRPTLQQITENLIKKYGTHFLLSATLGGEESLTIFVDKRKLSK

SEQ ID NO: 1579 - protein, 766 aa, Homo sapiens
MIWRSRAGAELFSLMALWEWIALSLHCWVLAVAAVSDQHATSPFDWLLSDKGPFHRSQEYTDFVDRSRQGFSTRYKIYREFGRWKVNNLAVERRNFLGSPLPLAPEFFRNIRLLGRRPTLQQITENLIKKYGTHFLLSATLGGEESLTIFVDKRKLSKRAEGSDSTTNSSSVTLETLHQLAASYFIDRDSTLRRLHHIQIASTAIKVTETRTGPLGCSNYDNLDSVSSVLVQSPENKIQLQGLQVLLPDYLQERFVQAALSYIACNSEGEFICKENDCWCHCGPKFPECNCPSMDIQAMEENLLRITETWKAYNSDFEESDEFKLFMKRLPMNYFLNTSTIMHLWTMDSNFQRRYEQLENSMKQLFLKAQKIVHKLFSLSKRCHKQPLISLPRQRTSTYWLTRIQSFLYCNENGLLGSFSEETHSCTCPNDQVVCTAFLPCTVGDASACLTCAPDNRTRCGTCNTGYMLSQGLCKPEVAESTDHYIGFETDLQDLEMKYLLQKTDRRIEVHAIFISNDMRLNSWFDPSWRKRMLLTLKSNKYKSSLVHMILGLSLQICLTKNSTLEPVLAVYVNPFGGSHSESWFMPVNENSFPDWERTKLDLPLQCYNWTLTLGNKWKTFFETVHIYLRSRIKSNGPNGNESIYYEPLEFIDPSRNLGYMKINNIQVFGYSMHFDPEAIRDLILQLDYPYTQGSQDSALLQLLEIRDRVNKLSPPGQRRLDLFSCLLRHRLKLSTSEVVRIQSALQAFNAKLPNTMDYDTTKLCS

SEQ ID NO: 1580 - protein, 385 aa, Homo sapiens
MAAALFVLLGFALLGTHGASGAAGFVQAPLSQQRWVGGSVELHCEAVGSPVPEIQWWFEGQGPNDTCSQLWDGARLDRVHIHATYHQHAASTISIDTLVEEDTGTYECRASNDPDRNHLTRAPRVKWVRAQAVVLVLEPGTVFTTVEDLGSKILLTCSLNDSATEVTGHRWLKGGVVLKEDALPGQKTEFKVDSDDQWGEYSCVFLPEPMGTANIQLHGPPRVKAVKSSEHINEGETAMLVCKSESVPPVTDWAWYKITDSEDKALMNGSESRFFVSSSQGRSELHIENLNMEADPGQYRCNGTSSKGSDQAIITLRVRSHLAALWPFLGIVAEVLVLVTIIFIYEKRRKPEDVLDDDDAGSAPLKSSGQHQNDKGKNVRQRNSS

SEQ ID NO: 1581 - protein, 55 aa, Homo sapiens
MAAALFVLLGFALLGTHGASGAAGTVFTTVEDLGSKILLTCSLNDSATEQRAAPE

SEQ ID NO: 1582 - protein, 132 aa, Homo sapiens
MAAALFVLLGFALLGTHGASGAAGTVFTTVEDLGSKILLTCSLNDSATEVTGHRWLKGGVVLKEDALPGQKTEFKAPTRPSSRSACAATWPPSGPSWASWLRCWCWSPSSSSTRSAGSPRTSWMMTTPALHP

SEQ ID NO: 1583 - protein, 269 aa, Homo sapiens
MAAALFVLLGFALLGTHGASGAAGTVFTTVEDLGSKILLTCSLNDSATEVTGHRWLKGGVVLKEDALPGQKTEFKVDSDDQWGEYSCVFLPEPMGTANIQLHGPPRVKAVKSSEHINEGETAMLVCKSESVPPVTDWAWYKITDSEDKALMNGSESRFFVSSSQGRSELHIENLNMEADPGQYRCNGTSSKGSDQAIITLRVRSHLAALWPFLGIVAEVLVLVTIIFIYEKRRKPEDVLDDDDAGSAPLKSSGQHQNDKGKNVRQRNSS

SEQ ID NO: 1584 - protein, 161 aa, Homo sapiens [sequence omitted]

SEQ ID NO: 1585 - protein, 189 aa, Homo sapiens
MAAALFVLLGFALLGTHGASGAGPPRVKAVKSSEHINEGETAMLVCKSESVPPVTDWAWYKITDSEDKALMNGSESRFFVSSSQGRSELHIENLNMEADPGQYRCNGTSSKGSDQAIITLRVRSHLAALWPFLGIVAEVLVLVTIIFIYEKRRKPEDVLDDDDAGSAPLKSSGQHQNDKGKNVRQRNSS

SEQ ID NO: 1586 - protein, 221 aa, Homo sapiens
MAAALFVLLGFALLGTHGASGAVFTTVEDLGSKILLTCSLNDSATEVTGHRWLKGGVVLKEDALPGQKTEFKVDSDDQWGEYSCVFLPEPMGTANIQLHGPPRVKAVKSSEHINEGETAMLVCKSESVPPVTDWAWYKITDSEDKALMNGSESRFFVSSSQGRSELHIENLNMEADPGQYRCNGTSSKGSDQAIITLRVRSHLAALWPFLGIVAEVLVLVT

SEQ ID NO: 1587 - protein, 52 aa, Homo sapiens
MGTANIQLHGPPRVKAVKSSEHINEGETAMLVCKSESVPPVTDWAWYKITDS

SEQ ID NO: 1588 - protein, 84 aa, Homo sapiens
MGTANIQLHGPPRVKAVKSSEHINEGETAMLVCKSESVPPVTDWAWYKITDSEDKALMNGSESRFFVSSSQGRSELHIENLNME

SEQ ID NO: 1589 - protein, 176 aa, Homo sapiens
MGTANIQLHGPPRVKAVKSSEHINEGETAMLVCKSESVPPVTDWAWYKITDSEDKALMNGSESRFFVSSSQGRSELHIENLNMEADPGQYRCNGTSSKGSDQAIITLRVRSHLAALWPFLGIVAEVLVLVTIIFIYEKRRKPEDVLDDDDAGSAPLKSSGQHQNDKGKNVRQRNSS

SEQ ID NO: 1590 - protein, 205 aa, Homo sapiens
MKQSDASPQERVDSDDQWGEYSCVFLPEPMGTANIQLHGPPRVKAVKSSEHINEGETAMLVCKSESVPPVTDWAWYKITDSEDKALMNGSESRFFVSSSQGRSELHIENLNMEADPGQYRCNGTSSKGSDQAIITLRVRSHLAALWPFLGIVAEVLVLVTIIFIYEKRRKPEDVLDDDDAGSAPLKSSGQHQNDKGKNVRQRNSS

SEQ ID NO: 1591 - protein, 132 aa, Homo sapiens
MGSLMLLFVETTRNSSACIFPVILNELSSTVETITHFPEVTDGECVFPFHYKNGTYYDCIKSKARHKWCSLNKTYEGYWKFCSAEDFANCVFPFWYRRLIYWECTDDGEAFGKKWCSLTKNFNKDRIWKYCE

SEQ ID NO: 1592 - protein, 155 aa, Homo sapiens
GLDYQSCPTSEDCENNPVDSFWKRASIQYSKDSSGVIHVMLNGSEPTGAYPIKGFFADYEIPNLQKEKITRIEIWVMHEIGGPNVESCGEGSMKVLEKRLKDMGFQYSCINDYRPVKLLQCVDHSTHPDCALKSPKRLCGTLGVRPRAEPYNRRF

SEQ ID NO: 1593 - protein, 318 aa, Homo sapiens
MAAQGCAASRLLQLLLQLLLLLLLLAAGGARARWRGEGTSAHLRDIFLGRCAEYRALLSPEQRNKNCTAIWEAFKVALDKDPCSVLPSDYDLFINLSRHSIPRDKSLFWENSHLLVNSFADNTRRFMPLSDVLYGRVADFLSWCRQKNDSGLDYQSCPTSEDCENNPVDSFWKRASIQYSKDSSGVIHVMLNGSEPTGAYPIKGFFADYEIPNLQKEKITRIEIWVMHEIGGPNVESCGEGSMKVLEKRLKDMGFQYSCINDYRPVKLLQCVDHSTHPDCALKSAAAATQRKAPSLYTEQRAGLIIPLFLVLASRTQL

SEQ ID NO: 1594 - protein, 333 aa, Homo sapiens
MAAQGCAASRLLQLLLQLLLLLLLLAAGGARARWRGEGTSAHLRDIFLGRCAEYRALLSPEQRQIRNSREPPVLHTTQNKNCTAIWEAFKVALDKDPCSVLPSDYDLFINLSRHSIPRDKSLFWENSHLLVNSFADNTRRFMPLSDVLYGRVADFLSWCRQKNDSGLDYQSCPTSEDCENNPVDSFWKRASIQYSKDSSGVIHVMLNGSEPTGAYPIKGFFADYEIPNLQKEKITRIEIWVMHEIGGPNVESCGEGSMKVLEKRLKDMGFQYSCINDYRPVKLLQCVDHSTHPDCALKSAAAATQRKAPSLYTEQRAGLIIPLFLVLASRTQL

SEQ ID NO: 1595 - protein, 97 aa, Homo sapiens
  SITE 1: note = misc_feature - Xaa can be any naturally occurring amino acid
XSEPTGAYPIKGFFADYEIPNLQKEKITRIEIWVMHEIGGPNVESCGEGSMKVLEKRLKDMGFQYSCINDYRPVKLLQCVDHSTHPDCALKSKLWEP

SEQ ID NO: 1596 - protein, 186 aa, Homo sapiens
  SITE 1: note = misc_feature - Xaa can be any naturally occurring amino acid
XSLFWENSHLLVNSFADNTRRFMPLSDVLYGRVADFLSWCRQKNDSGLDYQSCPTSEDCENNPVDSFWKRASIQYSKDSSGVIHVMLNGSEPTGAYPIKGFFADYEIPNLQKEKITRIEIWVMHEIGGPNVESCGEGSMKVLEKRLKDMGFQYSCINDYRPVKLLQCVDHSTHPDCALKSDGVSPC

SEQ ID NO: 1597 - protein, 478 aa, Homo sapiens
MPRRGYSKPGSWGSFWAMLTLVGLVTHAAQRADVGGEAAGTSINHSQAVLQRLQELLRQGNASDVVLRVQAAGTDEVRVFHAHRLLLGLHSELFLELLSNQSEAVLQEPQDCAAVFDKFIRYLYCGELTVLLTQAIPLHRLATKYGVSSLQRGVADYMRAHLAGGAGPAVGWYHYAVGTGDEALRESCLQFLAWNLSAVAASTEWGAVSPELLWQLLQRSDLVLQDELELFHALEAWLGRARPPPAVAERALRAIRYPMIPPAQLFQLQARSAALARHGPAVADLLLQAYQFHAASPLHYAKFFDVNGSAFLPRNYLAPAWGAPWVINNPARDDRSTSFQTQLGPSGHDAGRRVTWNVLFSPRWLPVSLRPVYADAAGTALPAARPEDGRPRLVVTPASSGGDAAGVSFQKTVLVGARQQGRLLVRHAYSFHQSSEEAGDFLAHADLQRRNSEYLVENALHLHLIVKPVYHTLIRTPK

SEQ ID NO: 1598 - protein, 179 aa, Homo sapiens
MAHAHIQGGRRAKSRFVVCIMSGARSKLALFLCGCYVVALGAHTGEESVADHHEAEYYVAAVYEHPSILSLNPLALISRQEALELMNQNLDIYEQQVMTAAQKDVQIIVFPEDGIHGFNFTRTSIYPFLDFMPSPQVVRWNPCLEPHRFNDTEVIPAFFLSRLRVHRGDLSQGPEAVTC

SEQ ID NO: 1599 - protein, 543 aa, Homo sapiens
MAHAHIQGGRRAKSRFVVCIMSGARSKLALFLCGCYVVALGAHTGEESVADHHEAEYYVAAVYEHPSILSLNPLALISRQEALELMNQNLDIYEQQVMTAAQKDVQIIVFPEDGIHGFNFTRTSIYPFLDFMPSPQVVRWNPCLEPHRFNDTEVLQRLSCMAIRGDMFLVANLGTKEPCHSSDPRCPKDGRYQFNTNVVFSNNGTLVDRYRKHNLYFEAAFDVPLKVDLITFDTPFAGRFGIFTCFDILFFDPAIRVLRDYKVKHVVYPTAWMNQLPLLAAIEIQKAFAVAFGINVLAANVHHPVLGMTGSGIHTPLESFWYHDMENPKSHLIIAQVAKNPVGLIGAENATGETDPSHSKFLKILSGDPYCEKDAQEVHCDEATKWNVNAPPTFHSEMMYDNFTLVPVWGKEGYLHVCSNGLCCYLLYERPTLSKELYALGVFDGLHTVHGTYYIQVCALVRCGGLGFDTCGQEITEATGIFEFHLWGNFSTSYIFPLFLTSGMTLEVPDQLGWENDHYFLRKSRLSSGLVTAALYGRLYERD

SEQ ID NO: 1600 - protein, 545 aa, Homo sapiens
MARKETQLIIKMNHLARFVVCIMSGARSKLALFLCGCYVVALGAHTGEESVADHHEAEYYVAAVYEHPSILSLNPLALISRQEALELMNQNLDIYEQQVMTAAQKDVQIIVFPEDGIHGFNFTRTSIYPFLDFMPSPQVVRWNPCLEPHRFNDTEVLQRLSCMAIRGDMFLVANLGTKEPCHSSDPRCPKDGRYQFNTNVVFSNNGTLVDRYRKHNLYFEAAFDVPLKVDLITFDTPFAGRFGIFTCFDILFFDPAIRVLRDYKVKHVVYPTAWMNQLPLLAAIEIQKAFAVAFGINVLAANVHHPVLGMTGSGIHTPLESFWYHDMENPKSHLIIAQVAKNPVGLIGAENATGETDPSHSKFLKILSGDPYCEKDAQEVHCDEATKWNVNAPPTFHSEMMYDNFTLVPVWGKEGYLHVCSNGLCCYLLYERPTLSKELYALGVFDGLHTVHGTYYIQVCALVRCGGLGFDTCGQEITEATGIFEFHLWGNFSTSYIFPLFLTSGMTLEVPDQLGWENDHYFLRKSRLSSGLVTAALYGRLYERD

SEQ ID NO: 1601 - protein, 545 aa, Homo sapiens
MPEGGGTSRRLLPMQSRFVVCIMSGARSKLALFLCGCYVVALGAHTGEESVADHHEAEYYVAAVYEHPSILSLNPLALISRQEALELMNQNLDIYEQQVMTAAQKDVQIIVFPEDGIHGFNFTRTSIYPFLDFMPSPQVVRWNPCLEPHRFNDTEVLQRLSCMAIRGDMFLVANLGTKEPCHSSDPRCPKDGRYQFNTNVVFSNNGTLVDRYRKHNLYFEAAFDVPLKVDLITFDTPFAGRFGIFTCFDILFFDPAIRVLRDYKVKHVVYPTAWMNQLPLLAAIEIQKAFAVAFGINVLAANVHHPVLGMTGSGIHTPLESFWYHDMENPKSHLIIAQVAKNPVGLIGAENATGETDPSHSKFLKILSGDPYCEKDAQEVHCDEATKWNVNAPPTFHSEMMYDNFTLVPVWGKEGYLHVCSNGLCCYLLYERPTLSKELYALGVFDGLHTVHGTYYIQVCALVRCGGLGFDTCGQEITEATGIFEFHLWGNFSTSYIFPLFLTSGMTLEVPDQLGWENDHYFLRKSRLSSGLVTAALYGRLYERD

SEQ ID NO: 1602 - protein, 159 aa, Homo sapiens
MSGARSKLALFLCGCYVVALGAHTGEESVADHHEAEYYVAAVYEHPSILSLNPLALISRQEALELMNQNLDIYEQQVMTAAQKDVQIIVFPEDGIHGFNFTRTSIYPFLDFMPSPQVVRWNPCLEPHRFNDTEVIPAFFLSRLRVHRGDLSQGPEAVTC

SEQ ID NO: 1603 - protein, 251 aa, Homo sapiens
MSGARSKLALFLCGCYVVALGAHTGEESVADHHEAEYYVAAVYEHPSILSLNPLALISRQEALELMNQNLDIYEQQVMTAAQKDVQIIVFPEDGIHGFNFTRTSIYPFLDFMPSPQVVRWNPCLEPHRFNDTEVLQRLSCMAIRGDMFLVANLGTKEPCHSSDPRCPKDGRYQFNTNVVFSNNGTLVDRYRKHNLYFEAAFDVPLKVDLITFDTPFAGRFGIFTCFDILFFDPAIRVLRDYKVKHVVYPTA

SEQ ID NO: 1604 - protein, 523 aa, Homo sapiens
MSGARSKLALFLCGCYVVALGAHTGEESVADHHEAEYYVAAVYEHPSILSLNPLALISRQEALELMNQNLDIYEQQVMTAAQKDVQIIVFPEDGIHGFNFTRTSIYPFLDFMPSPQVVRWNPCLEPHRFNDTEVLQRLSCMAIRGDMFLVANLGTKEPCHSSDPRCPKDGRYQFNTNVVFSNNGTLVDRYRKHNLYFEAAFDVPLKVDLITFDTPFAGRFGIFTCFDILFFDPAIRVLRDYKVKHVVYPTAWMNQLPLLAAIEIQKAFAVAFGINVLAANVHHPVLGMTGSGIHTPLESFWYHDMENPKSHLIIAQVAKNPVGLIGAENATGETDPSHSKFLKILSGDPYCEKDAQEVHCDEATKWNVNAPPTFHSEMMYDNFTLVPVWGKEGYLHVCSNGLCCYLLYERPTLSKELYALGVFDGLHTVHGTYYIQVCALVRCGGLGFDTCGQEITEATGIFEFHLWGNFSTSYIFPLFLTSGMTLEVPDQLGWENDHYFLRKSRLSSGLVTAALYGRLYERD

SEQ ID NO: 1605 - protein, 523 aa, Homo sapiens; identical to SEQ ID NO: 1604

SEQ ID NO: 1606 - protein, 523 aa, Homo sapiens; identical to SEQ ID NO: 1604

SEQ ID NO: 1607 - protein, 523 aa, Homo sapiens; identical to SEQ ID NO: 1604

SEQ ID NO: 1608 - protein, 56 aa, Homo sapiens
FIIFMAVSICCIKKLQREKKILSGEKKVEQEEKEIAQQLQEELRWRRTFLHAGECL

SEQ ID NO: 1609 - protein, 96 aa, Homo sapiens
MEPAAALHFSLPASLLLLLLLLLLSLCALVSAQFTVVGPANPILAMVGENTTLRCHLSPEKNAEDMEVRWFRSQFSPAVFVYKGGRERTEEQMEEY

SEQ ID NO: 1610 - protein, 256 aa, Homo sapiens
MEPAAALHFSLPASLLLLLLLLLLSLCALVSAQFTVVGPANPILAMVGENTTLRCHLSPEKNAEDMEVRWFRSQFSPAVFVYKGGRERTEEQMEEYRGRITFVSKDINRGSVALVIHNVTAQENGIYRCYFQEGRSYDEAILRLVVAESFMPSASPWMVALAVILTASPWMVSMTVILAVFIIFMAVSICCIKKLQREKKILSGEKKVEQEEKEIAQQLQEELRWRRTFLHAGYELPGIRGPSWKRPLHGEPPSAF

SEQ ID NO: 1611 - protein, 239 aa, Homo sapiens
MEPAAALHFSLPASLLLLLLLLLLSLCALVSAQFTVVGPANPILAMVGENTTLRCHLSPEKNAEDMEVRWFRSQFSPAVFVYKGGRERTEEQMEEYRGRITFVSKDINRGSVALVIHNVTAQENGIYRCYFQEGRSYDEAILRLVVAGLGSKPLIEIKAQEDGSIWLECISGGWYPEPLTVWRDPYGEVVPALKEVSIADADGLFMVTTAVIIRDKYVRNVSCSVNNTLLGQEKETVIF

SEQ ID NO: 1612 - protein, 523 aa, Homo sapiens
MEPAAALHFSLPASLLLLLLLLLLSLCALVSAQFTVVGPANPILAMVGENTTLRCHLSPEKNAEDMEVRWFRSQFSPAVFVYKGGRERTEEQMEEYRGRITFVSKDINRGSVALVIHNVTAQENGIYRCYFQEGRSYDEAILRLVVAGLGSKPLIEIKAQEDGSIWLECISGGWYPEPLTVWRDPYGEVVPALKEVSIADADGLFMVTTAVIIRDKYVRNVSCSVNNTLLGQEKETVIFIPESFMPSASPWMVALAVILTASPWMVSMTVILAVFIIFMAVSICCIKKLQREKKILSGEKKVEQEEKEIAQQLQEELRWRRTFLHAADVVLDPDTAHPELFLSEDRRSVRRGPYRQRVPDNPERFDSQPCVLGWESFASGKHYWEVEVENVMVWTVGVCRHSVERKGEVLLIPQNGFWTLEMFGNQYRALSSPERILPLKESLCRVGVFLDYEAGDVSFYNMRDRSHIYTCPRSAFTVPVRPFFRLGSDDSPIFICPALTGASGVMVPEEGLKLHRVGTHQSL

SEQ ID NO: 1613 - protein, 336 aa, Homo sapiens
MEPAAALHFSLPASLLLLLLLLLLSLCALVSAQFTVVGPANPILAMVGENTTLRCHLSPEKNAEDMEVRWFRSQFSPAVFVYKGGRERTEEQMEEYRGRITFVSKDINRGSVALVIHNVTAQENGIYRCYFQEGRSYDEAILRLVVAGLGSKPLIEIKAQEDGSIWLECISGGWYPEPLTVWRDPYGEVVPALKEVSIADADGLFMVTTAVIIRDKYVRNVSCSVNNTLLGQEKETVIFIPESFMPSASPWMVALAVILTASPWMVSMTVILAVFIIFMAVSICCIKKLQREKKILSGEKKVEQEEKEIAQQLQEELRWRRTFLHADVNLTGLRNT

SEQ ID NO: 1614 - protein, 523 aa, Homo sapiens; identical to SEQ ID NO: 1612

SEQ ID NO: 1615 - protein, 313 aa, Homo sapiens
MEPAAALHFSLPASLLLLLLLLLLSLCALVSESFMPSASPWMVALAVILTASPWMVSMTVILAVFIIFMAVSICCIKKLQREKKILSGEKKVEQEEKEIAQQLQEELRWRRTFLHAADVVLDPDTAHPELFLSEDRRSVRRGPYRQRVPDNPERFDSQPCVLGWESFASGKHYWEVEVENVMVWTVGVCRHSVERKGEVLLIPQNGFWTLEMFGNQYRALSSPERILPLKESLCRVGVFLDYEAGDVSFYNMRDRSHIYTCPRSAFTVPVRPFFRLGSDDSPIFICPALTGASGVMVPEEGLKLHRVGTHQSL

SEQ ID NO: 1616 - protein, 110 aa, Homo sapiens
MEPAAALHFSLPASLLLLLLLLLLSLCALVSGLGSKPLIEIKAQEDGSIWLECISGGWYPEPLTVWRDPYGEVVPALKEVSIADADGLFMVTTAVIIRDKYVRNVSCSVN

SEQ ID NO: 1617 - protein, 184 aa, Homo sapiens
MEPAAALHFSLPASLLLLLLLLLLSLCALVSGLGSKPLIEIKAQEDGSIWLECISGGWYPEPLTVWRDPYGEVVPALKEVSIADADGLFMVTTAVIIRDKYVRNVSCSVNNTLLGQEKETVIFIPESFMPSASPWMVALAVILTASPWMVSMTVILAVFIIFMAVSICCIKKLQREKKILSGEK

SEQ ID NO: 1618 - protein, 407 aa, Homo sapiens
MEPAAALHFSLPASLLLLLLLLLLSLCALVSGLGSKPLIEIKAQEDGSIWLECISGGWYPEPLTVWRDPYGEVVPALKEVSIADADGLFMVTTAVIIRDKYVRNVSCSVNNTLLGQEKETVIFIPESFMPSASPWMVALAVILTASPWMVSMTVILAVFIIFMAVSICCIKKLQREKKILSGEKKVEQEEKEIAQQLQEELRWRRTFLHAADVVLDPDTAHPELFLSEDRRSVRRGPYRQRVPDNPERFDSQPCVLGWESFASGKHYWEVEVENVMVWTVGVCRHSVERKGEVLLIPQNGFWTLEMFGNQYRALSSPERILPLKESLCRVGVFLDYEAGDVSFYNMRDRSHIYTCPRSAFTVPVRPFFRLGSDDSPIFICPALTGASGVMVPEEGLKLHRVGTHQSL

SEQ ID NO: 1619 - protein, 39 aa, Homo sapiens
MEPAAALHFSLPASLLLLLLLLLLSLCALVSVLPRSVCV

SEQ ID NO: 1620 - protein, 80 aa, Homo sapiens
MVTTAVIIRDKYVRNVSCSVNNTLLGQEKETVIFIPESFMPSASPWMVALAVILTASPWMVSMTVILAVFIIFMAVSICC

SEQ ID NO: 1621 - protein, 237 aa, Homo sapiens
MVTTAVIIRDKYVRNVSCSVNNTLLGQEKETVIFIPESFMPSASPWMVALAVILTASPWMVSMTVILAVFIIFMAVSICCIKKLQREKKILSGEKKVEQEEKEIAQQLQEELRWRRTFLHAADVVLDPDTAHPELFLSEDRRSVRRGPYRQRVPDNPERFDSQPCVLGWESFASGKHYWEVEVENVMVWTVGVCRHSVERKGEVLLIPQNGFWTLEMFGNQYRALSSPERILPLKES

SEQ ID NO: 1622 - protein, 43 aa, Homo sapiens
MKMASFLAFLLLNFRVCLLLLQLLMPHSAQFSVLGPSGPILAM

SEQ ID NO: 1623 - protein, 92 aa, Homo sapiens
MKMASFLAFLLLNFRVCLLLLQLLMPHSAQFSVLGPSGPILAMVGEDADLPCHLFPTMSAETMELKWVSSSLRQVVNVYADGKEVEDRQSAP

SEQ ID NO: 1624 - protein, 119 aa, Homo sapiens
MKMASFLAFLLLNFRVCLLLLQLLMPHSAQFSVLGPSGPILAMVGEDADLPCHLFPTMSAETMELKWVSSSLRQVVNVYADGKEVEDRQSAPYRGRTSILRDGITAGKAALRIHNVTAS

SEQ ID NO: 1625 - protein, 513 aa, Homo sapiens
MKMASFLAFLLLNFRVCLLLLQLLMPHSAQFSVLGPSGPILAMVGEDADLPCHLFPTMSAETMELKWVSSSLRQVVNVYADGKEVEDRQSAPYRGRTSILRDGITAGKAALRIHNVTASDSGKYLCYFQDGDFYEKALVELKVAALGSDLHVDVKGYKDGGIHLECRSTGWYPQPQIQWSNNKGENIPTVEAPVVADGVGLYAVAASVIMRGSSGEGVSCTIRSSLLGLEKTASISIADPFFRSAQRWIAALAGTLPVLLLLLGGAGYFLWQQQEEKKTQFRKKKREQELREMAWSTMKQEQSTRVKLLEELRWRSIQYASRGERHSAYNEWKKALFKPADVILDPKTANPILLVSEDQRSVQRAKEPQDLPDNPERFNWHYCVLGCESFISGRHYWEVEVGDRKEWHIGVCSKNVQRKGWVKMTPENGFWTMGLTDGNKYRTLTEPRTNLKLPKPPKKVGVFLDYETGDISFYNAVDGSHIHTFLDVSFSEALYPVFRILTLEPTALTICPA

SEQ ID NO: 1626 - protein, 352 aa, Homo sapiens
MKMASFLAFLLLNFRVCLLLLQLLMPHSAQFSVLGPSGPILAMVGEDADLPCHLFPTMSAETMELKWVSSSLRQVVNVYADGKEVEDRQSAPYRGRTSILRDGITAGKAALRIHNVTASDSGKYLCYFQDGDFYEKALVELKVAALGSDLHVDVKGYKDGGIHLECRSTGWYPQPQIQWSNNKGENIPTVEAPVVADGVGLYAVAASVIMRGSSGEGVSCTIRSSLLGLEKTASISIADPFFRSAQRWIAALAGTLPVLLLLLGGAGYFLWQQQEEKKTQFRKKKREQELREMAWSTMKQEQSTRVKLLEELRWRSIQYASRGERHSAYNEWKKALFKPGEEMLQMRLHFVK

SEQ ID NO: 1627 - protein, 378 aa, Homo sapiens
MKMASFLAFLLLNFRVCLLLLQLLMPHSAQFSVLGPSGPILAMVGEDADLPCHLFPTMSAETMELKWVSSSLRQVVNVYADGKEVEDRQSAPYRGRTSILRDGITAGKAALRIHNVTASDSGKYLCYFQDGDFYEKALVELKVAALGSDLHVDVKGYKDGGIHLECRSTGWYPQPQIQWSNNKGENIPTVEAPVVADGVGLYAVAASVIMRGSSGEGVSCTIRSSLLGLEKTASISIADPFFRSAQRWIAALAGTLPVLLLLLGGAGYFLWQQQEEKKTQFRKKKREQELREMAWSTMKQEQSTRVKLLEELRWRSIQYASRGERHSAYNEWKKALFKPGPPIGQTQQQTRGQGSPVALSQESAQRTDSWGPEEGGES

SEQ ID NO: 1628 - protein, 461 aa, Homo sapiens
MKMASFLAFLLLNFRVCLLLLQLLMPHSAQFSVLGPSGPILAMVGEDADLPCHLFPTMSAETMELKWVSSSLRQVVNVYADGKEVEDRQSAPYRGRTSILRDGITAGKAALRIHNVTASDSGKYLCYFQDGDFYEKALVELKVADGVGLYAVAASVIMRGSSGEGVSCTIRSSLLGLEKTASISIADPFFRSAQRWIAALAGTLPVLLLLLGGAGYFLWQQQEEKKTQFRKKKREQELREMAWSTMKQEQSTRVKLLEELRWRSIQYASRGERHSAYNEWKKALFKPADVILDPKTANPILLVSEDQRSVQRAKEPQDLPDNPERFNWHYCVLGCESFISGRHYWEVEVGDRKEWHIGVCSKNVQRKGWVKMTPENGFWTMGLTDGNKYRTLTEPRTNLKLPKPPKKVGVFLDYETGDISFYNAVDGSHIHTFLDVSFSEALYPVFRILTLEPTALTICPA

SEQ ID NO: 1629 - protein, 311 aa, Homo sapiens
MGIPRAQFSVLGPSGPILAMVGEDADLPCHLFPTMSAETMELKWVSSSLRQVVNVYADGKEVEDRQSAPYRGRTSILRDGITAGKAALRIHNVTASDSGKYLCYFQDGDFYEKALVELKVAALGSNLHVEVKGYEDGGIHLECRSTGWYPQPQIQWSNAKGENIPAVEAPVVADGVGLYEVAASVIMRGGSGEGVSCIIRNSLLGLEKTASISIADPFFRSAQPWIAALAGTLPILLLLLAGASYFLWRQQKEITALSSEIESEQEMKEMGYAATEREISLRESLQEELKRKKIQYLTRGEESSSDTNKSA

SEQ ID NO: 1630 - protein, 334 aa, Homo sapiens
MKMASSLAFLLLNFHVSLLLVQLLTPCSAQFSVLGPSGPILAMVGEDADLPCHLFPTMSAETMELKWVSSSLRQVVNVYADGKEVEDRQSAPYRGRTSILRDGITAGKAALRIHNVTASDSGKYLCYFQDGDFYEKALVELKVAALGSNLHVEVKGYEDGGIHLECRSTGWYPQPQIQWSNAKGENIPAVEAPVVADGVGLYEVAASVIMRGGSGEGVSCIIRNSLLGLEKTASISIADPFFRSAQPWIAALAGTLPILLLLLAGASYFLWRQQKEITALSSEIESEQEMKEMGYAATEREISLRESLQEELKRKKIQYLTRGEESSSDTNKSA

SEQ ID NO: 1631 - protein, 334 aa, Homo sapiens; identical to SEQ ID NO: 1630

SEQ ID NO: 1632 - protein, 334 aa, Homo sapiens; identical to SEQ ID NO: 1630

SEQ ID NO: 1633 - protein, 334 aa, Homo sapiens; identical to SEQ ID NO: 1630

SEQ ID NO: 1634 - protein, 160 aa, Homo sapiens
MKMASSLAFLLLNFHVSLLLVQLLTPCSAQFSVLGPSGPILAMVGEDADLPCHLFPTMSAETMELKWVSSSLRQVVNVYADGKEVEDRQSAPYRGRTSILRDGITAGKAALRIHNVTASDSGKYLCYFQDGDFYEKALVELKVADPFFRSAQPWIAALAG

SEQ ID NO: 1635 - protein, 43 aa, Homo sapiens
MKMASSLAFLLLNFHVSLLLVQLLTPCSGLCSPLGSLYLAFPV

SEQ ID NO: 1636 - protein, 115 aa, Homo sapiens
MVGEDADLPCHLFPTMSAETMELKWVSSSLRQVVNVYADGKEVEDRQSAPYRGRTSILRDGITAGKAALRIHNVTASDSGKYLCYFQDGDFYEKALVELKVAALGSNLHVEVKGY

SEQ ID NO: 1637 - protein, 196 aa, Homo sapiens
MVGEDADLPCHLFPTMSAETMELKWVSSSLRQVVNVYADGKEVEDRQSAPYRGRTSILRDGITAGKAALRIHNVTASDSGKYLCYFQDGDFYEKALVELKVAALGSNLHVEVKGYEDGGIHLECRSTGWYPQPQIQWSNAKGENIPAVEAPVVADGVGLYEVAASVIMRGGSGEGVSCIIRNSLLGLEKTASISIA

SEQ ID NO: 1638 - protein, 292 aa, Homo sapiens
MVGEDADLPCHLFPTMSAETMELKWVSSSLRQVVNVYADGKEVEDRQSAPYRGRTSILRDGITAGKAALRIHNVTASDSGKYLCYFQDGDFYEKALVELKVAALGSNLHVEVKGYEDGGIHLECRSTGWYPQPQIQWSNAKGENIPAVEAPVVADGVGLYEVAASVIMRGGSGEGVSCIIRNSLLGLEKTASISIADPFFRSAQPWIAALAGTLPILLLLLAGASYFLWRQQKEITALSSEIESEQEMKEMGYAATEREISLRESLQEELKRKKIQYLTRGEESSSDTNKSA

SEQ ID NO: 1639 - protein, 115 aa, Homo sapiens
RGGSGEGVSCIIRNSLLGLEKTASISIADPFFRSAQPWIAALAGTLPILLLLLAGASYFLWRQQKEITALSSEIESEQEMKEMGYAATEREISLRESLQEELKRKKIQYLTREWL

SEQ ID NO: 1640 - protein, 138 aa, Homo sapiens
MKMASSLAFLLLNFHVSLFLVQLLTPCSAQFSVLGPSGPILAMVGEDADLPCHLFPTMSAETMELRWVSSSLRQVVNVYADGKEVEDRQSAPYRGRTSILRDGITAGKAALRIHNVTASDSGKYLCYFQDGDFYEKAL

SEQ ID NO: 1641 - protein, 238 aa, Homo sapiens
MKMASSLAFLLLNFHVSLFLVQLLTPCSAQFSVLGPSGPILAMVGEDADLPCHLFPTMSAETMELRWVSSSLRQVVNVYADGKEVEDRQSAPYRGRTSILRDGITAGKAALRIHNVTASDSGKYLCYFQDGDFYEKALVELKVAALGSDLHIEVKGYEDGGIHLECRSTGWYPQPQIKWSDTKGENIPAVEAPVVADGVGLYAVAASVIMRGSSGGGVSCIIRNSLLGLEKTASISIA

SEQ ID NO: 1642 - protein, 584 aa, Homo sapiens
MKMASSLAFLLLNFHVSLFLVQLLTPCSAQFSVLGPSGPILAMVGEDADLPCHLFPTMSAETMELRWVSSSLRQVVNVYADGKEVEDRQSAPYRGRTSILRDGITAGKAALRIHNVTASDSGKYLCYFQDGDFYEKALVELKVAALGSDLHIEVKGYEDGGIHLECRSTGWYPQPQIKWSDTKGENIPAVEAPVVADGVGLYAVAASVIMRGSSGGGVSCIIRNSLLGLEKTASISIADPFFRSAQPWIAALAGTLPISLLLLAGASYFLWRQQKEKIALSRETEREREMKEMGYAATEQEISLREKLQEELKWRKIQYMARGEKSLAYHEWKMALFKPADVILDPDTANAILLVSEDQRSVQRAEEPRDLPDNPERFEWRYCVLGCENFTSGRHYWEVEVGDRKEWHIGVCSKNVERKKGWVKMTPENGYWTMGLTDGNKYRALTEPRTNLKLPEPPRKVGIFLDYETGEISFYNATDGSHIYTFPHASFSEPLYPVFRILTLEPTALTICPIPKEVESSPDPDLVPDHSLETPLTPGLANESGEPQAEVTSLLLPAHPGAEVSPSATTNQNHKLQARTEALY

SEQ ID NO: 1643 - protein, 127 aa, Homo sapiens
MKMASSLAFLLLNFHVSLFLVQLLTPCSDADLPCHLFPTMSAETMELRWVSSSLRQVVNVYADGKEVEDRQSAPYRGRTSILRDGITAGKAALRIHNVTASDSGKYLCYFQDGDFYEKALVELKVAA

SEQ ID NO: 1644 - protein, 100 aa, Homo sapiens
MVGEDADLPCHLFPTMSAETMELRWVSSSLRQVVNVYADGKEVEDRQSAPYRGRTSILRDGITAGKAALRIHNVTASDSGKYLCYFQDGDFYEKALVELK

SEQ ID NO: 1645 - protein, 140 aa, Homo sapiens
MVGEDADLPCHLFPTMSAETMELRWVSSSLRQVVNVYADGKEVEDRQSAPYRGRTSILRDGITAGKAALRIHNVTASDSGKYLCYFQDGDFYEKALVELKVAALGSDLHIEVKGYEDGGIHLECRSTGWYPQPQIKWSDT

SEQ ID NO: 1646 - protein, 250 aa, Homo sapiens
MVGEDADLPCHLFPTMSAETMELRWVSSSLRQVVNVYADGKEVEDRQSAPYRGRTSILRDGITAGKAALRIHNVTASDSGKYLCYFQDGDFYEKALVELKVAALGSDLHIEVKGYEDGGIHLECRSTGWYPQPQIKWSDTKGENIPAVEAPVVADGVGLYAVAASVIMRGSSGGGVSCIIRNSLLGLEKTASISIADPFFRSAQPWIAALAGTLPISLLLLAGASYFLWRQQKEKIALSRETEREREMKE

SEQ ID NO: 1647 - protein, 535 aa, Homo sapiens
MVGEDADLPCHLFPTMSAETMELRWVSSSLRQVVNVYADGKEVEDRQSAPYRGRTSILRDGITAGKAALRIHNVTASDSGKYLCYFQDGDFYEKALVELKVAALGSDLHIEVKGYEDGGIHLECRSTGWYPQPQIKWSDTKGENIPAVEAPVVADGVGLYAVAASVIMRGSSGGGVSCIIRNSLLGLEKTASISIADPFFRSAQPWIAALAGTLPISLLLLAGASYFLWRQQKEKIALSRETEREREMKEMGYAATEQEISLREWRKIQYMARGEKSLAYHEWKMALFKPADVILDPDTANAILLVSEDQRSVQRAEEPRDLPDNPERFEWRYCVLGCENFTSGRHYWEVEVGDRKEWHIGVCSKNVERKKGWVKMTPENGYWTMGLTDGNKYRALTEPRTNLKLPEPPRKVGIFLDYETGEISFYNATDGSHIYTFPHASFSEPLYPVFRILTLEPTALTICPIPKEVESSPDPDLVPDHSLETPLTPGLANESGEPQAEVTSLLLPAHPGAEVSPSATTNQNHKLQARTEALY

SEQ ID NO: 1648 - protein, 210 aa, Homo sapiens
MVGEDADLPCHLFPTMSAETMELRWVSSSLRQVVNVYADGKEVEDRQSAPYRGRTSILRDGITAGKAALRIHNVTASDSGKYLCYFQDGDFYEKALVELKVAEWRKIQYMARGEKSLAYHEWKMALFKPADVILDPDTANAILLVSEDQRSVQRAEEPRDLPDNPERFEWRYCVLGCENFTSGRHYWEVEVGDRKEWHIGVCSKNVERKK

SEQ ID NO: 1649 - protein, 270 aa, Homo sapiens
MWLLVSVILISRISSVGGEAMFCDFPKINHGILYDEEKYKPFSQVPTGEVFYYSCEYNFVSPSKSFWTRITCAEEGWSPTPKCLRLCFFPFVENGHSESSGQTHLEGDTVQIICNTGYRLQNNENNISCVERGWSTPPKCRSTISAEKCGPPPPIDNGDITSFLLSVYAPGSSVEYQCQNLYQLEGNNQITCRNGQWSEPPKCLDPCVISQEIMEKYNIKLKWTNQQKLYSRTGDIVEFVCKSGYHPTKSHSFRAMCQNGKLVYPSCEEK

SEQ ID NO: 1650 - protein, 81 aa, Homo sapiens
MRLLVLSSLLCILLLCFSIFSTEGKRRPAKAWSGRRTRLCCHRVPSPNSTNLKGHHVRLCKPCKLEPEPRLWVVPGALPQV

SEQ ID NO: 1651 - protein, 121 aa, Homo sapiens
MAASQCLCCSKFLFQRQNLACFLTNPHCGSLVNADGHGEVWTDWNNMSKFFQYGWRCTTNENTYSNRTLMGNWNQERYDLRNIVQPKPLPSQDLSESLTGSQDINLNWILPDTNAQKSQLT

SEQ ID NO: 1652 - protein, 150 aa, Homo sapiens
MAASQCLCCSKFLFQRQNLACFLTNPHCGSLVNADGHGEVWTDWNNMSKFFQYGWRCTTNENTYSNRTLMGNWNQERYDLRNIVQPKPLPSQFGHYFETTYDTSYNNKMPLSTHRFKREPHWFPGHQPELDPPRYKCTEKSTYMNSYSKP

SEQ ID NO: 1653 - protein, 142 aa, Homo sapiens
MEQPSKDFCDSHKKSSKSSTYSASSYSSSGKRQNLACFLTNPHCGSLVNADGHGEVWTDWNNMSKFFQYGWRCTTNENTYSNRTLMGNWNQERYDLRNIVQPKPLPSQFGHYFETTYDTSYNNKMPLSTHRFKREPHWFPGH

SEQ ID NO: 1654 - protein, 104 aa, Homo sapiens
MSKFFQYGWRCTTNENTYSNRTLMGNWNQERYDLRNIVQPKPLPSQFGHYFETTYDTSYNNKMPLSTHRFKREPHWFPGHQPELDPPRYKCTEKSTYMNSYSKP

SEQ ID NO: 1655 - protein, 190 aa, Homo sapiens
MVIWVILSLLGELGKPGLLTSLKNMEQPSKDFCDSHKKSSKSSTYSASSYSSSGKRQNLACFLTNPHCGSLVNADGHGEVWTDWNNMSKFFQYGWRCTTNENTYSNRTLMGNWNQERYDLRNIVQPKPLPSQFGHYFETTYDTSYNNKMPLSTHRFKREPHWFPGHQPELDPPRYKCTEKSTYMNSYSKP

SEQ ID NO: 1656 - protein, 25 aa, Homo sapiens
MWTALVLIWIFSLSLSESHAASNDP

SEQ ID NO: 1657 - protein, 114 aa, Homo sapiens
MWTALVLIWIFSLSLSESHAASNDPRNFVPNKMWKGLVKRNASVETVDNKTSEDVTMAAASPVTLTKGTSAAHLNSMEVTTEDTSRTDAYESYKKKDYTQVDYLINGMYADSEM

SEQ ID NO: 1658 - protein, 449 aa, Homo sapiens
MWTALVLIWIFSLSLSESHAASNDPRNFVPNKMWKGLVKRNASVETVDNKTSEDVTMAAASPVTLTKGTSAAHLNSMEVTTEDTSRTDVSEPATSGGAADGVTSIAPTAVASSTTAASITTAASSMTVASSAPTTAASSTTVASIAPTTAASSMTAASSTPMTLALPAPTSTSTGRTPSTTATGHPSLSTALAQVPKSSALPRTATLATLATRAQTVATTANTSSPMSTRPSPSKHMPSDTAASPVPPMRPQAQGPISQVSVDQPVVNTTNKSTPMPSNTTPEPAPTPTVVTTTKAQAREPTASPVPVPHTSPIPEMEAMSPTTQPSPMPYTQRAAGPGTSQAPEQVETEATPGTDSTGPTPRSSGGTKMPATDSCQPSTQGQYMVVTTEPLTQAVVDKTLLLVVLLLGVTLFITVLVLFALQAYESYKKKDYTQVDYLINGMYADSEM

SEQ ID NO: 1659 - protein, 145 aa, Homo sapiens
MLTRLVLSAHLSSTTSPPWTHAAISWELDNVLMPSPRIWPQVTPTGRSASVRSEGNTSSLWNFSAGQDVHAIVTRTCESVLSSAVYTHGCGCVRSATNITCQSSGQQRQAARQEEENSICKAHDSREGRLGYPLSAHQPGSGGPN

SEQ ID NO: 1660 - protein, 145 aa, Homo sapiens; identical to SEQ ID NO: 1659

SEQ ID NO: 1661 - protein, 98 aa, Homo sapiens
MVLAMLGALHPRAGLSLFLHLILAVALLRSQPLRSQRSVPEAFSAPLELSQPLSGLVDDYGILPKHPRPRGPRPLLSRAQQRKRDGPDLAEYYYDAHL

SEQ ID NO: 1662 - protein, 376 aa, Homo sapiens
MGHQFLRGLLTLLLPPPPLYTRHRMLGPESVPPPKRSRSKLMAPPRIGTHNGTFHCDEALACALLRLLPEYRDAEIVRTRDPEKLASCDIVVDVGGEYDPRRHRYDHHQRSFTETMSSLSPGKPWQTKLSSAGLIYLHFGHKLLAQLLGTSEEDSMVGTLYDKMYENFVEEVDAVDNGISQWAEGEPRYALTTTLSARVARLNPTWNHPDQDTEAGFKRAMDLVQEEFLQRLDFYQHSWLPARALVEEALAQRFQVDPSGEIVELAKGACPWKEHLYHLESGLSPPVAIFFVIYTDQAGQWRIQCVPKEPHSFQSRLPLPEPWRGLRDEALDQVSGIPGCIFVHASGFTGGHHTREGALSMARATLAQRSYLPQIS

SEQ ID NO: 1663 - protein, 301 aa, Homo sapiens
MLGPESVPPPKRSRSKLMAPPRIGTHNGTFHCDEALACALLRLLPEYRDAEIVRTRDPEKLASCDIVVDVGGEYDPRRHRYDHHQRSFTETMSSLSPGKPWQTKLSSAGLIYLHFGHKLLAQLLGTSEEDSMVGTLYDKAGFKRAMDLVQEEFLQRLDFYQHSWLPARALVEEALAQRFQVDPSGEIVELAKGACPWKEHLYHLESGLSPPVAIFFVIYTDQAGQWRIQCVPKEPHSFQSRLPLPEPWRGLRDEALDQVSGIPGCIFVHASGFTGGHHTREGALSMARATLAQRSYLPQIS

SEQ ID NO: 1664 - protein, 213 aa, Homo sapiens
MYENFVEEVDAVDNGISQWAEGEPRYALTTTLSARVARLNPTWNHPDQDTEAGFKRAMDLVQEEFLQRLDFYQHSWLPARALVEEALAQRFQVDPSGEIVELAKGACPWKEHLYHLESGLSPPVAIFFVIYTDQAGQWRIQCVPKEPHSFQSRLPLPEPWRGLRDEALDQVSGIPGCIFVHASGFTGGHHTREGALSMARATLAQRSYLPQIS

SEQ ID NO: 1665 - protein, 130 aa, Homo sapiens
  SITE 1: note = misc_feature - Xaa can be any naturally occurring amino acid
XMVGTLYDKVDPSGEIVELAKGACPWKEHLYHLESGLSPPVAIFFVIYTDQAGQWRIQCVPKEPHSFQSRLPLPEPWRGLRDEALDQVSGIPGCIFVHASGFTGGHHTREGALSMARATLAQRSYLPQIS

SEQ ID NO: 1666 - protein, 46 aa, Homo sapiens
MAVEDHFELCLAKCRTSSQSVQHENTYRDPIAKYCYGESPPELFPA

SEQ ID NO: 1667 - protein, 47 aa, Homo sapiens
MVNLAAMVWRRLLRKRWVLALVFGLSLVYFLSSTFKQATFARGRICW

SEQ ID NO: 1668 - protein, 205 aa, Homo sapiens
MVNLAAMVWRRLLRKRWVLALVFGLSLVYFLSSTFKQEERAVRDRNLLQVHDHNQPIPWKVQFNLGNSSRPSNQCRNSIQGKHLITDELGYVCERKDLLVNGCCNVNVPSTKQYCCDGCWPNGCCSAYEYCVSCCLQPNKQLLLERFLNRAAVAFQNLFMAVEDHFELCLAKCRTSSQSVQHENTYRDPIAKYCYGESPPELFPA

SEQ ID NO: 1669 - protein, 43 aa, Homo sapiens
  SITE 1: note = misc_feature - Xaa can be any naturally occurring amino acid
XFGLSLVYFLSSTFKQSVQHENTYRDPIAKYCYGESPPELFPA

SEQ ID NO: 1670 - protein, 53 aa, Homo sapiens
MPAGVPMSTYLKMFAASLLAMCAGAEVVHRYYRPDLMRNRLRRVKLISQSHIA

SEQ ID NO: 1671 - protein, 53 aa, Homo sapiens; identical to SEQ ID NO: 1670

SEQ ID NO: 1672 - protein, 59 aa, Homo sapiens
MPAGVPMSTYLKMFAASLLAMCAGAEVVHRYYRPDLQNWITSLSVGELEGLGRVEQRRP

SEQ ID NO: 1673 - protein, 59 aa, Homo sapiens; identical to SEQ ID NO: 1672

SEQ ID NO: 1674 - protein, 71 aa, Homo sapiens
MPAGVPMSTYLKMFAASLLAMCAGAEVVHRYYRPDLTIPEIPPKRGELKTELLGLKERKHKPQVSQQEELK

SEQ ID NO: 1675 - protein, 71 aa, Homo sapiens; identical to SEQ ID NO: 1674

SEQ ID NO: 1676 - protein, 71 aa, Homo sapiens; identical to SEQ ID NO: 1674

SEQ ID NO: 1677 - protein, 71 aa, Homo sapiens; identical to SEQ ID NO: 1674

SEQ ID NO: 1678 - protein, 37 aa, Homo sapiens
MPAGVPMSTYLKMFAASLLAMCAGAEVVHRYYRPDLV

SEQ ID NO: 1679 - protein, 46 aa, Homo sapiens
MPAGVPMSTYLKMFAASLLAMCAGAEVVHRYYRPDLVSAGGLLFYF

SEQ ID NO: 1680 - protein, 135 aa, Homo sapiens [sequence omitted]

SEQ ID NO: 1681 - protein, 135 aa, Homo sapiens
MFQNLQGTFEKEIGKIIPFTIAFKRAEAVEPDGCVQSWRCCLPCDLGQASRFIHTTVCSAIRWRSCKGERNFAERHILPAELEEQSNHAGMGPILPAMPSVDGNHFQHPAGDCHPYGILCLQAHSASVTARQVLQ

SEQ ID NO: 1682 - protein, 107 aa, Homo sapiens
MLERENESHGSKSCSRARIGTEVACRACLPPHCAMPPIDAFLCLPFSFALVSGKLYQWKEPVISSVHSKVKRTAEVKEEIVEKEMKKLVHSVFNMADYTFPLQVNTW

SEQ ID NO: 1683 - protein, 49 aa, Homo sapiens
MLRPALPWLYLGLCSLLVGEAEAPSPVDPLERSRPYAVLRGQNLDQTLH

SEQ ID NO: 1684 - protein, 76 aa, Homo sapiens
MLRPALPWLYLGLCSLLVGEAEAPSPVDPLERSRPYAVLRGQNLESLSPRLECNGAISARCNLRVWGSSDSPASAP

SEQ ID NO: 1685 - protein, 76 aa, Homo sapiens; identical to SEQ ID NO: 1684

SEQ ID NO: 1686 - protein, 61 aa, Homo sapiens
MLRPALPWLYLGLCSLLVGEAEAPSPVDPLERSRPYAVLRGQNLETTGERICLQLFAQHLT

SEQ ID NO: 1687 - protein, 72 aa, Homo sapiens
MLRPALPWLYLGLCSLLVGEAEAPSPVDPLERSRPYAVLRGQNLVLMGTIFSILLVTVILMAFCVYKPIRRR

SEQ ID NO: 1688 - protein, 126 aa, Homo sapiens
MRLPGCTLAASEAAPLLNPLVDDYVASEGAVQRVLVPAYAKQLSPATQLAIQRATPETGPENGTKLPPPRPEDMLNAAAALDSALEESGPGSTGELRHSLGLTVSPCRTRGSGQKNSRRKRDLVLS

SEQ ID NO: 1689 - protein, 358 aa, Homo sapiens
MRLPGCTLAASEAAPLLNPLVDDYVASEGAVQRVLVPAYAKQLSPATQLAIQRATPETGPENGTKLPPPRPEDMLNAAAALDSALEESGPGSTGELRHSLGLTVSPCRTRGSGQKNSRRKRDLVLSKLVHNVHNHITNDKRFNGSESIKSSWNISVVKFLLEKLKQELVTSPHNYTDKELKGACVAYFLTKRREYRNSLNPFKGLKEKEEKKLRSRRYRLFANRSSIMRHFGPEDQRLWNDVTEELMSDEEDSLNEPGVWVARPPRFRAQRLTELCYHLDANSKHGTKANRVYGPPSDRLPSAEAQLLPPELYNPNFQEEEDEGGDENAPGSPSFDQPHKTCCPDLNSFIEIKVEKDE

SEQ ID NO: 1690 - protein, 9 aa, Homo sapiens
MSFSATILF

SEQ ID NO: 1691 - protein, 9 aa, Homo sapiens
MSFSATILF

SEQ ID NO: 1692 - protein, 11 aa, Homo sapiens
MSFSATILFSP

SEQ ID NO: 1693 - protein, 50 aa, Homo sapiens
MSFSATILFSPPSGSEARCCCCACKSETNGGNTGSQGGNPPPSTPITVTG

SEQ ID NO: 1694 - protein, 79 aa, Homo sapiens
MSFSATILFSPPSGSEARCCCCACKSETNGGNTGSQGGNPPPSTPITVTGHGLAVQSSEQLLHVIYQRVDKAVGLAEAA

SEQ ID NO: 1695 - protein, 83 aa, Homo sapiens
MSFSATILFSPPSGSEARCCCCACKSETNGGNTGSQGGNPPPSTPITVTGHGLAVQSSEQLLHVIYQRVDKAVGLAEAALGLA

SEQ ID NO: 1696 - protein, 106 aa, Homo sapiens
MSFSATILFSPPSGSEARCCCCACKSETNGGNTGSQGGNPPPSTPITVTGHGLAVQSSEQLLHVIYQRVDKAVGLAEAALGLARANNELLKRLQEEVGDLRQGKVS

SEQ ID NO: 1697 - protein, 136 aa, Homo sapiens
MSFSATILFSPPSGSEARCCCCACKSETNGGNTGSQGGNPPPSTPITVTGHGLAVQSSEQLLHVIYQRVDKAVGLAEAALGLARANNELLKRLQEEVGDLRQGKVSIPDEDGESRAHSSPPEEPGPLKESPGEAFK

SEQ ID NO: 1698 - protein, 199 aa, Homo sapiens
MSFSATILFSPPSGSEARCCCCACKSETNGGNTGSQGGNPPPSTPITVTGHGLAVQSSEQLLHVIYQRVDKAVGLAEAALGLARANNELLKRLQEEVGDLRQGKVSIPDEDGESRAHSSPPEEPGPLKESPGEAFKALSAVEEECDSVGSGVQVVIEELRQLGAASVGPGPLGFPATQRDMRLPGCTLAASEAAPLLNP

SEQ ID NO: 1699 - protein, 209 aa, Homo sapiens
MSFSATILFSPPSGSEARCCCCACKSETNGGNTGSQGGNPPPSTPITVTGHGLAVQSSEQLLHVIYQRVDKAVGLAEAALGLARANNELLKRLQEEVGDLRQGKVSIPDEDGESRAHSSPPEEPGPLKESPGEAFKALSAVEEECDSVGSGVQVVIEELRQLGAASVGPGPLGFPATQRDMRLPGCTLAASEAAPLLNPLVDDYVASEG

SEQ ID NO: 1700 - protein, 498 aa, Homo sapiens
MSFSATILFSPPSGSEARCCCCACKSETNGGNTGSQGGNPPPSTPITVTGHGLAVQSSEQLLHVIYQRVDKAVGLAEAALGLARANNELLKRLQEEVGDLRQGKVSIPDEDGESRAHSSPPEEPGPLKESPGEAFKALSAVEEECDSVGSGVQVVIEELRQLGAASVGPGPLGFPATQRDMRLPGCTLAASEAAPLLNPLVDDYVASEGAVQRVLVPAYAKQLSPATQLAIQRATPETGPENGTKLPPPRPEDMLNAAAALDSALEESGPGSTGELRHSLGLTVSPCRTRGSGQKNSRRKRDLVLSKLVHNVHNHITNDKRFNGSESIKSSWNISVVKFLLEKLKQELVTSPHNYTDKELKGACVAYFLTKRREYRNSLNPFKGLKEKEEKKLRSRRYRLFANRSSIMRHFGPEDQRLWNDVTEELMSDEEDSLNEPDRLPSAEAQLLPPELYNPNFQEEEDEGGDENAPGSPSFDQPHKTCCPDLNSFIEIKVEKDE

SEQ ID NO: 1701 - protein, 538 aa, Homo sapiens
MSFSATILFSPPSGSEARCCCCACKSETNGGNTGSQGGNPPPSTPITVTGHGLAVQSSEQLLHVIYQRVDKAVGLAEAALGLARANNELLKRLQEEVGDLRQGKVSIPDEDGESRAHSSPPEEPGPLKESPGEAFKALSAVEEECDSVGSGVQVVIEELRQLGAASVGPGPLGFPATQRDMRLPGCTLAASEAAPLLNPLVDDYVASEGAVQRVLVPAYAKQLSPATQLAIQRATPETGPENGTKLPPPRPEDMLNAAAALDSALEESGPGSTGELRHSLGLTVSPCRTRGSGQKNSRRKRDLVLSKLVHNVHNHITNDKRFNGSESIKSSWNISVVKFLLEKLKQELVTSPHNYTDKELKGACVAYFLTKRREYRNSLNPFKGLKEKEEKKLRSRRYRLFANRSSIMRHFGPEDQRLWNDVTEELMSDEEDSLNEPGVWVARPPRFRAQRLTELCYHLDANSKHGTKANRVYGPPSDRLPSAEAQLLPPELYNPNFQEEEDEGGDENAPGSPSFDQPHKTCCPDLNSFIEIKVEKDE

SEQ ID NO: 1702 - protein, 538 aa, Homo sapiens; identical to SEQ ID NO: 1701

SEQ ID NO: 1703 - protein, 538 aa, Homo sapiens; identical to SEQ ID NO: 1701

SEQ ID NO: 1704 - protein, 402 aa, Homo sapiens
MASLGLLLLLLLTALPPLWSSSLPGLDTAESKATIADLILSALERATVFLEQRLPEINLDGMVGVRVLEEQLKSVREKWAQEPLLQPLSLRVGMLGEKLEAAIQRSLHYLKLSDPKYLREFQLTLQPGFWKLPHAWIHTDASLVYPTFGPQDSFSEERSDVCLVQLLGTGTDSSEPCGLSDLCRSLMTKPGCSGYCLSHQLLFFLWARMRGCTQGPLQQSQDYINLFCANMMDLNRRAEAIGYAYPTRDIFMENIMFCGMGGFSDFYKLRWLEAILSWQKQQEGCFGEPDAEDEELSKAIQYQQHFSRRVKRREKQFPDSRSVAQAGVQWRNLGSLQPLPPGFKQFSCLILPSSWDYRSVPPYLANFYIFLVETGFHHVAHAGLELLISRDPPTSGSQSVGL

SEQ ID NO: 1705 - protein, 361 aa, Homo sapiens
MASLGLLLLLLLTALPPLWSSSLPGLDTAESKATIADLILSALERATVFLEQRLPEINLDGMVGVRVLEEQLKSVREKWAQEPLLQPLSLRVGMLGEKLEAAIQRSLHYLKLSDPKYLREFQLTLQPGFWKLPHAWIHTDASLVYPTFGPQDSFSEERSDVCLVQLLGTGTDSSEPCGLSDLCRSLMTKPGCSGYCLSHQLLFFLWARMRGCTQGPLQQSQDYINLFCANMMDLNRRAEAIGYAYPTRDIFMENIMFCGMGGFSDFYKLRWLEAILSWQKQQEGCFGEPDAEDEELSKAIQYQQHFSRRVKRREKQFPDGCSSHNTATAVAALGGFLYILAEYPPANREPHPSTPPPPSSR

SEQ ID NO: 1706 - protein, 434 aa, Homo sapiens
MASLGLLLLLLLTALPPLWSSSLPGLDTAESKATIADLILSALERATVFLEQRLPEINLDGMVGVRVLEEQLKSVREKWAQEPLLQPLSLRVGMLGEKLEAAIQRSLHYLKLSDPKYLREFQLTLQPGFWKLPHAWIHTDASLVYPTFGPQDSFSEERSDVCLVQLLGTGTDSSEPCGLSDLCRSLMTKPGCSGYCLSHQLLFFLWARMRGCTQGPLQQSQDYINLFCANMMDLNRRAEAIGYAYPTRDIFMENNVTGHPVFYLPLCDSFLPPKAAPVTELYTDGPVMFCGMGGFSDFYKLRWLEAILSWQKQQEGCFGEPDAEDEELSKAIQYQQHFSRRVKRREKQFPDSRSVAQAGVQWRNLGSLQPLPPGFKQFSCLILPSSWDYRSVPPYLANFYIFLVETGFHHVAHAGLELLISRDPPTSGSQSVGL

SEQ ID NO: 1707 - protein, 182 aa, Homo sapiens
MEALVCAFSELHIREDAVSQAQGRPGHPDAPPNIYEGGLGSPQPQCPSAQGSKPKNFRLRHLRGLGLYLESHPPPTGQCESHWLGRLMAGGCLPQPEGTAWALDLPQGTLGPRNSLCSALLEARLPRDSLGSSASSSSMDPDKGALPQPSPSRLRPKRSWGTWEEAMCPLCKRTRSGALERP

SEQ ID NO: 1708 - protein, 191 aa, Homo sapiens
  SITE 1: note = misc_feature - Xaa can be any naturally occurring amino acid
XEQGPAAPKSWLLLPTTLALHGSLDAVSQAQGRPGHPDAPPNIYEGGLGSPQPQCPSAQGSKPKNFRLRHLRGLGLYLESHPPPTGQCESHWLGRLMAGGCLPQPEGTAWALDLPQGTLGPRNSLCSALLEARLPRDSLGSSASSSSMDPDKGALPQPSPSRLRPKRSWGTWEEAMCPLCKRTRSGALERP

SEQ ID NO: 1709 - protein, 90 aa, Homo sapiens
MKTLPVLVLSLTLLTVFSETSPILTEKQAKQLLRSRRQDRPSKPGFPDEPMREYMHHLLALEHRAEEQFLEHWLNPHCKPHCDRNRIHPV

SEQ ID NO: 1710 - protein, 275 aa, Homo sapiens
MDGDEKELESSEEGGSAEERRLEPPSSSHYCLYSYRGSRLAQQRGDSEDGSPSGTNAETPSGDDFSLSLADTNLPSEVEPELRSFIAKRLSRGAVFEGLGNVASVELKIPGYRVGCYYCLFQNEKLLPETVTIDSERNPSEYVVCFLGGSEKGLELFRLELDKYIQGLKNNMNCEARGLESHIKSYLSSWFEDVVCPIQRVVLLFQEKLTFLLHAALSYTPVEVKESDEKTKRDINRFLSVASLQGLIHEGTMTSLCMAMTEEQHKSVVIDCSSS

SEQ ID NO: 1711 - protein, 75 aa, Homo sapiens
MLPSLQESMDGDEKELESSEEGGSAEERRLEPPSSSHYCLYSYRGSRLAQQRGDSEDGSPSGTNAETPSGDDFRY

SEQ ID NO: 1712 - protein, 396 aa, Homo sapiens
MLPSLQESMDGDEKELESSEEGGSAEERRLEPPSSSHYCLYSYRGSRLAQQRGDSEDGSPSGTNAETPSGDDFSLSLADTNLPSEVEPELRSFIAKRLSRGAVFEGLGNVASVELKIPGYRVGCYYCLFQNEKLLPETVTIDSERNPSEYVVCFLGGSEKGLELFRLELDKYIQGLKNNMNCEARGLESHIKSYLSSWFEDVVCPIQRVVLLFQEKLTFLLHAALSYTPVEVKESDEKTKRDINRFLSVASLQGLIHEGTMTSLCMAMTEEQHKSVVIDCSSSQPQFCNAGSNRFCEDWMQAFLNGAKGGNPFLFRQVLENFKLKAIQDTNNLKRFIRQAEMNHYALFKCYMFLKNCGSGDILLKIVKVEHEEMPEAKNVIAVLEEFMKEALDQSF

SEQ ID NO: 1713 - protein, 396 aa, Homo sapiens [sequence omitted]

SEQ ID NO: 1714 - protein, 38 aa, Homo sapiens
MNCEARGLESHIKSYLSSWFEDVVCPIQRVVLLFQEKL

SEQ ID NO: 1715 - protein, 88 aa, Homo sapiens
MNCEARGLESHIKSYLSSWFEDVVCPIQRVVLLFQEKLTFLLHAALSYTPVEVKESDEKTKRDINRFLSVASLQGLIHEGTMTSLCMA

SEQ ID NO: 1716 - protein, 132 aa, Homo sapiens
MNCEARGLESHIKSYLSSWFEDVVCPIQRVVLLFQEKLTFLLHAALSYTPVEVKESDEKTKRDINRFLSVASLQGLIHEGTMTSLCMAMTEEQHKSVVIDCSSSQPQFCNAGSNRFCEDWMQAFLNGAKGGN

SEQ ID NO: 1717 - protein, 48 aa, Homo sapiens
  SITE 1: note = misc_feature - Xaa can be any naturally occurring amino acid
XAMTEEQHKSVVIDCSSSQPQFCNAGHTRHKQFEEIYPTGRNESLCFV

SEQ ID NO: 1718 - protein, 97 aa, Homo sapiens
  SITE 1: note = misc_feature - Xaa can be any naturally occurring amino acid
XLLFQEKLTFLLHAALSYTPVEVKESDEKTKRDINRFLSVASLQGLIHEGTMTSLCMAMTEEQHKSVVIDCSSSQPQFCNAEILDPPPLLFTLSHPS

SEQ ID NO: 1719 - protein, 189 aa, Homo sapiens
LIALTSLTAASSFSKAREEEITPVVSIAYKVLEVFPKGRWVLITCCAPQPPPPITYSLCGTKNIKVAKKVVKTHEPASFNLNVTLKSSPDLLTYFCWASSTSGAHVDSARLQMHWELWSKPVSELRANFTLQDRGAGPRVEMICQASSGSPPITNSLIGKDGQVHLQQRPCHRQPANFSFLPSQTSDWF

SEQ ID NO: 1720 - protein, 265 aa, Homo sapiens
MGLPGLFCLAVLAASSFSKAREEEITPVVSIAYKVLEVFPKGRWVLITCCAPQPPPPITYSLCGTKNIKVAKKVVKTHEPASFNLNVTLKSSPDLLTYFCWASSTSGAHVDSARLQMHWELWSKPVSELRANFTLQDRGAGPRVEMICQASSGSPPITNSLIGKDGQVHLQQRPCHRQPANFSFLPSQTSDWFWCQAANNANVQHSALTVVPPGGDQKMEDWQGPLESPILALPLYRSTRRLSEEEFGGFRIGNGEVRGRKAAAM

SEQ ID NO: 1721 - protein, 151 aa, Homo sapiens
  SITE 1: note = misc_feature - Xaa can be any naturally occurring amino acid
XQPPPPITYSLCGTKNIKVAKKVVKTHEPASFNLNVTLKSSPDLLTYFCWASSTSGAHVDSARLQMHWELWSRQRGRPQGGDDLPGVLGQPTYHQQPDREGWAGPPAAETMPQAACQLLLPAEPDIGLVLVPGCKQRQCPAQRPHSGAPRW

SEQ ID NO: 1722 - protein, 35 aa, Homo sapiens
ESMIPITRSLQKALHHLSRLRDLVDDTNGERSPKM

SEQ ID NO: 1723 - protein, 372 aa, Homo sapiens
MAKSKTKHRLCSQESSVSALLASCTLSGSNSSNSDGSFHYKDKLYRSASQALQAYIDDFDLGQIYPGASTGKINIDEDFTNMSQFCNYIYKPNNAFENLDHKKHSNFISCRRHTVNDIDSMSLTTDDLLRLPADGSFSYTYVGPSHRTSKKNKKCRGRLGSLDIEKNPHFQGPYTSMGKDNFVTPVIRSNINGKQCGDKIELLILKAKRNLEQCTEELPKSMKKDDSPCSLDKLEADRSWENIPVTFKSPVPVNSDDSPQQTSRAKSAKGVLEDFLNNDNQSCTLSGGKHHGPVEALKQMLFNLQAVQERFNQNKTTDPKEEIKQVSEDDFSKLQLKESMIPITRSLQKALHHLSRLRDLVDDTNGERSPKM

SEQ ID NO: 1724 - protein, 533 aa, Homo sapiens
MAKSKTKHRLCSQESSVSALLASCTLSGSNSSNSDGSFHYKDKLYRSASQALQAYIDDFDLGQIYPGASTGKINIDEDFTNMSQFCNYIYKPNNAFENLDHKKHSNFISCRRHTVNDIDSMSLTTDDLLRLPADGSFSYTYVGPSHRTSKKNKKCRGRLGSLDIEKNPHFQGPYTSMGKDNFVTPVIRSNINGKQCGRLKNPKLMNRTNNCISESSLSFPKKSSFKDSSEHSLEKNYPRWLTSQKSDLNVSGITSIPDFKYPVWLHNQDLLPDANSQRVYQIFKDDQCSPRHSHQAQGTSRLINKLDCFEYAFEPSNFSNSLSDDKELVNEYKCDFEHSQCQCENPLLPGQSTKPFSGDKIELLILKAKRNLEQCTEELPKSMKKDDSPCSLDKLEADRSWENIPVTFKSPVPVNSDDSPQQTSRAKSAKGVLEDFLNNDNQSCTLSGGKHHGPVEALKQMLFNLQAVQERFNQNKTTDPKEEIKQVSEDDFSKLQLKESMIPITRSLQKALHHLSRLRDLVDDTNGERSPKM

SEQ ID NO: 1725 - protein, 533 aa, Homo sapiens; identical to SEQ ID NO: 1724

SEQ ID NO: 1726 - protein, 151 aa, Homo sapiens
MKKDDSPCSLDKLEADRSWENIPVTFKSPVPVNSDDSPQQTSRAKSAKGVLEDFLNNDNQSCTLSGGKHHGPVEALKQMLFNLQAVQERFNQNKTTDPKEEIKQVSEDDFSKLQLKESMIPITRSLQKALHHLSRLRDLVDDTNGERSPKM

SEQ ID NO: 1727 - protein, 142 aa, Homo sapiens
MFVDNRIQKSMLLDLNKEIMNELGVTVVGDIIAILKHAKVVHRQDMCKAATESVPCSPSPLAGEIRRGTSAASRMITNSLNHDSPPSTPPRRPDTSTSKISVTVSNKMAAKSAKATAALARREEESLAVPAKRRRVTAEMEG

SEQ ID NO: 1728 - protein, 355 aa, Homo sapiens
MFVDNRIQKSMLLDLNKEIMNELGVTVVGDIIAILKHAKVVHRQDMCKAATESVPCSPSPLAGEIRRGTSAASRMITNSLNHDSPPSTPPRRPDTSTSKISVTVSNKMAAKSAKATAALARREEESLAVPAKRRRVTAEMEGKYVINMPKGTTPRTRKILEQQQAAKGLHRTSVFDRLGAETKADTTTGSKPTGVFSRLGATPETDEDLAWDSDNDSSSSVLQYAGVLKKLGRGPAKASPQPALTVKAKATSSATTAAAPTLRRLALSSRSGLERKPESLSKVSIIKRLGAAALVPEAQDSQVTSTKSKSSAEVKVTIKRTLVGPRGSSSSEGLGAQMDHAGTVSVFKRLGRRTF

SEQ ID NO: 1729 - protein, 422 aa, Homo sapiens
MVMAALSLVAACWGRAAADESVQLPAAPGSSVRARETMVSVTMATSEWIQFFKEAGIPPGPAVNYAVMFVDNRIQKSMLLDLNKEIMNELGVTVVGDIIAILKHAKVVHRQDMCKAATESVPCSPSPLAGEIRRGTSAASRMITNSLNHDSPPSTPPRRPDTSTSKISVTVSNKMAAKSAKATAALARREEESLAVPAKRRRVTAEMEGKYVINMPKGTTPRTRKILEQQQAAKGLHRTSVFDRLGAETKADTTTGSKPTGVFSRLGATPETDEDLAWDSDNDSSSSVLQYAGVLKKLGRGPAKASPQPALTVKAKATSSATTAAAPTLRRLALSSRSGLERKPESLSKVSIIKRLGAAALVPEAQDSQVTSTKSKSSAEVKVTIKRTLVGPRGSSSSEGLGAQMDHAGTVSVFKRLGRRTF

SEQ ID NO: 1730 - protein, 141 aa, Homo sapiens
MVMAALSLVAACWGRAAADESVQLPAAPGSSVRARETMVSVTMATSEWIQFFKEAGIPPGPAVNYAVMFVDNRIQKSMLLDLNKEIMNELGVTVVGDIIAILKHAKVVHRQGLTPSPRLECSSTISAHCNLCLPGHVQSCH

SEQ ID NO: 1731 - protein, 146 aa, Homo sapiens
MVSVTMATSEWIQFFKEAGIPPGPAVNYAVMFVDNRIQKSMLLDLNKEIMNELGVTVVGDIIAILKHAKVVHRQDMCKAATESVPCSPSPLAGEIRRGTSAASRMITNSLNHDSPPSTPPRRPDTSTSKISVTVSNKMAAKSAKAT

SEQ ID NO: 1732 - protein, 168 aa, Homo sapiens
  SITE 1: note = misc_feature - Xaa can be any naturally occurring amino acid
XEMEGKYVINMPKGTTPRTRKILEQQQAAKGLHRTSVFDRLGAETKADTTTGSKPTGVFSRLGATPETDEDLAWDSDNDSSSSVLQYAGVLKKLGRGPAKASPQPALTVKAKATSSATTAAAPTLRRLALSSRSGLERKPESLSKVSIIKRLGAAALVPEAQDSQASA

SEQ ID NO: 1733 - protein, 146 aa, Homo sapiens
  SITE 1: note = misc_feature - Xaa can be any naturally occurring amino acid
XGSSVRARETMVSVTMATSEWIQFFKEAGIPPGPAVNYAVMFVDNRIQKSMLLDLNKEIMNELGVTVVGDIIAILKHAKVVHRQDMCKAATESVPCSPSPLAGEIRRGTSDGVSLCCPGWSTVARPWLSATSASRVQAVLLPQPPE

SEQ ID NO: 1734 - protein, 133 aa, Homo sapiens
  SITE 1: note = misc_feature - Xaa can be any naturally occurring amino acid
XTDEDLAWDSDNDSSSSVLQYAGVLKKLGRGPAKASPQPALTVKAKATSSATTAAAPTLRRLALSSRSGLERKPESLSKVSIIKRLGAAALVPEAQDSQVTSTKSPTVRCVLPDPPVPPASQRPPRRRWRRAC

SEQ ID NO: 1735 - protein, 110 aa, Homo sapiens
MRSECVLGAASDSGQEAPRDTWFLQGWKASRRFLIKGSVAGGAVYLVYDQELLGPSDKSQAALQKAGEVVPPAMYQFSQYVCQQTGLQIPQLPAPPKIYFPIRDSWNAGI

SEQ ID NO: 1736 - protein, 140 aa, Homo sapiens
MRSECVLGAASDSGQEAPRDTWFLQGWKASRRFLIKGSVAGGAVYLVYDQELLGPSDKSQAALQKAGEVVPPAMYQFSQYVCQQTGLQIPQLPAPPKIYFPIRDSWNAGIMTVMSALSVAPSKAREYSKEGWEYVKARTK

SEQ ID NO: 1737 - protein, 88 aa, Homo sapiens
MVARVWSLMRFLIKGSVAGGAVYLVYDQELLGPSDKSQAALQKAGEVVPPAMYQFSQYVCQQTGLQIPQLPAPPKIYFPIRDSWNAGI

SEQ ID NO: 1738 - protein, 118 aa, Homo sapiens
MVARVWSLMRFLIKGSVAGGAVYLVYDQELLGPSDKSQAALQKAGEVVPPAMYQFSQYVCQQTGLQIPQLPAPPKIYFPIRDSWNAGIMTVMSALSVAPSKAREYSKEGWEYVKARTK

SEQ ID NO: 1739 - protein, 100 aa, Homo sapiens
MASKSWLNFLTFLCGSAIGFLLCSQLFSILLGEKVDTQPNVLHNDPHARHSDDNGQNHLEGQMNFNADSSQHKDENTDIAENLYQKVRILCWVMTGPQNL

SEQ ID NO: 1740 - protein, 131 aa, Homo sapiens
MASKSWLNFLTFLCGSAIGFLLCSQLFSILLGEKVDTQPNVLHNDPHARHSDDNGQNHLEGQMNFNADSSQHKDENTDIAENLYQKVRILCWVMTGPQNLEKKAKHVKATWAQRCNKVLFMSSEENKDFPA

SEQ ID NO: 1741 - protein, 363 aa, Homo sapiens
MASKSWLNFLTFLCGSAIGFLLCSQLFSILLGEKVDTQPNVLHNDPHARHSDDNGQNHLEGQMNFNADSSQHKDENTDIAENLYQKVRILCWVMTGPQNLEKKAKHVKATWAQRCNKVLFMSSEENKDFPAVGLKTKEGRDQLYWKTIKAFQYVHEHYLEDADWFLKADDDTYVILDNLRWLLSKYDPEEPIYFGRRFKPYVKQGYMSGGAGYVLSKEALKRFVDAFKTDKCTHSSSIEDLALGRCMEIMNVEAGDSRDTIGKETFHPFVPEHHLIKGYLPRTFWYWNYNYYPPVEGPGCCSDLAVSFHYVDSTTMYELEYLVYHLRPYGYLYRYQPTLPERILKEISQANKNEDTKVKLGNP

SEQ ID NO: 1742 - protein, 309 aa, Homo sapiens
MASKSWLNFLTFLCGSAIGFLLCSQLFSILLGEKVDTQPNVLHNDPHARHSDDNGQNHLEGQMNFNADSSQHKDENTDIAENLYQKVRILCWVMTGPQNLEKKAKHVKATWAQRCNKVLFMSSEENKDFPAVGLKTKEGRDQLYWKTIKAFQYVHEHYLEDADWFLKADDDTYVILDNLRWLLSKYDPEEPIYFGRRFKPYVKQGYMSGGAGYVLSKEALKRFVDAFKTDKCTHSSSIEDLALGRCMEIMNVEAGDSRDTIGKETFHPFVPEHHLIKGYLPRTFWYWNYNYYPPVEVSLEILLLCQYLD

SEQ ID NO: 1743 - protein, 363 aa, Homo sapiens; identical to SEQ ID NO: 1741

SEQ ID NO: 1744 - protein, 823 aa, Homo sapiens
MWGSPALAWAVWLACVQPTVFPWSLSFRSDTDKPSSAAEVLTEASSCWTDTVECFSDYMTLWIPRSHVEGLRRWLARTLHLPGTWRSPDHLDSSLAKCGYFLHLASDGDFLFRVQYSACFVQKEKANYRLEIRIFQKGVMGLERSDRYIMKCPMLRSRLGQESVHCGPMFIQVSRPLPLWRDNRQTPWLLSLRGELVASLEDASLMGLYVDMNATTVTVQSPRQGLLQRWEVLNTSAELLPLWLVSGHHAYSLEAACPPVSFQPESEVLVHIPKQRLGLVKRGSYIEETLSLRFLRVHQSNIFMVTENKDFVVVSIPAAGVLQVQRCQEVGGTPGTQAFYRVDLSLEFAEMAAPVLWTVESFFQCVGSGTESPASTAALRTTPSPPSPGPETPPAGVPPAASSQVWAAGPAAQEWLSRDLLHRPSDALAKKGLGPFLQTAKPARRGQTSASILPRVVQAQRGPQPPPGEAGIPGHPTPPATLPSEPVEGVQASPWRPRPVLPTHPALTLPVSSDASSPSPPAPRPERPESLLVSGPSVTLTEGLGTVRPEQDPAKSPGSPLLLRGLSSGDVAAPEPIMGEPGQASEEFQPLARPWRATLAAEELVSHRSPGEPQETCSGTEVERPRQTGPGLPREGARGHMDLSSSEPSQDIEGPGLSILPARDATFSTPSVRQPDPSAWLSSGPELTGMPRVRLAAPLAVLPMEPLPPEPVRPAALLTPEASSVGGPDQARYLESAPGWPVGQEEWGVAHTSSPPSTQTLSLWAPTGVLLPSLVELEYPFQAGRGASLQQELTEPTLALSAESHRPPELQDSVEGLSERPSR

SEQ ID NO: 1745 - protein, 658 aa, Homo sapiens
  SITE 1: note = misc_feature - Xaa can be any naturally occurring amino acid
XIMKCPMLRSRLGQESVHCGPMFIQVSRPLPLWRDNRQTPWLLSLRGELVASLEDASLMGLYVDMNATTVTVQSPRQGLLQRWEVSGGQQALPGVSFQPESEVLVHIPKQRLGLVKRGSYIEETLSLRFLRVHQSNIFMVTENKDFVVVSIPAAGVLQVQRCQEVGGTPGTQAFYRVDLSLEFAEMAAPVLWTVESFFQCVGSGTESPASTAALRTTPSPPSPGPETPPAGVPPAASSQVWAAGPAAQEWLSRDLLHRPSDALAKKGLGPFLQTAKPARRGQTSASILPRVVQAQRGPQPPPGEAGIPGHPTPPATLPSEPVEGVQASPWRPRPVLPTHPALTLPVSSDASSPSPPAPRPERPESLLVSGPSVTLTEGLGTVRPEQDPAKSPGSPLLLRGLSSGDVAAPEPIMGEPGQASEEFQPLARPWRATLAAEELVSHRSPGEPQETCSGTEVERPRQTGPGLPREGARGHMDLSSSEPSQDIEGPGLSILPARDATFSTPSVRQPDPSAWLSSGPELTGMPRVRLAAPLAVLPMEPLPPEPVRPAALLTPEASSVGGPDQARYLESAPGWPVGQEEWGVAHTSSPPSTQTLSLWAPTGVLLPSLVELEYPFQAGRGASLQQELTEPTLALSAESHRPPELQDSVEGLSERPSR

SEQ ID NO: 1746 - protein, 69 aa, Homo sapiens
  SITE 1: note = misc_feature - Xaa can be any naturally occurring amino acid
XPSTQTLSLWAPTGVLLPSLVELEYPFQAGRGASLQQELTEPTLALSAESHRPPELQDSVEGLSERPSR

SEQ ID NO: 1747 - protein, 775 aa, Homo sapiens
  SITE 1: note = misc_feature - Xaa can be any naturally occurring amino acid
XSLSFRSDTDKPSSAAEVLTEASSCWTDTVECFSDYMTLWIPRSHVEGLRRWLARTLHLPGTWRSPDHLDSSLAKCGYFLHLASDGDFLFRVQYSACFVQKEKANYRLEIRIFQKGVMGLERSDRYIMKCPMLRSRLGQESVHCGPMFIQVSRPLPLWRDNRQTPWLLSLRGELVASLEDASLMGLYVDMNATTVTVQSPRQGLLQRWEVLNTSAELLPLWLVSGHHAYSLEAACPPVSFQPESEVLVHIPKQRLGLVKRGSYIEETLSLRFLRVHQSNIFMVTENKDFVVVSIPAAGVLQVQRCQEVGGTPGTQAFYRVDLSLEFAEMAAPVLWTVESFFQCVGSGTESPASTAALRTTPSPPSPGPETPPAGVPPAASSQKGLGPFLQTAKPARRGQTSASILPRVVQAQRGPQPPPGEAGIPGHPTPPATLPSEPVEGVQASPWRPRPVLPTHPALTLPVSSDASSPSPPAPRPERPESLLVSGPSVTLTEGLGTVRPEQDPAKSPGSPLLLRGLSSGDVAAPEPIMGEPGQASEEFQPLARPWRATLAAEELVSHRSPGEPQETCSGTEVERPRQTGPGLPREGARGHMDLSSSEPSQDIEGPGLSILPARDATFSTPSVRQPDPSAWLSSGPELTGMPRVRLAAPLAVLPMEPLPPEPVRPAALLTPEASSVGGPDQARYLESAPGWPVGQEEWGVAHTSSPPSTQTLSLWAPTGVLLPSLVELEYPFQAGRGASLQQELTEPTLALSAESHRPPELQDSVEGLSERPSR

SEQ ID NO: 1748 - protein, 15 aa, Homo sapiens
MALRHLALLAGLLVG

SEQ ID NO: 1749 - protein, 57 aa, Homo sapiens
MALRHLALLAGLLVGVASKSMENTAQLPECCVDVVGVNASCPGASLCGPGCYRRWNA

SEQ ID NO: 1750 - protein, 86 aa, Homo sapiens
MALRHLALLAGLLVGVASKSMENTAQLPECCVDVVGVNASCPGASLCGPGCYRRWNADGSASCVRCGNGTLPAYNGSECRSFAGPG

SEQ ID NO: 1751 - protein, 103 aa, Homo sapiens
MALRHLALLAGLLVGVASKSMENTAQLPECCVDVVGVNASCPGASLCGPGCYRRWNADGSASCVRCGNGTLPAYNGSECRSFAGPGAPFPMNRSSGTPGRPHP

SEQ ID NO: 1752 - protein, 224 aa, Homo sapiens [sequence omitted]

SEQ ID NO: 1753 - protein, 189 aa, Homo sapiens
MALRHLALLAGLLVGVASKSMENTAQLPECCVDVVGVNASCPGASLCGPGCYRRWNADGSASCVRCGNGTLPAYNGSECRSFAGPGAPFPMNRSSGTPGRPHPGAPRVAASLFLGTFFISSGLILSVAGFFYLKRSSKLPRACYRRNKAPALQPGEAAAMIPPPQSSDVGSAGKEDPPRQGRPPIPAPP

SEQ ID NO: 1754 - protein, 344 aa, Homo sapiens
MALRHLALLAGLLVGVASKSMENTAQLPECCVDVVGVNASCPGASLCGPGCYRRWNADGSASCVRCGNGTLPAYNGSECRSFAGPGAPFPMNRSSGTPGRPHPGAPRVAASLFLGTFFISSGLILSVAGFFYLKRSSKLPRACYRRNKAPALQPGEAAAMIPPPQSSGNSSCRIPLWGFPSLGQSQGALWVCPQTGLPGSGSRPPLPGSPGDPPTRQGQGRIWLVPPALDLSWIWPAPPARPPLIPVTSMLFPVPETWGLQERRTHHDRADPQYLLLLEVQLHPRTDAAGLRQALLSSHRFSGAGSGGPKSQPVRKPRYVRRERPLDRATDPAAFPGEARISNV

SEQ ID NO: 1755 - protein, 198 aa, Homo sapiens
MALRHLALLAGLLVGVASKSMENTAQLPECCVDVVGVNASCPGASLCGPGCYRRWNADGSASCVRCGNGTLPAYNGSECRSFAGPGAPFPMNRSSGTPGRPHPGAPRVAASLFLGTFFISSGLILSVAGFFYLKRSSKLPRACYRRNKAPALQPGEAAAMIPPPQSSVRKPRYVRRERPLDRATDPAAFPGEARISNV

SEQ ID NO: 1756 - protein, 198 aa, Homo sapiens; identical to SEQ ID NO: 1755

SEQ ID NO: 1757 - protein, 98 aa, Homo sapiens
MALRHLALLAGLLVGVASKSMENTDTDVPAPEVLTRSTAGVRGACASQRGALRCLLGERLLRNGWVRRGPHGEASWPAMGAPLPAVTAQRAAHRYRGV

SEQ ID NO: 1758 - protein, 64 aa, Homo sapiens
MALRHLALLAGLLVGVASKSMENTDTDVPAPEVLTRSTAGVRGACASQRGALRCLLGPAARVLC

SEQ ID NO: 1759 - protein, 111 aa, Homo sapiens
MALRHLALLAGLLVGVASKSMENTDTDVPAPEVLTRSTAGVRGACASQRGALRCLLGPAARVLCGCGGRQRQLPRRKSVWSRLLQALERGRERQLRPLWERNPPSLQRLRV

SEQ ID NO: 1760 - protein, 380 aa, Homo sapiens
MALRHLALLAGLLVGVASKSMENTVTRNSTAVINTQAEGTLSPPGLSSLPVVREWALTHTAQLPECCVDVVGVNASCPGASLCGPGCYRRWNADGSASCVRCGNGTLPAYNGSECRSFAGPGAPFPMNRSSGTPGRPHPGAPRVAASLFLGTFFISSGLILSVAGFFYLKRSSKLPRACYRRNKAPALQPGEAAAMIPPPQSSGNSSCRIPLWGFPSLGQSQGALWVCPQTGLPGSGSRPPLPGSPGDPPTRQGQGRIWLVPPALDLSWIWPAPPARPPLIPVTSMLFPVPETWGLQERRTHHDRADPQYLLLLEVQLHPRTDAAGLRQALLSSHRFSGAGSGGPKSQPVRKPRYVRRERPLDRATDPAAFPGEARISNV

SEQ ID NO: 1761 - protein, 289 aa, Homo sapiens
MARKIMQDKEKIREKYGPEWARLPPAQQDEIIDRCLVGPRAPAPRDPGDSEELTRFPGLRGPTGQKVVRFGDEDLTWQDEHSAPFSWETKSQMEFSISALSIQEPSNGTAASEPRPLSKASQGSQALKSSQGSRSSSLDALGPTRKEEEASFWKINAERSRGEGPEAEFQSLTPSQIKSMEKGEKVLPPCYRQEPAPKDREAKVERPSTLRQEQRPLPNVSTERERPQPVQAFSSALHEAAPSQLEGKLPSPDVRQDDGEDTLFSEPKFAQVSSSNVVLKTGFDFLDNW

SEQ ID NO: 1762 - protein, 327 aa, Homo sapiens
MASMAAAIAASRSAVMSGNRPLDDRERKRFTYFSSLSPMARKIMQDKEKIREKYGPEWARLPPAQQDEIIDRCLVGPRAPAPRDPGDSEELTRFPGLRGPTGQKVVRFGDEDLTWQDEHSAPFSWETKSQMEFSISALSIQEPSNGTAASEPRPLSKASQGSQALKSSQGSRSSSLDALGPTRKEEEASFWKINAERSRGEGPEAEFQSLTPSQIKSMEKGEKVLPPCYRQEPAPKDREAKVERPSTLRQEQRPLPNVSTERERPQPVQAFSSALHEAAPSQLEGKLPSPDVRQDDGEDTLFSEPKFAQVSSSNVVLKTGFDFLDNW

SEQ ID NO: 1763 - protein, 197 aa, Homo sapiens
MEFSISALSIQEPSNGTAASEPRPLSKASQGSQALKSSQGSRSSSLDALGPTRKEEEASFWKINAERSRGEGPEAEFQSLTPSQIKSMEKGEKVLPPCYRQEPAPKDREAKVERPSTLRQEQRPLPNVSTERERPQPVQAFSSALHEAAPSQLEGKLPSPDVRQDDGEDTLFSEPKFAQVSSSNVVLKTGFDFLDNW

SEQ ID NO: 1764 - protein, 110 aa, Homo sapiens
MEKGEKVLPPCYRQEPAPKDREAKVERPSTLRQEQRPLPNVSTERERPQPVQAFSSALHEAAPSQLEGKLPSPDVRQDDGEDTLFSEPKFAQVSSSNVVLKTGFDFLDNW

SEQ ID NO: 1765 - protein, 160 aa, Homo sapiens
MQDKEKIREKYGPEWARLPPAQQDEIIDRCLVGPRAPAPRDPGDSEELTRFPGLRGPTGQKVVRFGDEDLTWQDEHSAPFSWETKSQMEFSISALSIQEPSNGTAASEPRPLSKASQGSQALKSSQGSRSSSLDALGPTRKEEEASFWKINAERSRGEGP

SEQ ID NO: 1766 - protein, 131 aa, Homo sapiens
MDVLFVAIFAVPLILGQEYEDEERLGEDEYYQVVYYYTVTPSYDDFSADFTIDYSIFESEDRLNRLDKDITEAIETTISLETARADHPKPVTVKPVTTEPSPDLNDAVSSLRSPIPLLLSCAFVQVGMYFM

SEQ ID NO: 1767 - protein, 131 aa, Homo sapiens; identical to SEQ ID NO: 1766

SEQ ID NO: 1768 - protein, 121 aa, Homo sapiens
MDVLFVAIFAVPLILGQEYEDEERLGEDEYYQVVYYYTVTPSYDDFSADFTIDYSIFESEDRLNRLDKDITEAIETTISLETARADHPKPVTVKPVTTEPVEEGCYDSLDGSLARGNWKIK

SEQ ID NO: 1769 - protein, 341 aa, Homo sapiens
MVPAAGALLWVLLLNLGPRAAGAQGLTQTPTEMQRVSLRFGGPMTRSYRSTARTGLPRKTRIILEDENDAMADADRLAGPAAAELLAATVSTGFSRSSAINEEDGSSEEGVVINAGKDSTSRELPSATPNTAGSSSTRFIANSQEPEIRLTSSLPRSPGRSTEDLPGSQATLSQWSTPGSTPSRWPSPSPTAMPSPEDLRLVLMPWGPWHCHCKSGTMSRSRSGKLHGLSGRLRVGALSQLRTEHKPCTYQQCPCNRLREECPLDTSLCTDTNCASQSTTSTRTTTTPFPTIHLRSSPSLPPASPCPALAFWKRVRIGLEDIWNSLSSVFTEMQPIDRNQR

SEQ ID NO: 1770 - protein, 221 aa, Homo sapiens
MEGPRGWLVLCVLAISLASMVTEDLCRAPDGKKGEAGRPGRRGRPGLKGEQGEPGAPGIRTGIQGLKGDQGEPGPSGNPGKVGYPGPSGPLGARGIPGIKGTKGSPGNIKDQPRPAFSAIRRNPPMGGNVVIFDTVITNQEEPYQNHSGRFVCTVPGYYYFTFQVLSQWEICLSIVSSSRGQVRRSLGFCDTTNKGLFQVVSGGMVLQLQQGDQVWVEKDP

SEQ ID NO: 1771 - protein, 245 aa, Homo sapiens
MEGPRGWLVLCVLAISLASMVTEDLCRAPDGKKGEAGRPGRRGRPGLKGEQGEPGAPGIRTGIQGLKGDQGEPGPSGNPGKVGYPGPSGPLGARGIPGIKGTKGSPGNIKDQPRPAFSAIRRNPPMGGNVVIFDTVITNQEEPYQNHSGRFVCTVPGYYYFTFQVLSQWEICLSIVSSSRGQVRRSLGFCDTTNKGLFQVVSGGMVLQLQQGDQVWVEKDPKKGHIYQGSEADSVFSGFLIFPSA

SEQ ID NO: 1772 - protein, 245 aa, Homo sapiens; identical to SEQ ID NO: 1771

SEQ ID NO: 1773 - protein, 153 aa, Homo sapiens
MKIPWGSIPVLMLLLLLGLIDISQAQLSCTGPPAIPGIPGIPGTPGPDGQPGTPGIKGEKGLPGLAGDHGEFGEKGDPGIPGNPGKVGPKGPMGPKGGPGAPGAPGPKGESGDYKATQKIAFSATRTINVPLRRDQTIRFDHVITNMNNNYEP

SEQ ID NO: 1774 - protein, 229 aa, Homo sapiens
MKIPWGSIPVLMLLLLLGLIDISQAQLSCTGPPAIPGIPGIPGTPGPDGQPGTPGIKGEKGLPGLAGDHGEFGEKGDPGIPGNPGKVGPKGPMGPKGGPGAPGAPGPKGESGDYKATQKIAFSATRTINVPLRRDQTIRFDHVITNMNNNYEPRSGKFTCKVPGLYYFTYHASSRGNLCVNLMRGRERAQKVVTFCDYAYNTFQVTTGGMVLKLEQGENVFLQATDKNS

SEQ ID NO: 1775 - protein, 251 aa, Homo sapiens
MKIPWGSIPVLMLLLLLGLIDISQAQLSCTGPPAIPGIPGIPGTPGPDGQPGTPGIKGEKGLPGLAGDHGEFGEKGDPGIPGNPGKVGPKGPMGPKGGPGAPGAPGPKGESGDYKATQKIAFSATRTINVPLRRDQTIRFDHVITNMNNNYEPRSGKFTCKVPGLYYFTYHASSRGNLCVNLMRGRERAQKVVTFCDYAYNTFQVTTGGMVLKLEQGENVFLQATDKNSLLGMEGANSIFSGFLLFPDMEA

SEQ ID NO: 1776 - protein, 253 aa, Homo sapiens
MMMKIPWGSIPVLMLLLLLGLIDISQAQLSCTGPPAIPGIPGIPGTPGPDGQPGTPGIKGEKGLPGLAGDHGEFGEKGDPGIPGNPGKVGPKGPMGPKGGPGAPGAPGPKGESGDYKATQKIAFSATRTINVPLRRDQTIRFDHVITNMNNNYEPRSGKFTCKVPGLYYFTYHASSRGNLCVNLMRGRERAQKVVTFCDYAYNTFQVTTGGMVLKLEQGENVFLQATDKNSLLGMEGANSIFSGFLLFPDMEA

SEQ ID NO: 1777 - protein, 245 aa, Homo sapiens
MDVGPSSLPHLGLKLLLLLLLLPLRGQANTGCYGIPGMPGLPGAPGKDGYDGLPGPKGEPGIPAIPGIRGPKGQKGEPGLPGHPGKNGPMGPPGMPGVPGPMGIPGEPGEEGRYKQKFQSVFTVTRQTHQPPAPNSLIRFNAVLTNPQGDYDTSTGKFTCKVPGLYYFVYHASHTANLCVLLYRSGVKVVTFCGHTSKTNQVNSGGVLLRLQVGEEVWLAVNDYYDMVGIQGSDSVFSGFLLFPD

SEQ ID NO: 1778 - protein, 245 aa, Homo sapiens; identical to SEQ ID NO: 1777

SEQ ID NO: 1779 - protein, 245 aa, Homo sapiens; identical to SEQ ID NO: 1777

SEQ ID NO: 1780 - protein, 258 aa, Homo sapiens
MLLVLVVLIPVLVSSGGPEGHYEMLGTCRMVCDPYPARGPGAGARTDGGDALSEQSGAPPPSTLVQGPQGKPGRTGKPGPPGPPGDPGPPGPVGPPGEKGEPGKPGPPGLPGAGGSGAISTATYTTVPRVAFYAGLKNPHEGYEVLKFDDVVTNLGNNYDAASGKFTCNIPGTYFFTYHVLMRGGDGTSMWADLCKNGQVRASAIAQDADQNYDYASNSVILHLDAGDEVFIKLDGGKAHGGNSNKYSTFSGFIIYSD

SEQ ID NO: 1781 - protein, 287 aa, Homo sapiens
MALGLLIAVPLLLQAAPRGAAHYEMMGTCRMICDPYTAAPGGEPPGAKAQPPGPSTAALEVMQDLSANPPPPFIQGPKGDPGRPGKPGPRGPPGEPGPPGPRGPPGEKGDSGRPGLPGLQLTAGTASGVGVVGGGAGVGGDSEGEVTSALSATFSGPKIAFYVGLKSPHEGYEVLKFDDVVTNLGNHYDPTTGKFSCQVRGIYFFTYHILMRGGDGTSMWADLCKNGQVRASAIAQDADQNYDYASNSVVLHLDSGDEVYVKLDGGKAHGGNNNKYSTFSGFLLYPD

SEQ ID NO: 1782 - protein, 255 aa, Homo sapiens
MVLLLVILIPVLVSSAGTSAHYEMLGTCRMVCDPYGGTKAPSTAATPDRGLMQSLPTFIQGPKGEAGRPGKAGPRGPPGEPGPPGPMGPPGEKGEPGRQGLPGPPGAPGLNAAGAISAATYSTVPKIAFYAGLKRQHEGYEVLKFDDVVTNLGNHYDPTTGKFTCSIPGIYFFTYHVLMRGGDGTSMWADLCKNNQVRASAIAQDADQNYDYASNSVVLHLEPGDEVYIKLDGGKAHGGNNNKYSTFSGFIIYAD

SEQ ID NO: 1783 - protein, 213 aa, Homo sapiens
MVLLLVILIPVLVSSAGTSAHYEMLGTCRMVCDPYGGTKAPSTAATPDRGLMQSLPTFIQGPPGAPGLNAAGAISAATYSTVPKIAFYAGLKRQHEGYEVLKFDDVVTNLGNHYDPTTGKFTCSIPGIYFFTYHVLMRGGDGTSMWADLCKNNQVRASAIAQDADQNYDYASNSVVLHLEPGDEVYIKLDGGKAHGGNNNKYSTFSGFIIYAD

SEQ ID NO: 1784 - protein, 238 aa, Homo sapiens
MVLLLLVAIPLLVHSSRGPAHYEMLGRCRMVCDPHGPRGPGPDGAPASVPPFPPGAKGEVGRRGKAGLRGPPGPPGPRGPPGEPGRPGPPGPPGPGPGGVAPAAGYVPRIAFYAGLRRPHEGYEVLRFDDVVTNVGNAYEAASGKFTCPMPGVYFFAYHVLMRGGDGTSMWADLMKNGQVRASAIAQDADQNYDYASNSVILHLDVGDEVFIKLDGGKVHGGNTNKYSTFSGFIIYPD

SEQ ID NO: 1785 - protein, 281 aa, Homo sapiens
MGSRGQGLLLAYCLLLAFASGLVLSRVPHVQGEQQEWEGTEELPSPPDHAERAEEQHEKYRPSQDQGLPASRCLRCCDPGTSMYPATAVPQINITILKGEKGDRGDRGLQGKYGKTGSAGARGHTGPKGQKGSMGAPGERCKSHYAAFSVGRKKPMHSNHYYQTVIFDTEFVNLYDHFNMFTGKFYCYVPGLYFFSLNVHTWNQKETYLHIMKNEEEVVILFAQVGDRSIMQSQSLMLELREQDQVWVRLYKGERENAIFSEELDTYITFSGYLVKHATEP

SEQ ID NO: 1786 - protein, 281 aa, Homo sapiens; identical to SEQ ID NO: 1785

SEQ ID NO: 1787 - protein, 281 aa, Homo sapiens; identical to SEQ ID NO: 1785

SEQ ID NO: 1788 - protein, 281 aa, Homo sapiens; identical to SEQ ID NO: 1785

SEQ ID NO: 1789 - protein, 281 aa, Homo sapiens; identical to SEQ ID NO: 1785

SEQ ID NO: 1790 - protein, 281 aa, Homo sapiens; identical to SEQ ID NO: 1785

SEQ ID NO: 1791 - protein, 281 aa, Homo sapiens; identical to SEQ ID NO: 1785

SEQ ID NO: 1792 - protein, 281 aa, Homo sapiens; identical to SEQ ID NO: 1785

SEQ ID NO: 1793 - protein, 199 aa, Homo sapiens
MYPATAVPQINITILKGEKGDRGDRGLQGKYGKTGSAGARGHTGPKGQKGSMGAPGERCKSHYAAFSVGRKKPMHSNHYYQTVIFDTEFVNLYDHFNMFTGKFYCYVPGLYFFSLNVHTWNQKETYLHIMKNEEEVVILFAQVGDRSIMQSQSLMLELREQDQVWVRLYKGERENAIFSEELDTYITFSGYLVKHATEP

SEQ ID NO: 1794 - protein, 199 aa, Homo sapiens; identical to SEQ ID NO: 1793

SEQ ID NO: 1795 - protein, 302 aa, Homo sapiens
MRRWAWAAVVVLLGPQLVLLGGVGARREAQRTQQPGQRADPPNATASASSREGLPEAPKPSQASGPEFSDAHMTWLNFVRRPDDGALRKRCGSRDKKPRDLFGPPGPPGAEVTAETLLHEFQELLKEATERRFSGLLDPLLPQGAGLRLVGEAFHCRLQGPRRVDKRTLVELHGFQAPAAQGAFLRGSGLSLASGRFTAPVSGIFQFSASLHVDHSELQGKARLRARDVVCVLICIESLCQRHTCLEAVSGLESNSRVFTLQVQGLLQLQAGQYASVFVDNGSGAVLTIQAGSSFSGLLLGT

SEQ ID NO: 1796 - protein, 330 aa, Homo sapiens
MGKLCLGPTLCPAAAAEESRDAEPRRELLCSGRPWTWRAAARVTTMIPWVLLACALPCAADPLLGAFARRDFRKGSPQLVCSLPGPQGPPGPPGAPGPSGMMGRMGFPGKDGQDGHDGDRGDSGEEGPPGRTGNRGKPGPKGKAGAIGRAGPRGPKGVNGTPGKHGTPGKKGPKGKKGEPGLPGPCSCGSGHTKSAFSVAVTKSYPRERLPIKFDKILMNEGGHYNASSGKFVCGVPGIYYFTYDITLANKHLAIGLVHNGQYRIRTFDANTGNHDVASGSTILALKQGDEVWLQIFYSEQNGLFYDPYWTDSLFTGFLIYADQDDPNEV

SEQ ID NO: 1797 - protein, 246 aa, Homo sapiens
MLWRQLIYWQLLALFFLPFCLCQDEYMESPQTGGLPPDCSKCCHGDYSFRGYQGPPGPPGPPGIPGNHGNNGNNGATGHEGAKGEKGDKGDLGPRGERGQHGPKGEKGYPGIPPELQIAFMASLATHFSNQNSGIIFSSVETNIGNFFDVMTGRFGAPVSGVYFFTFSMMKHEDVEEVYVYLMHNGNTVFSMYSYEMKGKSDTSSNHAVLKLAKGDEVWLRMGNGALHGDHQRFSTFAGFLLFETK

SEQ ID NO: 1798 - protein, 319 aa, Homo sapiens
MLWRQLIYWQLLALFFLPFCLCQDEYMEVSGRTNKVVARIVQSHQQTGRSGSRREKVRERSHPKTGTVDNNTSTDLKSLRPDELPHPEVDDLAQITTFWGQSPQTGGLPPDCSKCCHGDYSFRGYQGPPGPPGPPGIPGNHGNNGNNGATGHEGAKGEKGDKGDLGPRGERGQHGPKGEKGYPGIPPELQIAFMASLATHFSNQNSGIIFSSVETNIGNFFDVMTGRFGAPVSGVYFFTFSMMKHEDVEEVYVYLMHNGNTVFSMYSYEMKGKSDTSSNHAVLKLAKGDEVWLRMGNGALHGDHQRFSTFAGFLLFETK

SEQ ID NO: 1799 - protein, 100 aa, Homo sapiens
MLPLLLGLLGPAACWALGPTPGPGSSELRSAFSAARTTPLEGTSEMAVTFDKVYVNIGGDFDVATGQFRCRVPGAYFFSFTAGKAPHKSLSVMLVRNRDE

SEQ ID NO: 1800 - protein, 329 aa, Homo sapiens
MLPLLLGLLGPAACWALGPTPGPGSSELRSAFSAARTTPLEGTSEMAVTFDKVYVNIGGDFDVATGQFRCRVPGAYFFSFTAGKAPHKSLSVMLVRNRDEVQALAFDEQRRPGARRAASQSAMLQLDYGDTVWLRLHGAPQYALGAPGATFSGYLVYADADADAPARGPPAPPEPRSAFSAARTRSLVGSDAGPGPRHQPLAFDTEFVNIGGDFDAAAGVFRCRLPGAYFFSFTLGKLPRKTLSVKLMKNRDEVQAMIYDDGASRRREMQSQSVMLALRRGDAVWLLSHDHDGYGAYSNHGKYITFSGFLVYPDLAPAAPPGLGASELL

SEQ ID NO: 1801 - protein, 60 aa, Homo sapiens
MRPLLVLLLLGLAAGSPPLDDNKIPSLCPGHPGLPGLPGPRGDPGPRGEAGPAGPTGPAG

SEQ ID NO: 1802 - protein, 243 aa, Homo sapiens
MRPLLVLLLLGLAAGSPPLDDNKIPSLCPGHPGLPGTPGHHGSQGLPGRDGRDGRDGAPGAPGEKGEGGRPGLPGPRGDPGPRGEAGPAGPTGPAGECSVPPRSAFSAKRSESRVPPPSDAPLPFDRVLVNEQGHYDAVTGKFTCQVPGVYYFAVHATVYRASLQFDLVKNGESIASFFQFFGGWPKPASLSGGAMVRLEPEDQVWVQVGVGDYIGIYASIKTDSTFSGFLVYSDWHSSPVFA

SEQ ID NO: 1803 - protein, 243 aa, Homo sapiens; identical to SEQ ID NO: 1802

SEQ ID NO: 1804 - protein, 112 aa, Homo sapiens
MFVLLYVTSFAICASGQPRGNQLKGENYSPRYICSIPGLPGPPGPPGANGSPGPHGRIGLPGRDGRDGRKGEKGEKGTAGLRGKTGPLGLAGEKGDQGETGKKGPIGPEGEK

SEQ ID NO: 1805 - protein, 289 aa, Homo sapiens
MFVLLYVTSFAICASGQPRGNQLKGENYSPRYICSIPGLPGPPGPPGANGSPGPHGRIGLPGRDGRDGRKGEKGEKGTAGLRGKTGPLGLAGEKGDQGETGKKGPIGPEGEKGEVGPIGPPGPKGDRGEQGDPGLPGVCRCGSIVLKSAFSVGITTSYPEERLPIIFNKVLFNEGEHYNPATGKFICAFPGIYYFSYDITLANKHLAIGLVHNGQYRIKTFDANTGNHDVASGSTVIYLQPEDEVWLEIFFTDQNGLFSDPGWADSLFSGFLLYVDTDYLDSISEDDEL

SEQ ID NO: 1806 - protein, 289 aa, Homo sapiens; identical to SEQ ID NO: 1805

SEQ ID NO: 1807 - protein, 151 aa, Homo sapiens
MSRQEPKMFVLLYVTSFAICASGQPRGNQLKGENYSPRYICSIPGLPGPPGPPGANGSPGPHGRIGLPGRDGRDGRKGEKGEKGTAGLRGKTGPLGLAGEKGDQGETGKKGPIGPEGEKGEVGPIGPPGPKGDRGEQGDPGLPGVCRCGSI

SEQ ID NO: 1808 - protein, 296 aa, Homo sapiens
MSRQEPKMFVLLYVTSFAICASGQPRGNQLKGENYSPRYICSIPGLPGPPGPPGANGSPGPHGRIGLPGRDGRDGRKGEKGEKGTAGLRGKTGPLGLAGEKGDQGETGKKGPIGPEGEKGEVGPIGPPGPKGDRGEQGDPGLPGVCRCGSIVLKSAFSVGITTSYPEERLPIIFNKVLFNEGEHYNPATGKFICAFPGIYYFSYDITLANKHLAIGLVHNGQYRIKTFDANTGNHDVASGSTVIYLQPEDEVWLEIFFTDQNGLFSDPGWADSLFSGFLLYVDTDYLDSISEDDEL

SEQ ID NO: 1809 - protein, 256 aa, Homo sapiens [sequence omitted]

SEQ ID NO: 1810 - protein, 252 aa, Homo sapiens
MAAPALLLLALLLPVGAWPGLPRRPCVHCCRPAWPPGPYARVSDRDLWRGDLWRGLPRVRPTIDIEILKGEKGEAGVRGRAGRSGKEGPPGARGLQGRRGQKGQVGPPGAACRRAYAAFSVGRREGLHSSDHFQAVPFDTELVNLDGAFDLAAGRFLCTVPGVYFLSLNVHTWNYKETYLHIMLNRRPAAVLYAQPSERSVMQAQSLMLLLAAGDAVWVRMFQRDRDNAIYGEHGDLYITFSGHLVKPAAEL

SEQ ID NO: 1811 - protein, 333 aa, Homo sapiens
MRIWWLLLAIEICTGNINSQDTCRQGHPGIPGNPGHNGLPGRDGRDGAKGDKGDAGEPGRPGSPGKDGTSGEKGERGADGKVEAKGIKGDQGSRGSPGKHGPKGLAGPMGEKGLRGETGPQGQKGNKGDVGPTGPEGPRGNIGPLGPTGLPGPMGPIGKPGPKGEAGPTGPQGEPGVRGIRGWKGDRGEKGKIGETLVLPKSAFTVGLTVLSKFPSSDMPIKFDKILYNEFNHYDTAAGKFTCHIAGVYYFTYHITVFSRNVQVSLVKNGVKILHTKDAYMSSEDQASGGIVLQLKLGDEVWLQVTGGERFNGLFADEDDDTTFTGFLLFSSP

SEQ ID NO: 1812 - protein, 333 aa, Homo sapiens; identical to SEQ ID NO: 1811

SEQ ID NO: 1813 - protein, 333 aa, Homo sapiens
MRIWWLLLAIEICTGNINSQDTCRQGHPGIPGNPGHNGLPGRDGRDGAKGDKGDAGEPGCPGSPGKDGTSGEKGERGADGKVEAKGIKGDQGSRGSPGKHGPKGLAGPMGEKGLRGETGPQGQKGNKGDVGPTGPEGPRGNIGPLGPTGLPGPMGPIGKPGPKGEAGPTGPQGEPGVRGIRGWKGDRGEKGKIGETLVLPKSAFTVGLTVLSKFPSSDVPIKFDKILYNEFNHYDTAVGKFTCHIAGVYYFTYHITVFSRNVQVSLVKNGVKILHTRDAYVSSEDQASGSIVLQLKLGDEMWLQVTGGERFNGLFADEDDDTTFTGFLLFSSQ

SEQ ID NO: 1814 - protein, 333 aa, Homo sapiens; identical to SEQ ID NO: 1813

SEQ ID NO: 1815 - protein, 99 aa, Homo sapiens
MRIWWLLLAIEICTGNINSQDTCRQGHPGIPGNPGHNGLPGRDGRDGAKGDKGDAGEPGCPGSPGKDGTSGEKGERGADGKVEAKGIKGMFRCLWSKTE

SEQ ID NO: 1816 - protein, 49 aa, Homo sapiens
MSQGNKMLLTFHTDFSNEENGTIMFYKGFLAYYQAVDLDECASRSKSGE

SEQ ID NO: 1817 - protein, 72 aa, Homo sapiens
MSQGNKMLLTFHTDFSNEENGTIMFYKGFLAYYQAVDLDECASRSKSGEEDPQPQCQHLCHNYVGGYFCSCR

SEQ ID NO: 1818 - protein, 94 aa, Homo sapiens
MSQGNKMLLTFHTDFSNEENGTIMFYKGFLAYYQAVDLDECASRSKSGEEDPQPQCQHLCHNYVGGYFCSCRPGYELQEDRHSCQAECSSELYT

SEQ ID NO: 1819 - protein, 719 aa, Homo sapiens
MSVRFRVGREENAQWWLLYLLVPALFCRAGGSIPIPQKLFGEVTSPLFPKPYPNNFETTTVITVPTGYRVKLVFQQFDLEPSEGCFYDYVKISADKKSLGRFCGQLGSPLGNPPGKKEFMSQGNKMLLTFHTDFSNEENGTIMFYKGFLAYYQAVDLDECASRSKSGEEDPQPQCQHLCHNYVGGYFCSCRPGYELQEDRHSCQAECSSELYTEASGYISSLEYPRSYPPDLRCNYSIRVERGLTLHLKFLEPFDIDDHQQVHCPYDQLQIYANGKNIGEFCGKQRPPDLDTSSNAVDLLFFTDESGDSRGWKLRYTTEIIKCPQPKTLDEFTIIQNLQPQYQFRDYFIATCKQGYQLIEGNQVLHSFTAVCQDDGTWHRAMPRCKIKDCGQPRNLPNGDFRYTTTMGVNTYKARIQYYCHEPYYKMQTRAGSRESEQGVYTCTAQGIWKNEQKGEKIPRCLPVCGKPVNPVEQRQRIIGGQKAKMGNFPWQVFTNIHGRGGGALLGDRWILTAAHTLYPKEHEAQSNASLDVFLGHTNVEELMKLGNHPIRRVSVHPDYRQDESYNFEGDIALLELENSVTLGPNLLPICLPDNDTFYDLGLMGYVSGFGVMEEKIAHDLRFVRLPVANPQACENWLRGKNRMDVFSQNMFCAGHPSLKQDACQGDSGGVFAVRDPNTDRWVATGIVSWGIGCSRGYGFYTKVLNYVDWIKKEMEEED

SEQ ID NO: 1820 - protein, 705 aa, Homo sapiens
MWLLYLLVPALFCRAGGSIPIPQKLFGEVTSPLFPKPYPNNFETTTVITVPTGYRVKLVFQQFDLEPSEGCFYDYVKISADKKSLGRFCGQLGSPLGNPPGKKEFMSQGNKMLLTFHTDFSNEENGTIMFYKGFLAYYQAVDLDECASRSKSGEEDPQPQCQHLCHNYVGGYFCSCRPGYELQEDRHSCQAECSSELYTEASGYISSLEYPRSYPPDLRCNYSIRVERGLTLHLKFLEPFDIDDHQQVHCPYDQLQIYANGKNIGEFCGKQRPPDLDTSSNAVDLLFFTDESGDSRGWKLRYTTEIIKCPQPKTLDEFTIIQNLQPQYQFRDYFIATCKQGYQLIEGNQVLHSFTAVCQDDGTWHRAMPRCKIKDCGQPRNLPNGDFRYTTTMGVNTYKARIQYYCHEPYYKMQTRAGSRESEQGVYTCTAQGIWKNEQKGEKIPRCLPVCGKPVNPVEQRQRIIGGQKAKMGNFPWQVFTNIHGRGGGALLGDRWILTAAHTLYPKEHEAQSNASLDVFLGHTNVEELMKLGNHPIRRVSVHPDYRQDESYNFEGDIALLELENSVTLGPNLLPICLPDNDTFYDLGLMGYVSGFGVMEEKIAHDLRFVRLPVANPQACENWLRGKNRMDVFSQNMFCAGHPSLKQDACQGDSGGVFAVRDPNTDRWVATGIVSWGIGCSRGYGFYTKVLNYVDWIKKEMEEED

SEQ ID NO: 1821 - protein, 156 aa, Homo sapiens
MWLLYLLVPALFCRAGGSIPIPQKLFGEVTSPLFPKPYPNNFETTTVITVPTGYRVKLVFQQFDLEPSEGCFYDYVKISADKKSLGRFCGQLGSPLGNPPGKKEFMSQGNKMLLTFHTDFSNEENGTIMFYKGFLAYYQAVGEEDPQPQCQHLCHN

SEQ ID NO: 1822 - protein, 144 aa, Homo sapiens
MWLLYLLVPALFCRAGGSIPIPQKLFGEVTSPLFPKPYPNNFETTTVITVPTGYRVKLVFQQFDLEPSEGCFYDYVKISADKKSLGRFCGQLGSPLGNPPGKKEFMSQGNKMLLTFHTDFSNEENGTIMFYKGFLAYYQAVGLW

SEQ ID NO: 1823 - protein, 156 aa, Homo sapiens
MWLLYLLVPALFCRAGGSIPIPQKLFGEVTSPLFPKPYPNNFETTTVITVPTGYRVKLVFQQFDLEPSEGCFYDYVKKEFMSQGNKMLLTFHTDFSNEENGTIMFYKGFLAYYQAVDLDECASRSKSGEEDPQPQCQHLCHNYVGGYFCSCRPGYE

SEQ ID NO: 1824 - protein, 671 aa, Homo sapiens
MWLLYLLVPALFCRAGGSIPIPQKLFGEVTSPLFPKPYPNNFETTTVITVPTGYRVKLVFQQFDLEPSEGCFYDYVKMLLTFHTDFSNEENGTIMFYKGFLAYYQAVDLDECASRSKSGEEDPQPQCQHLCHNYVGGYFCSCRPGYELQEDRHSCQAECSSELYTEASGYISSLEYPRSYPPDLRCNYSIRVERGLTLHLKFLEPFDIDDHQQVHCPYDQLQIYANGKNIGEFCGKQRPPDLDTSSNAVDLLFFTDESGDSRGWKLRYTTEIIKCPQPKTLDEFTIIQNLQPQYQFRDYFIATCKQGYQLIEGNQVLHSFTAVCQDDGTWHRAMPRCKIKDCGQPRNLPNGDFRYTTTMGVNTYKARIQYYCHEPYYKMQTRAGSRESEQGVYTCTAQGIWKNEQKGEKIPRCLPVCGKPVNPVEQRQRIIGGQKAKMGNFPWQVFTNIHGRGGGALLGDRWILTAAHTLYPKEHEAQSNASLDVFLGHTNVEELMKLGNHPIRRVSVHPDYRQDESYNFEGDIALLELENSVTLGPNLLPICLPDNDTFYDLGLMGYVSGFGVMEEKIAHDLRFVRLPVANPQACENWLRGKNRMDVFSQNMFCAGHPSLKQDACQGDSGGVFAVRDPNTDRWVATGIVSWGIGCSRGYGFYTKVLNYVDWIKKEMEEED

SEQ ID NO: 1825 - protein, 83 aa, Homo sapiens
GLRPGAVPGLCRGLCHNLIRRFGSKPVLWSARLPSGQAPWSEGVCILREEFAADLPHTAFLGEQDCPPPQGLPGPLPNRGCEL

SEQ ID NO: 1826 - protein, 110 aa, Homo sapiens
MPGPRVWGKYLWRSPHSKGCPGAISHSSVRIQASSVVSKAPLWAGPLVRGSFQPISEASRGSEAINAPGDNPAKVQNHCQEPYYQAAAAGCGSYADPITDQPSVRFSPQL

SEQ ID NO: 1827 - protein, 314 aa, Homo sapiens
MPGPRVWGKYLWRSPHSKGCPGAMWWLLLWGVLQACPTRGSVLLAQELPQQLTSPGYPEPYGKGQESSTDIKAPEGFAVRLVFQDFDLEPSQDCAGDSVTISFVGSDPSQFCGQQGSPLGRPPGQREFVSSGRSLRLTFRTQPSSENKTAHLHKGFLALYQTVAVNYSQPISEASRGSEAINAPGDNPAKVQNHCQEPYYQAAAAASTPSLFLCLSSFTPQGHSPVQPQGPGKTDRMGRRFFSVCLSADGQSPPLPRIRRPSVLPEPSWATSPGKPSPVSTAVGAGPCWGTDGSSLLPTPSTPRTVFLSGRTRV

SEQ ID NO: 1828 - protein, 487 aa, Homo sapiens
MPGPRVWGKYLWRSPHSKGCPGAMWWLLLWGVLQACPTRGSVLLAQELPQQLTSPGYPEPYGKGQESSTDIKAPEGFAVRLVFQDFDLEPSQDCAGDSVTISFVGSDPSQFCGQQGSPLGRPPGQREFVSSGRSLRLTFRTQPSSENKTAHLHKGFLALYQTVAVNYSQPISEASRGSEAINAPGDNPAKVQNHCQEPYYQAAAAGALTCATPGTWKDRQDGEEVLQCMPVCGRPVTPIAQNQTTLGSSRAKLGNFPWQAFTSIHGRGGGALLGDRWILTAAHTIYPKDSVSLRKNQSVNVFLGHTAIDEMLKLGNHPVHRVVVHPDYRQNESHNFSGDIALLELQHSIPLGPNVLPVCLPDNETLYRSGLLGYVSGFGMEMGWLTTELKYSRLPVAPREACNAWLQKRQRPEVFSDNMFCVGDETQRHSVCQGDSGSVYVVWDNHAHHWVATGIVSWGIGCGEGYDFYTKVLSYVDWIKGVMNGKN

SEQ ID NO: 1829 - protein, 192 aa, Homo sapiens
MPGPRVWGKYLWRSPHSKGCPGAMWWLLLWGVLQACPTRGSVLLAQELPQQLTSPGYPEPYGKGQESSTDIKAPEGFAVRLVFQDFDLEPSQDCAGDSVTISFVGSDPSQFCGQQGSPLGRPPGQREFVSSGRSLRLTFRTQPSSENKTAHLHKGFLALYQTVGALTCATPGTWKDRQDGEEVLQCMPVCGR

SEQ ID NO: 1830 - protein, 187 aa, Homo sapiens
MPGPRVWGKYLWRSPHSKGCPGAMWWLLLWGVLQACPTRGSVLLAQELPQQLTSPGYPEPYGKGQESSTDIKAPEGFAVRLVFQDFDLEPSQDCAGDSVTISFVGSDPSQFCGQQGSPLGRPPGQREFVSSGRSLRLTFRTQPSSENKTAHLHKGFLALYQTVGECPSWGCREGASVPSHDPGIFKP

SEQ ID NO: 1831 - protein, 66 aa, Homo sapiens
  SITE 1: note = misc_feature - Xaa can be any naturally occurring amino acid
XNPAKVQNHCQEPYYQAAAAGALTCATPGTWKDRQDGEEVLQCMPGCGSYADPITDQPSVRFSPQL

SEQ ID NO: 1832 - protein, 85 aa, Homo sapiens
  SITE 1: note = misc_feature - Xaa can be any naturally occurring amino acid
XPGLRPGAVPGLCRGLCHNLIRRFGSKPVLWSARLPSGQAPWSEGVCILREEFAADLPHTAFLGEQDCPPPQGLPGPLPNRGCEL

SEQ ID NO: 1833 - protein, 194 aa, Homo sapiens
  SITE 1: note = misc_feature - Xaa can be any naturally occurring amino acid
XSFVGSDPSQFCGQQGSPLGRPPGQREFVSSGRSLRLTFRTQPSSENKTAHLHKGFLALYQTVVCGRPVTPIAQNQTTLGSSRAKLGNFPWQAFTSIHGRGGGALLGDRWILTAAHTIYPKDSVSLRKNQSVNVFLGHTAIDEMLKLGNHPVHRVVVHPDYRQNESHNFSGDIALLELQHSIPLGPNVLPVCLP

SEQ ID NO: 1834 - protein, 157 aa, Homo sapiens
MKNCGVNCSGDVFTALIGEIASPNYPKPYPENSRCEYQIRLEKGFQVVVTLRREDFDVEAADSAGNCLDSLVFVAGDRQFGPYCGHGFPGPLNIETKSNALDIIFQTDLTGQKKGWKLRYHGDPMPCPKEDTPNSVWEPAKAKYVFRDVVQITCLDG

SEQ ID NO: 1835 - protein, 521 aa, Homo sapiens
MKNCGVNCSGDVFTALIGEIASPNYPKPYPENSRCEYQIRLEKGFQVVVTLRREDFDVEAADSAGNCLDSLVFVAGDRQFGPYCGHGFPGPLNIETKSNALDIIFQTDLTGQKKGWKLRYHGDPMPCPKEDTPNSVWEPAKAKYVFRDVVQITCLDGFEVVEGRVGATSFYSTCQSNGKWSNSKLKCQPVDCGIPESIENGKVEDPESTLFGSVIRYTCEEPYYYMENGGGGEYHCAGNGSWVNEVLGPELPKCVPVCGVPREPFEEKQRIIGGSDADIKNFPWQVFFDNPWAGGALINEYWVLTAAHVVEGNREPTMYVGSTSVQTSRLAKSKMLTPEHVFIHPGWKLLEVPEGRTNFDNDIALVRLKDPVKMGPTVSPICLPGTSSDYNLMDGDLGLISGWGRTEKRDRAVRLKAARLPVAPLRKCKEVKVEKPTADAEAYVFTPNMICAGGEKGMDSCKGDSGGAFAVQDPNDKTKFYAAGLVSWGPQCGTYGLYTRVKNYVDWIMKTMQENSTPRED

SEQ ID NO: 1836 - protein, 101 aa, Homo sapiens
MWCIVLFSLLAWVYAEPTMYGEILSPNYPQAYPSEVEKSWDIEVPEGYGIHLYFTHLDIELSENCAYDSVQIISGDTEEGRLCGQRSSNNPHSPIVEEFQV

SEQ ID NO: 1837 - protein, 103 aa, Homo sapiens
MWCIVLFSLLAWVYAEPTMYGEILSPNYPQAYPSEVEKSWDIEVPEGYGIHLYFTHLDIELSENCAYDSVQIISGDTEEGRLCGQRSSNNPHSPIVEEFQVPY

SEQ ID NO: 1838 - protein, 168 aa, Homo sapiens
MWCIVLFSLLAWVYAEPTMYGEILSPNYPQAYPSEVEKSWDIEVPEGYGIHLYFTHLDIELSENCAYDSVQIISGDTEEGRLCGQRSSNNPHSPIVEEFQVPYNKLQVIFKSDFSNEERFTGFAAYYVATDINECTDFVDVPCSHFCNNFIGGYFCSCPPEYFLHDDM

SEQ ID NO: 1839 - protein, 688 aa, Homo sapiens
MWCIVLFSLLAWVYAEPTMYGEILSPNYPQAYPSEVEKSWDIEVPEGYGIHLYFTHLDIELSENCAYDSVQIISGDTEEGRLCGQRSSNNPHSPIVEEFQVPYNKLQVIFKSDFSNEERFTGFAAYYVATDINECTDFVDVPCSHFCNNFIGGYFCSCPPEYFLHDDMKNCGVNCSGDVFTALIGEIASPNYPKPYPENSRCEYQIRLEKGFQVVVTLRREDFDVEAADSAGNCLDSLVFVAGDRQFGPYCGHGFPGPLNIETKSNALDIIFQTDLTGQKKGWKLRYHGDPMPCPKEDTPNSVWEPAKAKYVFRDVVQITCLDGFEVVEGRVGATSFYSTCQSNGKWSNSKLKCQPVDCGIPESIENGKVEDPESTLFGSVIRYTCEEPYYYMENGGGGEYHCAGNGSWVNEVLGPELPKCVPVCGVPREPFEEKQRIIGGSDADIKNFPWQVFFDNPWAGGALINEYWVLTAAHVVEGNREPTMYVGSTSVQTSRLAKSKMLTPEHVFIHPGWKLLEVPEGRTNFDNDIALVRLKDPVKMGPTVSPICLPGTSSDYNLMDGDLGLISGWGRTEKRDRAVRLKAARLPVAPLRKCKEVKVEKPTADAEAYVFTPNMICAGGEKGMDSCKGDSGGAFAVQDPNDKTKFYAAGLVSWGPQCGTYGLYTRVKNYVDWIMKTMQENSTPRED

SEQ ID NO: 1840 - protein, 688 aa, Homo sapiens; identical to SEQ ID NO: 1839

SEQ ID NO: 1841 - protein, 688 aa, Homo sapiens; identical to SEQ ID NO: 1839

SEQ ID NO: 1842 - protein, 682 aa, Homo sapiens [sequence omitted]

SEQ ID NO: 1843 - protein, 355 aa, Homo sapiens
  SITE 1: note = misc_feature - Xaa can be any naturally occurring amino acid
XSKVRRCRKPGPRDRQLTRVDKSPEMWCIVLFSLLAWVYAEPTMYGEILSPNYPQAYPSEVEKSWDIEVPEGYGIHLYFTHLDIELSENCAYDSVQIISGDTEEGRLCGQRSSNNPHSPIVEEFQVPYNKLQVIFKSDFSNEERFTGFAAYYVATDINECTDFVDVPCSHFCNNFIGGYFCSCPPEYFLHDDMKNCGVNCSGDVFTALIGEIASPNYPKPYPENSRCEYQIRLEKGFQVVVTLRREDFDVEAADSAGNCLDSLVFVAGDRQFGPYCGHGFPGPLNIETKSNALDIIFQTDLTGQKKGWKLRYHGDPMPCPKEDTPNSVWEPAKAKYVFRDVVQITCLDGFEVVEK

SEQ ID NO: 1844 - protein, 620 aa, Homo sapiens
MGPLMVLFCLLFLYPAGHCPNPGISLGAVRTGFRFGHGDKVRYRCSSNLVLTGSSERECQGNGVWSGTEPICRQPYSYDFPEDVAPALGTSFSHMLGATNPTQKTKESLGRKIQIQRSGHLNLYLLLDCSQSVSENDFLIFKESASLMVDRIFSFEINVSVAIITFASEPKVLMSVLNDNSRDMTEVISSLENANYKDHENGTGTNTYAALNSVYLMMNNQMRLLGMETMAWQEIRHAIILLTDGKSNMGGSPKTAVDHIREILNINQKRNDYLDIYAIGVGKLDVDWRELNELGSKKDGERHAFILQDTKALHQVFEHMLDVSKLTDTICGVGNMSANASDQERTPWHVTIKPKSQETCRGALISDQWVLTAAHCFRDGNDHSLWRVNVGDPKSQWGKEFLIEKAVISPGFDVFAKKNQGILEFYGDDIALLKLAQKVKMSTHARPICLPCTMEANLALRRPQGSTCRDHENELLNKQSVPAHFVALNGSKLNINLKMGVEWTSCAEVVSQEKTMFPNLTDVREVVTDQFLCSGTQEDESPCKGESGGAVFLERRFRFFQVGLVSWGLYNPCLGSADKNSRKRAPRSKVPPPRDFHINLFRMQPWLRQHLGDVLNFLPL

SEQ ID NO: 1845 - protein, 203 aa, Homo sapiens
MGPLMVLFCLLFLYPGLADSAPSCPQNVNISGGTFTLSHGWAPGSLLTYSCPQGLYPSPASRLCKSSGQWQTPGATRSLSKAVCKPGHCPNPGISLGAVRTGFRFGHGDKVRYRCSSNLVLTGSSERECQGNGVWSGTEPICRQPYSYDFPEDVAPALGTSFSHMLGATNPTQKTKESLGRKIQIQRSGHLNLYLLLDCSQSV

SEQ ID NO: 1846 - protein, 139 aa, Homo sapiens
MGPLMVLFCLLFLYPGLADSAPSCPQNVNISGGTFTLSHGWAPGSLLTYSCPQGLYPSPASRLCKSSGQWQTPGATRSLSKAVCKPVRCPAPVSFENGIYTPRLGSYPVGGNVSFECEDGFILRGSPVRQCRPNGMWDG

SEQ ID NO: 1847 - protein, 752 aa, Homo sapiens
MGPLMVLFCLLFLYPGLADSAPSCPQNVNISGGTFTLSHGWAPGSLLTYSCPQGLYPSPASRLCKSSGQWQTPGATRSLSKAVCKPVRCPAPVSFENGIYTPRLGSYPVGGNVSFECEDGFILRGSPVRQCRPNGMWDGETAVCDNGAGHCPNPGISLGAVRTGFRFGHGDKVRYRCSSNLVLTGSSERECQGNGVWSGTEPICRQPYSYDFPEDVAPALGTSFSHMLGATNPTQKTKESLGRKIQIQRSGHLNLYLLLDCSQSVSENDFLIFKESASLMVDRIFSFEINVSVAIITFASEPKVLMSVLNDNSRDMTEVISSLENANYKDHENGTGTNTYAALNSVYLMMNNQMRLLGMETMAWQEIRHAIILLTDGKSNMGGSPKTAVDHIREILNINQKRNDYLDIYAIGVGKLDVDWRELNELGSKKDGERHAFILQDTKALHQVFEHMLDVSKLTDTICGVGNMSANASDQERTPWHVTIKPKSQETCRGALISDQWVLTAAHCFRDGNDHSLWRVNVGDPKSQWGKEFLIEKAVISPGFDVFAKKNQGILEFYGDDIALLKLAQKVKMSTHARPICLPCTMEANLALRRPQGSTCRDHENELLNKQSVPAHFVALNGSKLNINLKMGVEWTSCAEVVSQEKTMFPNLTDVREVVTDQFLCSGTQEDESPCKGESGGAVFLERRFRFFQVGLVSWGLYNPCLGSADKNSRKRAPRSKVPPPRDFHINLFRMQPWLRQHLGDVLNFLPL

SEQ ID NO: 1848 - protein, 328 aa, Homo sapiens
MGPLMVLFCLLFLYPGLADSAPSCPQNVNISGGTFTLSHGWAPGSLLTYSCPQGLYPSPASRLCKSSGQWQTPGATRSLSKAVCKPVRCPAPVSFENGIYTPRLGSYPVGGNVSFECEDGFILRGSPVRQCRPNGMWDGETAVCDNGAGHCPNPGISLGAVRTGFRFGHGDKVRYRCSSNLVLTGSSERECQGNGVWSGTEPICRQPYSYDFPEDVAPALGTSFSHMLGATNPTQKTKESLGRKIQIQRSGHLNLYLLLDCSQSVSENDFLIFKESASLMVDRVRNQESACSRGLPVLTISLCLLPLLRTPLTAHLLQEVFSDYTHAM

SEQ ID NO: 1849 - protein, 104 aa, Homo sapiens
MGPLMVLFCLLFLYPGLADSAPSCPQNVNISGGTFTLSHGWAPGSLLTYSCPQGLYPSPASRLCKSSGQWQTPGATRSLSKAVCKREAPCGLCSGCALSSPCLL

SEQ ID NO: 1850 - protein, 136 aa, Homo sapiens
MGRPGRAGHCPNPGISLGAVRTGFRFGHGDKVRYRCSSNLVLTGSSERECQGNGVWSGTEPICRQPYSYDFPEDVAPALGTSFSHMLGATNPTQKTKESLGRKIQIQRSGHLNLYLLLDCSQSVSENDFLIFKESA

SEQ ID NO: 1851 - protein, 506 aa, Homo sapiens
MGTRSAIAAPRILCSRGLRSGSARATGSGVERSPSAAIFSFEINVSVAIITFASEPKVLMSVLNDNSRDMTEVISSLENANYKDHENGTGTNTYAALNSVYLMMNNQMRLLGMETMAWQEIRHAIILLTDGKSNMGGSPKTAVDHIREILNINQKRNDYLDIYAIGVGKLDVDWRELNELGSKKDGERHAFILQDTKALHQVFEHMLDVSKLTDTICGVGNMSANASDQERTPWHVTIKPKSQETCRGALISDQWVLTAAHCFRDGNDHSLWRVNVGDPKSQWGKEFLIEKAVISPGFDVFAKKNQGILEFYGDDIALLKLAQKVKMSTHARPICLPCTMEANLALRRPQGSTCRDHENELLNKQSVPAHFVALNGSKLNINLKMGVEWTSCAEVVSQEKTMFPNLTDVREVVTDQFLCSGTQEDESPCKGESGGAVFLERRFRFFQVGLVSWGLYNPCLGSADKNSRKRAPRSKVPPPRDFHINLFRMQPWLRQHLGDVLNFLPL

SEQ ID NO: 1852 - protein, 463 aa, Homo sapiens
MGTRSAIAAPRILCSRGLRSGSARATGSGVERSPSAANPTLMTSLRTWPLPWALPSPTCLGPPIPPRRQRIFSFEINVSVAIITFASEPKVLMSVLNDNSRDMTEVISSLENANYKDHENGTGTNTYAALNSVYLMMNNQMRLLGMETMAWQEIRHAIILLTDGKSNMGGSPKTAVDHIREILNINQKRNDYLDIYAIGVGKLDVDWRELNELGSKKDGERHAFILQDTKALHQVFEHMLDVSKLTDTICGVGNMSANASDQERTPWHVTIKPKSQETCRGALISDQWVLTAAHCFRDGNDHSLWRVNVGDPKSQWGKEFLIEKAVISPGFDVFAKKNQGILEFYGDDIALLKLAQKVKMSTHARPICLPCTMEANLALRRPQGSTCRDHENELLNKQSVPAHFVALNGSKLNINLKMGVEWTSCAEVVSQEKTMFPNLTDVREVVTDQFLCSGTQEDESPCK

SEQ ID NO: 1853 - protein, 84 aa, Homo sapiens
MGTRSAIAAPRILCSRGLRSGSARATGSGVERSPSAANPTLMTSLRTWPLPWALPSPTCLGPPIPPRRQRKAWAVKSKSSALVI

SEQ ID NO: 1854 - protein, 84 aa, Homo sapiens; identical to SEQ ID NO: 1853

SEQ ID NO: 1855 - protein, 538 aa, Homo sapiens
MRALCIRETCSSELGFSRNWSRRKAGHCPNPGISLGAVRTGFRFGHGDKVRYRCSSNLVLTGSSERECQGNGVWSGTEPICRQPYSYDFPEDVAPALGTSFSHMLGATNPTQKTKDHENGTGTNTYAALNSVYLMMNNQMRLLGMETMAWQEIRHAIILLTDGKSNMGGSPKTAVDHIREILNINQKRNDYLDIYAIGVGKLDVDWRELNELGSKKDGERHAFILQDTKALHQVFEHMLDVSKLTDTICGVGNMSANASDQERTPWHVTIKPKSQETCRGALISDQWVLTAAHCFRDGNDHSLWRVNVGDPKSQWGKEFLIEKAVISPGFDVFAKKNQGILEFYGDDIALLKLAQKVKMSTHARPICLPCTMEANLALRRPQGSTCRDHENELLNKQSVPAHFVALNGSKLNINLKMGVEWTSCAEVVSQEKTMFPNLTDVREVVTDQFLCSGTQEDESPCKGESGGAVFLERRFRFFQVGLVSWGLYNPCLGSADKNSRKRAPRSKVPPPRDFHINLFRMQPWLRQHLGDVLNFLPL

SEQ ID NO: 1856 - protein, 158 aa, Homo sapiens
MRALCIRETCSSELGFSRNWSRRKAGHCPNPGISLGAVRTGFRFGHGDKVRYRCSSNLVLTGSSERECQGNGVWSGTEPICRQPYSYDFPEDVAPALGTSFSHMLGATNPTQKTKESLGRKIQIQRSGHLNLYLLLDCSQSVSENDFLIFKESASLMV

SEQ ID NO: 1857 - protein, 160 aa, Homo sapiens
  SITE 1: note = misc_feature - Xaa can be any naturally occurring amino acid
XLMVDRIFSFEINVSVAIITFASEPKVLMSVLNDNSRDMTEVISSLENANYKDHENGTGTNTYAALNSVYLMMNNQMRLLGMETMAWQEIRHAIILLTDGKSNMGGSPKTAVDHIREILNINQKRNDYLAPKPQESGDFPLPHQTSMPSGWASWMWTGEN

SEQ ID NO: 1858 - protein, 526 aa, Homo sapiens
  SITE 1: note = misc_feature - Xaa can be any naturally occurring amino acid
XMVLFCLLFLYPAGHCPNPGISLGAVRTGFRFGHGDKVRYRCSSNLVLTGSSERECQGNGVWSGTEPICRQPYSYDFPEDVAPALGTSFSHMLGATNPTQKTKDHENGTGTNTYAALNSVYLMMNNQMRLLGMETMAWQEIRHAIILLTDGKSNMGGSPKTAVDHIREILNINQKRNDYLDIYAIGVGKLDVDWRELNELGSKKDGERHAFILQDTKALHQVFEHMLDVSKLTDTICGVGNMSANASDQERTPWHVTIKPKSQETCRGALISDQWVLTAAHCFRDGNDHSLWRVNVGDPKSQWGKEFLIEKAVISPGFDVFAKKNQGILEFYGDDIALLKLAQKVKMSTHARPICLPCTMEANLALRRPQGSTCRDHENELLNKQSVPAHFVALNGSKLNINLKMGVEWTSCAEVVSQEKTMFPNLTDVREVVTDQFLCSGTQEDESPCKGESGGAVFLERRFRFFQVGLVSWGLYNPCLGSADKNSRKRAPRSKVPPPRDFHINLFRMQPWLRQHLGDVLNFLPL

SEQ ID NO: 1859 - protein, 57 aa, Homo sapiens
MAAVRVLVASRLAAASAFTSLSPGGRTPSQRAALHLSVPRPAARVALDPGAPEPWRG

SEQ ID NO: 1860 - protein, 163 aa, Homo sapiens
MAAVRVLVASRLAAASAFTSLSPGGRTPSQRAALHLSVPRPAARVALVLSGCGVYDGTEIHEASAILVHLSRGGAEVQIFAPDVPQMHVIDHTKGQPSEGESRNVLTESARIARGKITDLANLSAANHDAAIFPGGFGAAKNLDSVSLWTSSLWNCERYMSVM

SEQ ID NO: 1861 - protein, 237 aa, Homo sapiens
MAAVRVLVASRLAAASAFTSLSPGGRTPSQRAALHLSVPRPAARVALVLSGCGVYDGTEIHEASAILVHLSRGGAEVQIFAPDVPQMHVIDHTKGQPSEGESRNVLTESARIARGKITDLANLSAANHDAAIFPGGFGAAKNLLCCIAPVLAAKVLRGVEVTVGHEQEEGGKWPYAGTAEAIKALGAKHCVKEVVEAHVDQKNKVVTTPAFMCETALHYIHDGIGAMVRKVLELTGK

SEQ ID NO: 1862 - protein, 217 aa, Homo sapiens
MAAVRVLVASRLAAASAFTSLSPGGRTPSQRAALHLSVPRPAARVALVLSGCGVYDGTEIHEASAILVHLSRGGAEVQIFAPDVPQMHVIDHTKGQPSEGESRNVLTESARIARGKITDLANLSAANHDAAIFPGGFGAAKNLSTFAVDGKDCKVNKEVERVLKEFHQAGKPIGCDASTSLPAPAPWWSWNAALCCPGLSCVWCWQGESRTCVGEHQ

SEQ ID NO: 1863 - protein, 268 aa, Homo sapiens
MAAVRVLVASRLAAASAFTSLSPGGRTPSQRAALHLSVPRPAARVALVLSGCGVYDGTEIHEASAILVHLSRGGAEVQIFAPDVPQMHVIDHTKGQPSEGESRNVLTESARIARGKITDLANLSAANHDAAIFPGGFGAAKNLSTFAVDGKDCKVNKEVERVLKEFHQAGKPIGLCCIAPVLAAKVLRGVEVTVGHEQEEGGKWPYAGTAEAIKALGAKHCVKEVVEAHVDQKNKVVTTPAFMCETALHYIHDGIGAMVRKVLELTGK

SEQ ID NO: 1864 - protein, 224 aa, Homo sapiens
PSQRAALHLSVPRPAARVALVLSGCGVYDGTEIHEASAILVHLSRGGAEVQIFAPDVPQMHVIDHTKGQPSEGESRNVLTESARIARGKITDLANLSAANHDAAIFPGGFGAAKNLSTFAVDGKDCKVNKEVERVLKEFHQAGKPIGHSLKDLPGHCPGRPLKWSLRKRCRLRAPEGGPCCSRVTAGVKVSPMVSTSGSRPCQRSVPWMSAQREEPMALSSVTD

SEQ ID NO: 1865 - protein, 184 aa, Homo sapiens
QPSEGESRNVLTESARIARGKITDLANLSAANHDAAIFPGGFGAAKNLSTFAVDGKDCKVNKEVERVLKEFHQAGKPIGLCCIAPVLAAKVLRGVEVTVGHEQEEGGKWPYAGTAEAIKALGAKHCVKEVVEAHVDQKNKVVTTPAFMCETALHYIHDGIGAMASWACWLMPVIPALWEAKARG

SEQ ID NO: 1866 - protein, 191 aa, Homo sapiens
  SITE 1: note = misc_feature - Xaa can be any naturally occurring amino acid
XQMHVIDHTKGQPSEGESRNVLTESARIARGKITDLANLSAANHDAAIFPGGFGAAKNLSTFAVDGKDCKVNKEVERVLKEFHQAGKPIGLCCIAPVLAAKVLRGVEVTVGHEQEEGGKWPYAGTAEAIKALGAKHCVKEVVEAHVDQKNKVVTTPAFMCETALHYIHDGIGAMEEREIAAPQPPGLTSGE

SEQ ID NO: 1867 - protein, 190 aa, Homo sapiens
  SITE 1: note = misc_feature - Xaa can be any naturally occurring amino acid
XSRGGAEVQIFAPDVPQMHVIDHTKGQPSEGESRNVLTESARIARGKITDLANLSAANHDAAIFPGGFGAAKNLSTFAVDGKDCKVNKEVERVLKEFHQAGKPIGPGDGGDVSMSVSLRSLSLALSLPGGSCSQPSLPPHRHPACPSGPARLLCLEGATKEEDVNVQVLREAGPAASVSVFRPQEEPRPG

SEQ ID NO: 1868 - protein, 266 aa, Homo sapiens
CRLNQLSSQGEGSVARQRSVEWRGEASRWNSQMTACRHQESGRTYRRQPCTELGTCNNNSTLGVFALNCFTKGQKNSTLIFTRENTIRNCSCSADIRDCDYSLANLMCNCKTVLPLAVERTSYNGHLTIWFTDTSALGHLLNFTLVQDLKLSLCSTNTLPTEYLAICGLKRLRINMEAKHPFPEQSLLIHSGGDSDSREKPMWLHKGWQPCMYISFLDMALFNRDSALKSYSIENVTSIANNFPDFSYFRTFPMPSNKSYVVTFIY

SEQ ID NO: 1869 - protein, 219 aa, Homo sapiens
MAPPSRHCLLLISTLGVFALNCFTKGQKNSTLIFTRENTIRNCSCSADIRDCDYSLANLMCNCKTVLPLAVERTSYNGHLTIWFTDTSALGHLLNFTLVQDLKLSLCSTNTLPTEYLAICGLKRLRINMEAKHPFPEQSLLIHSGGDSDSREKPMWLHKGWQPCMYISFLDMALFNRDSALKSYSIENVTSIANNFPDFSYFRTFPMPSNKSYVVTFIY

SEQ ID NO: 1870 - protein, 219 aa, Homo sapiens; identical to SEQ ID NO: 1869

SEQ ID NO: 1871 - protein, 219 aa, Homo sapiens; identical to SEQ ID NO: 1869

SEQ ID NO: 1872 - protein, 148 aa, Homo sapiens
MFIKVMFGAGCSVLVNTSCRLVNLTAHLRQKAGLPPDATIALLAEDGNLVSLEEDLKEGASRAQTMGNSLLKERAIYVLVRIIKGEDMASTRYESLLENLDDHYPELAEELRRLSGLSSVGHNWRKRMGTRRGRHEQSPTSRPRKGPD

SEQ ID NO: 1873 - protein, 157 aa, Homo sapiens
MFIKVMFGAGCSVLVNTSCRLVNLTAHLRQKAGLPPDATIALLAEDGNLVSLEEDLKEGASRAQTMGNSLLKERAIYVLVRIISKRERTWPPPAMSPYWRTWMTITQSWQRNCAGCQASPLWATTGGSVWALGEAAMSKAPLQGPERALIKGMDCTL

SEQ ID NO: 1874 - protein, 142 aa, Homo sapiens
MFIKVMFGAGCSVLVNTSCRLVNLTAHLRQKAGLPPDATIALLAEDGNLVSLEEDLKEGASRAQTMGNSLLKERAIYVLVRIISKVAQEGEDMASTRYESLLENLDDHYPELAGANRQQPSRTPLAESGIAEKLHQQEGQGP

SEQ ID NO: 1875 - protein, 243 aa, Homo sapiens
MLLSLLGACAVVGPFHGPEWEPVQGLLSQNHSCRDPQCCGNLLVLCLFLVWQVRHCWHQVTRTRFSTRNVIKVPLQKRAVPSMRCETVFKLTPEFFSPGKSRGLDSQQCAQRQRWGYRRSLQESWAQNLLSPQHPCPGPPSGVHTHSEPIFCTTSISNTCLLPQNSSWKAWQVPWCLHDGQTRPALDMCQEMEQLLLHSQERLVSLEPVISVRSRPTSMTLTTSLPNLLSAERLQFCPQRAPA

SEQ ID NO: 1876 - protein, 696 aa, Homo sapiens
MAMARLGSWLGEAQWLALVSLFVAALATVGLYLAQWALARARPQPQRRAVEPGEGPRPGSDALLSWILTLGSWRSQWQAAWVTALNEEAERKGGPPFLSFEEDPRQQALELVVQEVSSVLRSAEEKVVVCHVVGQAIQFLVSETPALGAGCRLYDMRLSPFHLQLEFHMKEKREDLQISWSFISVPEMAVNIQPKALGEDQVAETSAMSDVLKDILKHLAGSASPSVVLITKPTTVKEAQNLQCAASTAQESCPPKPPRAHELKLLVRNIHVLLLSEPGASGHINAVCVVQLNDPVQRFSSTLTKNTPDLMWEEEFTFELNAKSKELHLQISEAGRSSEGLLATATVPLDLFKKQPSGPQSFTLTSGSACGSSVLGSVTAEFSYMEPGELKSWPIPPPVPAAKIEKDRTVMPCGTVVTTVTAVKTKPRVDVGRASPLSSDSPVKTPIKVKVIEKDISVQAIACRSAPVSKTLSSSDTELLVLNGSDPVAEVAIRQLSESSKLKLKSPRKKSTIIISGISKTSLSQDHDAALMQGYTASVDSTHQEDAPSHPERAAASAPPEEAESAQASLAPKPQEDELDSWDLEKEPQAAAWSSQVLLDPDGDELSESSMSVLEPGTAKKHKGGILRKGAKLFFRRRHQQKDPGMSQSHNDLVFLEQPEGSRRKGITLTRILNKKLLSRHRNKNTMNGAPVEPCT

SEQ ID NO: 1877 - protein, 541 aa, Homo sapiens
MRLSPFHLQLEFHMKEKREDLQISWSFISVPEMAVNIQPKALGEDQVAETSAMSDVLKDILKHLAGSASPSVVLITKPTTVKEAQNLQCAASTAQESCPPKPPRAHELKLLVRNIHVLLLSEPGASGHINAVCVVQLNDPVQRFSSTLTKNTPDLMWEEEFTFELNAKSKELHLQISEAGRSSEGLLATATVPLDLFKKQPSGPQSFTLTSGSACGSSVLGSVTAEFSYMEPGELKSWPIPPPVPAAKIEKDRTVMPCGTVVTTVTAVKTKPRVDVGRASPLSSDSPVKTPIKVKVIEKDISVQAIACRSAPVSKTLSSSDTELLVLNGSDPVAEVAIRQLSESSKLKLKSPRKKSTIIISGISKTSLSQDHDAALMQGYTASVDSTHQEDAPSHPERAAASAPPEEAESAQASLAPKPQEDELDSWDLEKEPQAAAWSSQVLLDPDGDELSESSMSVLEPGTAKKHKGGILRKGAKLFFRRRHQQKDPGMSQSHNDLVFLEQPEGSRRKGITLTRILNKKLLSRHRNKNTMNGAPVEPCT

SEQ ID NO: 1878 - protein, 182 aa, Homo sapiens
  SITE 1: note = misc_feature - Xaa can be any naturally occurring amino acid
XSTIIISGISKDHDAALMQGYTASVDSTHQEDAPSHPERAAASAPPEEAESAQASLAPKPQEDELDSWDLEKEPQAAAWSSQVLLDPDGDELSESSMSVLEPGTAKKHKGGILRKGAKLFFRRRHQQKDPGMSQSHNDLVFLEQPEGSRRKGITLTRILNKKLLSRHRNKNTMNGAPVEPCT

SEQ ID NO: 1879 - protein, 148 aa, Homo sapiens
MAASPARPAVLALTGLALLLLLCWGPGGISGNKLKLMLQKREAPVPTKTKVAVDENKAKEFLGSLKRQKRQLWDRTRPEVQQWYQQFLYMGFDEAKFEDDITYWLNRDRNGHEYYGDYYQRHYDEDSAIGPRSPYGFRHGASVNYDDY

SEQ ID NO: 1880 - protein, 112 aa, Homo sapiens
MLQKREAPVPTKTKVAVDENKAKEFLGSLKRQKRQLWDRTRPEVQQWYQQFLYMGFDEAKFEDDITYWLNRDRNGHEYYGDYYQRHYDEDSAIGPRSPYGFRHGASVNYDDY

SEQ ID NO: 1881 - protein, 142 aa, Homo sapiens
MQQLRVRGSYRSASQFAGWRRVFYQARQGGISGNKLKLMLQKREAPVPTKTKVAVDENKAKEFLGSLKRQKRQLWDRTRPEVQQWYQQFLYMGFDEAKFEDDITYWLNRDRNGHEYYGDYYQRHYDEDSAIGPRSPYGFRHG

SEQ ID NO: 1882 - protein, 117 aa, Homo sapiens
MIIDSSRIPSFTQLHSTMTRAPLLLLCVALVLLGHVNGATVRNEDKWKPLNNPRNRDLFFRRLQAYFKGRGLDLGTFPNPFPTNENPRPLSFQSELTASASADYEEQKNSFHNYLKG

SEQ ID NO: 1883 - protein, 385 aa, Homo sapiens
MWGFRLLRSPPLLLLLPQLGIGNASSCSQARTMNPGGSGGARCSLSAEVRRRQCLQLSTVPGADPQRSNELLLLAAAGEGLERQDLPGDPAKEEPQPPPQHHVLYFPGDVQNYHEIMTRHPENYQWENWSLENVATILAHRFPNSYIWVIKCSRMHLHKFSCYDNFVKSNMFGAPEHNTDFGAFKHLYMLLVNAFNLSQNSLSKKSLNVWNKDSIASNCRSSPSHTTNGCQGEKVRTCEKSDESAMSFYPPSLNDASFTLIGFSKGCVVLNQLLFELKEAKKDKNIDAFIKSIRTMYWLDGGHSGGSNTWVTYPEVLKEFAQTGIIVHTHVTPYQVRDPMRSWIGKEHKKFVQILGDLGMQVTSQIHFTKEAPSIENHFRVHEVF

SEQ ID NO: 1884 - protein, 922 aa, Homo sapiens
MHWLASATQTSASIVSSSLLSAVDVSSSLTMSEYFQNTSLPGTANSRQFSLPVVSNAAFLTGSISNFSRASAPAISSAWLQPSASGTSFQPLMGSAYLYQHSSTTMLSGVTGQSHICTSAASYPGVFEWDSTASTVKKSSSLRDFTVTVIDQNTAVSSMSMTAQYYKTSDTNTMVPLYPSLSASLVQGTLTQIPNQQGHNLSLPCQIGSQVYYYNQGTLGPQLSCLQSYGSVSYTGYRASAHQPEMVMVLKEVQPTNVLPPVSTSGMYYSVSSQPITETSVQVMETSLGMDTSLGLQSPSQTFCLPQTPEFSKSFSSRNTQTLESNPSPELGDISITPVQSPTNLLTLSPAPSQEKNENENLDEIKTNLSKPLDVHQILIGNQDPPLLPVEIPDIHPLLACIDPLGQEEQPGSENANLRNKSLSLEDQGIFENGIESSSDLADITTWVEDTYLPPIFSSLQDLDQPESPSAKKAKDTSAIKVNQVQEKSCVIKGHSDQVRKNKHKASEPIQGAPKAKIQPKNPECLLEREVVVGSATVSNSASVNKAKHSSNKPHKAASSRISKTKSHGQEKTKGNRKNSSKKSEESKQSGKKVKVEEKQTIPNMKRKKNQPELSQKTLKKPRSSLGMHMLESVQVFHALGKKIDMKTGFSSSRTLGSSSNTQNRQPFPALKPWLDIQHEGKGPEKIQVKAQKLDGSAEKECTSPSHSELPPPGKVKLIPLPFLTLDQPQARHVSRRPNPLASRRPAVAYPARPDSTNSAQSNAVNPSRPAPTNTSLTGPATPAQPISAKATQPSSANPTQPTVPQSAASRPSAYKTSSCSSLQREPVSTAVTSLRSLPKPQNQFLIQDFSLQPRPWRKPTVPEPVMSTPITEEQRPEREAMKRKAQQERENAAKYTSLGKVQFFIERERDMEIAEYYGYTI

SEQ ID NO: 1885 - protein, 192 aa, Homo sapiens
ITHRIHWESASLLRSEETKENEGFTVTAEGKGQGTLSVVTMYHAKAKDQLTCNKFDLKVTIKPAPETGIPSPIFLSSVFLEKRPQDAKNTMILEICTRYRGDQDATMSILDISMMTGFAPDTDDLKQLANGVDRYISKYELDKAFSDRNTLIIYLDKVSHSEDDCLAFKVHQYFNVELIQPGAVKVYAYYNL

SEQ ID NO: 1886 - protein, 1663 aa, Homo sapiens
MGPTSGPSLLLLLLTHLPLALGSPMYSIITPNILRLESEETMVLEAHDAQGDVPVTVTVHDFPGKKLVLSSEKTVLTPATNHMGNVTFTIPANREFKSEKGRNKFVTVQATFGTQVVEKVVLVSLQSGYLFIQTDKTIYTPGSTVLYRIFTVNHKLLPVGRTVMVNIENPEGIPVKQDSLSSQNQLGVLPLSWDIPELVNMGQWKIRAYYENSPQQVFSTEFEVKEYVLPSFEVIVEPTEKFYYIYNEKGLEVTITARFLYGKKVEGTAFVIFGIQDGEQRISLPESLKRIPIEDGSGEVVLSRKVLLDGVQNPRAEDLVGKSLYVSATVILHSGSDMVQAERSGIPIVTSPYQIHFTKTPKYFKPGMPFDLMVFVTNPDGSPAYRVPVAVQGEDTVQSLTQGDGVAKLSINTHPSQKPLSITVRTKKQELSEAEQATRTMQALPYSTVGNSNNYLHLSVLRTELRPGETLNVNFLLRMDRAHEAKIRYYTYLIMNKGRLLKAGRQVREPGQDLVVLPLSITTDFIPSFRLVAYYTLIGASGQREVVADSVWVDVKDSCVGSLVVKSGQSEDRQPVPGQQMTLKIEGDHGARVVLVAVDKGVFVLNKKNKLTQSKIWDVVEKADIGCTPGSGKDYAGVFSDAGLTFTSSSGQQTAQRAELQCPQPAARRRRSVQLTEKRMDKVGKYPKELRKCCEDGMRENPMRFSCQRRTRFISLGEACKKVFLDCCNYITELRRQHARASHLGLARSNLDEDIIAEENIVSRSEFPESWLWNVEDLKEPPKNGISTKLMNIFLKDSITTWEILAVSMSDKKGICVADPFEVTVMQDFFIDLRLPYSVVRNEQVEIRAVLYNYRQNQELKVRVELLHNPAFCSLATTKRRHQQTVTIPPKSSLSVPYVIVPLKTGLQEVEVKAAVYHHFISDGVRKSLKVVPEGIRMNKTVAVRTLDPERLGREGVQKEDIPPADLSDQVPDTESETRILLQGTPVAQMTEDAVDAERLKHLIVTPSGCGEQNMIGMTPTVIAVHYLDETEQWEKFGLEKRQGALELIKKGYTQQLAFRQPSSAFAAFVKRAPSTWLTAYVVKVFSLAVNLIAIDSQVLCGAVKWLILEKQKPDGVFQEDAPVIHQEMIGGLRNNNEKDMALTAFVLISLQEAKDICEEQVNSLPGSITKAGDFLEANYMNLQRSYTVAIAGYALAQMGRLKGPLLNKFLTTAKDKNRWEDPGKQLYNVEATSYALLALLQLKDFDFVPPVVRWLNEQRYYGGGYGSTQATFMVFQALAQYQKDAPDHQELNLDVSLQLPSRSSKITHRIHWESASLLRSEETKENEGFTVTAEGKGQGTLSVVTMYHAKAKDQLTCNKFDLKVTIKPAPETEKRPQDAKNTMILEICTRYRGDQDATMSILDISMMTGFAPDTDDLKQLANGVDRYISKYELDKAFSDRNTLIIYLDKVSHSEDDCLAFKVHQYFNVELIQPGAVKVYAYYNLEESCTRFYHPEKEDGKLNKLCRDELCRCAEENCFIQKSDDKVTLEERLDKACEPGVDYVYKTRLVKVQLSNDFDEYIMAIEQTIKSGSDEVQVGQQRTFISPIKCREALKLEEKKHYLMWGLSSDFWGEKPNLSYIIGKDTWVEHWPEEDECQDEENQKQCQDLGAFTESMVVFGCPN

SEQ ID NO: 1887 - protein, 103 aa, Homo sapiens
MVLEAHDAQGDVPVTVTVHDFPGKKLVLSSEKTVLTPATNHMGNVTFTIPANREFKSEKGRNKFVTVQATFGTQVVEKVVLVSLQSGYLFIQTDKTIYTPGST

SEQ ID NO: 1888 - protein, 101 aa, Homo sapiens
NNEKDMALTAFVLISLQEAKDICEEQVNSLPGSITKAGDFLEANYMNLQRSYTVAIAGYALAQMGRLKGPLLNKFLTTAKDEENQKQCQDLGAFTESMVVF

SEQ ID NO: 1889 - protein, 100 aa, Homo sapiens
  SITE 1: note = misc_feature - Xaa can be any naturally occurring amino acid
XFIQKSDDKVTLEERLDKACEPGVDYVYKTRLVKVQLSNDFDEYIMAIEQTIKSGSDEVQVGQQRTFISPIKCREALKLEEKKHYLMWGLSSDFWGEKPK

SEQ ID NO: 1890 - protein, 119 aa, Homo sapiens
MAGQPAATGSPSADKDGMEPNVVARISQWADDHLRLVRGHGIPLWPKLECSGTIIAHCCCSTHFGRKDPPTSASRVAGTTEHQHWNGHSWNNVTFEKHSTDIKIYKLFGYSSRIYKKKC

SEQ ID NO: 1891 - protein, 71 aa, Homo sapiens
MAGQPAATGSPSADKDGMEPNVVARISQWADDHLRLVRNISTGMAIAGIMLLLRSIRLKSHVVLCWLSWLE

SEQ ID NO: 1892 - protein, 294 aa, Homo sapiens
MAGQPAATGSPSADKDGMEPNVVARISQWADDHLRLVRNISTGMAIAGIMLLLRSIRLTSKFTSSSDIPVEFIRRNVKLRGRLRRITENGLEIEHIPITLPIIASLRKEPRGALLVKLAGVELAETGKAWLQKELKPSQLLWFQLLGKENSALFCYLLVSKGGYFSVNLNEEILRRGLGKTVLVKGLKYDSKIYWTVHRNLLKAELTALKKGEGIWKEDSEKESYLEKFKDSWREIWKKDSFLKTTGSDFSLKKESYYEKLKRTYEIWKDNMNNCSLILKFRELISRINFRRKG

SEQ ID NO: 1893 - protein, 251 aa, Homo sapiens
MAIAGIMLLLRSIRLTSKFTSSSDIPVEFIRRNVKLRGRLRRITENGLEIEHIPITLPIIASLRKEPRGALLVKLAGVELAETGKAWLQKELKPSQLLWFQLLGKENSALFCYLLVSKGGYFSVNLNEEILRRGLGKTVLVKGLKYDSKIYWTVHRNLLKAELTALKKGEGIWKEDSEKESYLEKFKDSWREIWKKDSFLKTTGSDFSLKKESYYEKLKRTYEIWKDNMNNCSLILKFRELISRINFRRKG

SEQ ID NO: 1894 - protein, 115 aa, Homo sapiens
  SITE 1: note = misc_feature - Xaa can be any naturally occurring amino acid
XAGQPAATGSPSADKDGMEPNVVARISQWADDHLRLVRGHGIPLWPKLECSGTIIAHCCCSTHFGRKDPPTSASRVAGTTDQVLHLSPRLECNGVISAHCNLCLPGSSDCPASPS

SEQ ID NO: 1895 - protein, 213 aa, Homo sapiens
MESLLLLPRFGRISDLTVDLSTPEGSFPSDEGWPFAKYLGACGRMVAVNYVGEELWSYFNAPWEKRVDLAWQLMEIAEQLTNNDFEFALYLLDVSFDNFAVGPRDGKVIIVDAENVLVADKRLIRQNKPENWDVWYESKFDDCDKEACLSFSKEILCARATVDHNYYAVCQNLLSRHATWRGTSGGLLHDPPSEIAKDGRLEALLDECANPKK

SEQ ID NO: 1896 - protein, 221 aa, Homo sapiens
MKSENGTVVGSFPSDEGWPFAKYLGACGRMVAVNYVGEELWSYFNAPWEKRVDLAWQLMEIAEQLTNNDFEFALYLLDVSFDNFAVGPRDGKVIIVDAENVLVADKRLIRQNKPENWDVWYESKFDDCDKEACLSFSKEILCARATVDHNYYAVCQNLLSRHATWRGTSGGLLHDPPSEIAKDGRLEALLDECANPKKRYGRFQAAKELREYLAQLSNNVR

SEQ ID NO: 1897 - protein, 192 aa, Homo sapiens
MVAVNYVGEELWSYFNAPWEKRVDLAWQLMEIAEQLTNNDFEFALYLLDVSFDNFAVGPRDGKVIIVDAENVLVADKRLIRQNKPENWDVWYESKFDDCDKEACLSFSKEILCARATVDHNYYAVCQNLLSRHATWRGTSGGLLHDPPSEIAKDGRLEALLDECANPKKRYGRFQAAKELREYLAQLSNNVR

SEQ ID NO: 1898 - protein, 430 aa, Homo sapiens
MWRLVPPKLGRLSRSLKLAALGSLLVLMVLHSPSLLASWQRNELTDRRFLQLNKCPACFGTSWCRRFLNGQVVFEAWGRLRLLDFLNVKNVYFAQYGEPREGGRRRVVLKRLGSQRELAQLDQSICKRATGRPRCDLLQAMPRTEFARLNGDVRLLTPEAVEGWSDLVHCPSQRLLDRLVRRYAETKDSGSFLLRNLKDSERMQLLLTLAFNPEPLVLQSFPSDEGWPFAKYLGACGRMVAVNYVGEELWSYFNAPWEKRVDLAWQLMEIAEQLTNNDFEFALYLLDVSFDNFAVGPRDGKVIIVDAENVLVADKRLIRQNKPENWDVWYESKFDDCDKEACLSFSKEILCARATVDHNYYAVCQNLLSRHATWRGTSGGLLHDPPSEIAKDGRLEALLDECANPKKRYGRFQAAKELREYLAQLSNNVR

SEQ ID NO: 1899 - protein, 1744 aa, Homo sapiens
MRLLWGLIWASSFFTLSLQKPRLLLFSPSVVHLGVPLSVGVQLQDVPRGQVVKGSVFLRNPSRNNVPCSPKVDFTLSSERDFALLSLQVPLKDAKSCGLHQLLRGPEVQLVAHSPWLKDSLSRTTNIQGINLLFSSRRGHLFLQTDQPIYNPGQRVRYRVFALDQKMRPSTDTITVMVENSHGLRVRKKEVYMPSSIFQDDFVIPDISEPGTWKISARFSDGLESNSSTQFEVKKYVLPNFEVKITPGKPYILTVPGHLDEMQLDIQARYIYGKPVQGVAYVRFGLLDEDGKKTFFRGLESQTKLVNGQSHISLSKAEFQDALEKLNMGITDLQGLRLYVAAAIIESPGGEMEEAELTSWYFVSSPFSLDLSKTKRHLVPGAPFLLQALVREMSGSPASGIPVKVSATVSSPGSVPEVQDIQQNTDGSGQVSIPIIIPQTISELQLSVSAGSPHPAIARLTVAAPPSGGPGFLSIERPDSRPPRVGDTLNLNLRAVGSGATFSHYYYMILSRGQIVFMNREPKRTLTSVSVFVDHHLAPSFYFVAFYYHGDHPVANSLRVDVQAGACEGKLELSVDGAKQYRNGESVKLHLETDSLALVALGALDTALYAAGSKSHKPLNMGKVFEAMNSYDLGCGPGGGDSALQVFQAAGLAFSDGDQWTLSRKRLSCPKEKTTRKKRNVNFQKAINEKLGQYASPTAKRCCQDGVTRLPMMRSCEQRAARVQQPDCREPFLSCCQFAESLRKKSRDKGQAGLQRALEILQEEDLIDEDDIPVRSFFPENWLWRVETVDRFQILTLWLPDSLTTWEIHGLSLSKTKGLCVATPVQLRVFREFHLHLRLPMSVRRFEQLELRPVLYNYLDKNLTVSVHVSPVEGLCLAGGGGLAQQVLVPAGSARPVAFSVVPTAAAAVSLKVVARGSFEFPVGDAVSKVLQIEKEGAIHREELVYELNPLDHRGRTLEIPGNSDPNMIPDGDFNSYVRVTASDPLDTLGSEGALSPGGVASLLRLPRGCGEQTMIYLAPTLAASRYLDKTEQWSTLPPETKDHAVDLIQKGYMRIQQFRKADGSYAAWLSRDSSTWLTAFVLKVLSLAQEQVGGSPEKLQETSNWLLSQQQADGSFQDPCPVLDRSMQGGLVGNDETVALTAFVTIALHHGLAVFQDEGAEPLKQRVEASISKANSFLGEKASAGLLGAHAAAITAYALTLTKAPVDLLGVAHNNLMAMAQETGDNLYWGSVTGSQSNAVSPTPAPRNPSDPMPQAPALWIETTAYALLHLLLHEGKAEMADQASAWLTRQGSFQGGFRSTQDTVIALDALSAYWIASHTTEERGLNVTLSSTGRNGFKSHALQLNNRQIRGLEEELQFSLGSKINVKVGGNSKGTLKVLRTYNVLDMKNTTCQDLQIEVTVKGHVEYTMEANEDYEDYEYDELPAKDDPDAPLQPVTPLQLFEGRRNRRRREAPKVVEEQESRVHYTVCIWRNGKVGLSGMAIADVTLLSGFHALRADLEKLTSLSDRYVSHFETEGPHVLLYFDSVPTSRECVGFEAVQEVPVGLVQPASATLYDYYNPERRCSVFYGAPSKSRLLATLCSAEVCQCAEGKCPRQRRALERGLQDEDGYRMKFACYYPRVEYGFQVKVLREDSRAAFRLFETKITQVLHFTKDVKAAANQMRNFLVRASCRLRLEPGKEYLIMGLDGATYDLEGHPQYLLDSNSWIEEMPSERLCRSTRQRAACAQLNDFLQEYGTQGCQV

SEQ ID NO: 1900 - protein, 1698 aa, Homo sapiens
MRLLWGLIWASSFFTLSLQKPRLLLFSPSVVHLGVPLSVGVQLQDVPRGQVVKGSVFLRNPSRNNVPCSPKVDFTLSSERDFALLSLQVPLKDAKSCGLHQLLRGPEVQLVAHSPWLKDSLSRTTNIQGINLLFSSRRGHLFLQTDQPIYNPGQRVRYRVFALDQKMRPSTDTITVMVENSHGLRVRKKEVYMPSSIFQDDFVIPDISEPGTWKISARFSDGLESNSSTQFEVKKYVLPNFEVKITPGKPYILTVPGHLDEMQLDIQARYIYGKPVQGVAYVRFGLLDEDGKKTFFRGLESQTKLVNGQSHISLSKAEFQDALEKLNMGITDLQGLRLYVAAAIIESPGGEMEEAELTSWYFVSSPFSLDLSKTKRHLVPGAPFLLQALVREMSGSPASGIPVKVSATVSSPGSVPEVQDIQQNTDGSGQVSIPIIIPQTISELQLSVSAGSPHPAIARLTVAAPPSGGPGFLSIERPDSRPPRVGDTLNLNLRAVGSGATFSHYYYMILSRGQIVFMNREPKRTLTSVSVFVDHHLAPSFYFVAFYYHGDHPVANSLRVDVQAGACEGKLELSVDGAKQYRNGESVKLHLETDSLALVALGALDTALYAAGSKSHKPLNMGKVFEAMNSYDLGCGPGGGDSALQVFQAAGLAFSDGDQWTLSRKRLSCPKEKTTRKKRNVNFQKAINEKLGQYASPTAKRCCQDGVTRLPMMRSCEQRAARVQQPDCREPFLSCCQFAESLRKKSRDKGQAGLQRALEILQEEDLIDEDDIPVRSFFPENWLWRVETVDRFQILTLWLPDSLTTWEIHGLSLSKTKGLCVATPVQLRVFREFHLHLRLPMSVRRFEQLELRPVLYNYLDKNLTVSVHVSPVEGLCLAGGGGLAQQVLVPAGSARPVAFSVVPTAAAAVSLKVVARGSFEFPVGDAVSKVLQIEKEGAIHREELVYELNPLDHRGRTLEIPGNSDPNMIPDGDFNSYVRVTASDPLDTLGSEGALSPGGVASLLRLPRGCGEQTMIYLAPTLAASRYLDKTEQWSTLPPETKDHAVDLIQKGYMRIQQFRKADGSYAAWLSRDSSTWLTAFVLKVLSLAQEQVGGSPEKLQETSNWLLSQQQADGSFQDPCPVLDRSMQGGLVGNDETVALTAFVTIALHHGLAVFQDEGAEPLKQRVEASISKANSFLGEKASAGLLGAHAAAITAYALTLTKAPVDLLGVAHNNLMAMAQETGDNLYWGSVTGSQSNAVSPTPAPRNPSDPMPQAPALWIETTAYALLHLLLHEGKAEMADQASAWLTRQGSFQGGFRSTQDTVIALDALSAYWIASHTTEERGLNVTLSSTGRNGFKSHALQLNNRQIRGLEEELQFSLGSKINVKVGGNSKGTLKVLRTYNVLDMKNTTCQDLQIEVTVKGHVEYTMEANEDYEDYEYDELPAKDDPDAPLQPVTPLQLFEGRRNRRRREAPKLTSLSDRYVSHFETEGPHVLLYFDSVPTSRECVGFEAVQEVPVGLVQPASATLYDYYNPERRCSVFYGAPSKSRLLATLCSAEVCQCAEGKCPRQRRALERGLQDEDGYRMKFACYYPRVEYGFQVKVLREDSRAAFRLFETKITQVLHFTKDVKAAANQMRNFLVRASCRLRLEPGKEYLIMGLDGATYDLEGHPQYLLDSNSWIEEMPSERLCRSTRQRAACAQLNDFLQEYGTQGCQV

SEQ ID NO: 1901 - protein, 1698 aa, Homo sapiens
MRLLWGLIWASSFFTLSLQKPRLLLFSPSVVHLGVPLSVGVQLQDVPRGQVVKGSVFLRNPSRNNVPCSPKVDFTLSSERDFALLSLQVPLKDAKSCGLHQLLRGPEVQLVAHSPWLKDSLSRTTNIQGINLLFSSRRGHLFLQTDQPIYNPGQRVRYRVFALDQKMRPSTDTITVMVENSHGLRVRKKEVYMPSSIFQDDFVIPDISEPGTWKISARFSDGLESNSSTQFEVKKYVLPNFEVKITPGKPYILTVPGHLDEMQLDIQARYIYGKPVQGVAYVRFGLLDEDGKKTFFRGLESQTKLVNGQSHISLSKAEFQDALEKLNMGITDLQGLRLYVAAAIIESPGGEMEEAELTSWYFVSSPFSLDLSKTKRHLVPGAPFLLQALVREMSGSPASGIPVKVSATVSSPGSVPEVQDIQQNTDGSGQVSIPIIIPQTISELQLSVSAGSPHPAIARLTVAAPPSGGPGFLSIERPDSRPPRVGDTLNLNLRAVGSGATFSHYYYMILSRGQIVFMNREPKRTLTSVSVFVDHHLAPSFYFVAFYYHGDHPVANSLRVDVQAGACEGKLELSVDGAKQYRNGESVKLHLETDSLALVALGALDTALYAAGSKSHKPLNMGKVFEAMNSYDLGCGPGGGDSALQVFQAAGLAFSDGDQWTLSRKRLSCPKEKTTRKKRNVNFQKAINEKLGQYASPTAKRCCQDGVTRLPMMRSCEQRAARVQQPDCREPFLSCCQFAESLRKKSRDKGQAGLQRALEILQEEDLIDEDDIPVRSFFPENWLWRVETVDRFQILTLWLPDSLTTWEIHGLSLSKTKGLCVATPVQLRVFREFHLHLRLPMSVRRFEQLELRPVLYNYLDKNLTVSVHVSPVEGLCLAGGGGLAQQVLVPAGSARPVAFSVVPTAATAVSLKVVARGSFEFPVGDAVSKVLQIEKEGAIHREELVYELNPLDHRGRTLEIPGNSDPNMIPDGDFNSYVRVTASDPLDTLGSEGALSPGGVASLLRLPRGCGEQTMIYLAPTLAASRYLDKTEQWSTLPPETKDHAVDLIQKGYMRIQQFRKADGSYAAWLSRGSSTWLTAFVLKVLSLAQEQVGGSPEKLQETSNWLLSQQQADGSFQDLSPVIHRSMQGGLVGNDETVALTAFVTIALHHGLAVFQDEGAEPLKQRVEASISKASSFLGEKASAGLLGAHAAAITAYALTLTKAPADLRGVAHNNLMAMAQETGDNLYWGSVTGSQSNAVSPTPAPRNPSDPMPQAPALWIETTAYALLHLLLHEGKAEMADQAAAWLTRQGSFQGGFRSTQDTVIALDALSAYWIASHTTEERGLNVTLSSTGRNGFKSHALQLNNRQIRGLEEELQFSLGSKINVKVGGNSKGTLKVLRTYNVLDMKNTTCQDLQIEVTVKGHVEYTMEANEDYEDYEYDELPAKDDPDAPLQPVTPLQLFEGRRNRRRREAPKLTSLSDRYVSHFETEGPHVLLYFDSVPTSRECVGFEAVQEVPVGLVQPASATLYDYYNPERRCSVFYGAPSKSRLLATLCSAEVCQCAEGKCPRQRRALERGLQDEDGYRMKFACYYPRVEYGFQVKVLREDSRAAFRLFETKITQVLHFTKDVKAAANQMRNFLVRASCRLRLEPGKEYLIMGLDGATYDLEGHPQYLLDSNSWIEEMPSERLCRSTRQRAACAQLNDFLQEYGTQGCQV

SEQ ID NO: 1902 - protein, 1744 aa, Homo sapiens
MRLLWGLIWASSFFTLSLQKPRLLLFSPSVVHLGVPLSVGVQLQDVPRGQVVKGSVFLRNPSRNNVPCSPKVDFTLSSERDFALLSLQVPLKDAKSCGLHQLLRGPEVQLVAHSPWLKDSLSRTTNIQGINLLFSSRRGHLFLQTDQPIYNPGQRVRYRVFALDQKMRPSTDTITVMVENSHGLRVRKKEVYMPSSIFQDDFVIPDISEPGTWKISARFSDGLESNSSTQFEVKKYVLPNFEVKITPGKPYILTVPGHLDEMQLDIQARYIYGKPVQGVAYVRFGLLDEDGKKTFFRGLESQTKLVNGQSHISLSKAEFQDALEKLNMGITDLQGLRLYVAAAIIESPGGEMEEAELTSWYFVSSPFSLDLSKTKRHLVPGAPFLLQALVREMSGSPASGIPVKVSATVSSPGSVPEVQDIQQNTDGSGQVSIPIIIPQTISELQLSVSAGSPHPAIARLTVAAPPSGGPGFLSIERPDSRPPRVGDTLNLNLRAVGSGATFSHYYYMILSRGQIVFMNREPKRTLTSVSVFVDHHLAPSFYFVAFYYHGDHPVANSLRVDVQAGACEGKLELSVDGAKQYRNGESVKLHLETDSLALVALGALDTALYAAGSKSHKPLNMGKVFEAMNSYDLGCGPGGGDSALQVFQAAGLAFSDGDQWTLSRKRLSCPKEKTTRKKRNVNFQKAINEKLGQYASPTAKRCCQDGVTRLPMMRSCEQRAARVQQPDCREPFLSCCQFAESLRKKSRDKGQAGLQRALEILQEEDLIDEDDIPVRSFFPENWLWRVETVDRFQILTLWLPDSLTTWEIHGLSLSKTKGLCVATPVQLRVFREFHLHLRLPMSVRRFEQLELRPVLYNYLDKNLTVSVHVSPVEGLCLAGGGGLAQQVLVPAGSARPVAFSVVPTAATAVSLKVVARGSFEFPVGDAVSKVLQIEKEGAIHREELVYELNPLDHRGRTLEIPGNSDPNMIPDGDFNSYVRVTASDPLDTLGSEGALSPGGVASLLRLPRGCGEQTMIYLAPTLAASRYLDKTEQWSTLPPETKDHAVDLIQKGYMRIQQFRKADGSYAAWLSRGSSTWLTAFVLKVLSLAQEQVGGSPEKLQETSNWLLSQQQADGSFQDLSPVIHRSMQGGLVGNDETVALTAFVTIALHHGLAVFQDEGAEPLKQRVEASISKASSFLGEKASAGLLGAHAAAITAYALTLTKAPADLRGVAHNNLMAMAQETGDNLYWGSVTGSQSNAVSPTPAPRNPSDPMPQAPALWIETTAYALLHLLLHEGKAEMADQAAAWLTRQGSFQGGFRSTQDTVIALDALSAYWIASHTTEERGLNVTLSSTGRNGFKSHALQLNNRQIRGLEEELQFSLGSKINVKVGGNSKGTLKVLRTYNVLDMKNTTCQDLQIEVTVKGHVEYTMEANEDYEDYEYDELPAKDDPDAPLQPVTPLQLFEGRRNRRRREAPKVVEEQESRVHYTVCIWRNGKVGLSGMAIADVTLLSGFHALRADLEKLTSLSDRYVSHFETEGPHVLLYFDSVPTSRECVGFEAVQEVPVGLVQPASATLYDYYNPERRCSVFYGAPSKSRLLATLCSAEVCQCAEGKCPRQRRALERGLQDEDGYRMKFACYYPRVEYGFQVKVLREDSRAAFRLFETKITQVLHFTKDVKAAANQMRNFLVRASCRLRLEPGKEYLIMGLDGATYDLEGHPQYLLDSNSWIEEMPSERLCRSTRQRAACAQLNDFLQEYGTQGCQV

SEQ ID NO: 1903 - protein, 118 aa, Homo sapiens
MHPPKTPSGALHRKRKMAAWPFSRLWKVSDPILFQMTLIAALLPAVLGNCGPPPTLSFAAPMDITLTETRFKTGTTLKYTCLPGYVRSHSTQTLTCNSDGEWVYNTFCILDTGFHHIG

SEQ ID NO: 1904 - protein, 152 aa, Homo sapiens
MHPPKTPSGALHRKRKMAAWPFSRLWKVSDPILFQMTLIAALLPAVLGNCGPPPTLSFAAPMDITLTETRFKTGTTLKYTCLPGYVRSHSTQTLTCNSDGEWVYNTFCIYKRCRHPGELRNGQVEIKTDLSFGSQIEFSCSEGFFLIGSTTS

SEQ ID NO: 1905 - protein, 597 aa, Homo sapiens
MHPPKTPSGALHRKRKMAAWPFSRLWKVSDPILFQMTLIAALLPAVLGNCGPPPTLSFAAPMDITLTETRFKTGTTLKYTCLPGYVRSHSTQTLTCNSDGEWVYNTFCIYKRCRHPGELRNGQVEIKTDLSFGSQIEFSCSEGFFLIGSTTSRCEVQDRGVGWSHPLPQCEIVKCKPPPDIRNGRHSGEENFYAYGFSVTYSCDPRFSLLGHASISCTVENETIGVWRPSPPTCEKITCRKPDVSHGEMVSGFGPIYNYKDTIVFKCQKGFVLRGSSVIHCDADSKWNPSPPACEPNSCINLPDIPHASWETYPRPTKEDVYVVGTVLRYRCHPGYKPTTDEPTTVICQKNLRWTPYQGCEALCCPEPKLNNGEITQHRKSRPANHCVYFYGDEISFSCHETSRFSAICQGDGTWSPRTPSCGDICNFPPKIAHGHYKQSSSYSFFKEEIIYECDKGYILVGQAKLSCSYSHWSAPAPQCKALCRKPELVNGRLSVDKDQYVEPENVTIQCDSGYGVVGPQSITCSGNRTWYPEVPKCEWETPEGCEQVLTGKRLMQCLPNPEDVKMALEVYKLSLEIEQLELQRDSARQSTLDKEL

SEQ ID NO: 1906 - protein, 181 aa, Homo sapiens
MFFWCACCLMVAWRVSASDAEHCPELPPVDNSIFVAKEVEGQILGTYVCIKGYHLVGKKTLFCNASKEWDNTTTECRLGHCPDPVLVNGEFSSSGPVNVSDKITFMCNDHYILKGSNRSQCLEDHTWAPPFPICKSRDCDPPGNPVHGYFEGNNFTLGSTISYYCEDRYYLVGVQEQQCVD

SEQ ID NO: 1907 - protein, 252 aa, Homo sapiens
MFFWCACCLMVAWRVSASDAEHCPELPPVDNSIFVAKEVEGQILGTYVCIKGYHLVGKKTLFCNASKEWDNTTTECRLGHCPDPVLVNGEFSSSGPVNVSDKITFMCNDHYILKGSNRSQCLEDHTWAPPFPICKSRDCDPPGNPVHGYFEGNNFTLGSTISYYCEDRYYLVGVQEQQCVDGEWSSALPVCKLIQEAPKPECEKALLAFQESKNLCEAMENFMQQLKESGMTMEELKYSLELKKAELKAKLL

SEQ ID NO: 1908 - protein, 252 aa, Homo sapiens; identical to SEQ ID NO: 1907

SEQ ID NO: 1909 - protein, 252 aa, Homo sapiens; identical to SEQ ID NO: 1907

SEQ ID NO: 1910 - protein, 251 aa, Homo sapiens
MFFWCACCLMVAWRVSASDEHCPELPPVDNSIFVAKEVEGQILGTYVCIKGYHLVGKKTLFCNASKEWDNTTTECRLGHCPDPVLVNGEFSSSGPVNVSDKITFMCNDHYILKGSNRSQCLEDHTWAPPFPICKSRDCDPPGNPVHGYFEGNNFTLGSTISYYCEDRYYLVGVQEQQCVDGEWSSALPVCKLIQEAPKPECEKALLAFQESKNLCEAMENFMQQLKESGMTMEELKYSLELKKAELKAKLL

SEQ ID NO: 1911 - protein, 95 aa, Homo sapiens
MAPPPACRSPMSPPPPPLLLLLLSLALLGARARAEPAGSAVPAQSRPCVDCHAFEFMQRALQDLRKTACSLDARTETLLLQAERRALCACWPAGH

SEQ ID NO: 1912 - protein, 128 aa, Homo sapiens
MRVARRTRNVCRCPRAAGPGVPEPRAAPLPLLAMAPPPACRSPMSPPPPPLLLLLLSLALLGARARAEPAGSAVPAQSRPCVDCHAFEFMQRALQDLRKTACSLDARTETLLLQAERRALCACWPAGH

SEQ ID NO: 1913 - protein, 1676 aa, Homo sapiens
MGLLGILCFLIFLGKTWGQEQTYVISAPKIFRVGASENIVIQVYGYTEAFDATISIKSYPDKKFSYSSGHVHLSSENKFQNSAILTIQPKQLPGGQNPVSYVYLEVVSKHFSKSKRMPITYDNGFLFIHTDKPVYTPDQSVKVRVYSLNDDLKPAKRETVLTFIDPEGSEVDMVEEIDHIGIISFPDFKIPSNPRYGMWTIKAKYKEDFSTTGTAYFEVKEYVLPHFSVSIEPEYNFIGYKNFKNFEITIKARYFYNKVVTEADVYITFGIREDLKDDQKEMMQTAMQNTMLINGIAQVTFDSETAVKELSYYSLEDLNNKYLYIAVTVIESTGGFSEEAEIPGIKYVLSPYKLNLVATPLFLKPGIPYPIKVQVKDSLDQLVGGVPVTLNAQTIDVNQETSDLDPSKSVTRVDDGVASFVLNLPSGVTVLEFNVKTDAPDLPEENQAREGYRAIAYSSLSQSYLYIDWTDNHKALLVGEHLNIIVTPKSPYIDKITHYNYLILSKGKIIHFGTREKFSDASYQSINIPVTQNMVPSSRLLVYYIVTGEQTAELVSDSVWLNIEEKCGNQLQVHLSPDADAYSPGQTVSLNMATGMDSWVALAAVDSAVYGVQRGAKKPLERVFQFLEKSDLGCGAGGGLNNANVFHLAGLTFLTNANADDSQENDEPCKEILRPRRTLQKKIEEIAAKYKHSVVKKCCYDGACVNNDETCEQRAARISLGPRCIKAFTECCVVASQLRANISHKDMQLGRLHMKTLLPVSKPEIRSYFPESWLWEVHLVPRRKQLQFALPDSLTTWEIQGVGISNTGICVADTVKAKVFKDVFLEMNIPYSVVRGEQIQLKGTVYNYRTSGMQFCVKMSAVEGICTSESPVIDHQGTKSSKCVRQKVEGSSSHLVTFTVLPLEIGLHNINFSLETWFGKEILVKTLRVVPEGVKRESYSGVTLDPRGIYGTISRRKEFPYRIPLDLVPKTEIKRILSVKGLLVGEILSAVLSQEGINILTHLPKGSAEAELMSVVPVFYVFHYLETGNHWNIFHSDPLIEKQKLKKKLKEGMLSIMSYRNADYSYSVWKGGSASTWLTAFALRVLGQVNKYVEQNQNSICNSLLWLVENYQLDNGSFKENSQYQPIKLQGTLPVEARENSLYLTAFTVIGIRKAFDICPLVKIDTALIKADNFLLENTLPAQSTFTLAISAYALSLGDKTHPQFRSIVSALKREALVKGNPPIYRFWKDNLQHKDSSVPNTGTARMVETTAYALLTSLNLKDINYVNPVIKWLSEEQRYGGGFYSTQDTINAIEGLTEYSLLVKQLRLSMDIDVSYKHKGALHNYKMTDKNFLGRPVEVLLNDDLIVSTGFGSGLATVHVTTVVHKTSTSEEVCSFYLKIDTQDIEASHYRGYGNSDYKRIVACASYKPSREESSSGSSHAVMDISLPTGISANEEDLKALVEGVDQLFTDYQIKDGHVILQLNSIPSSDFLCVRFRIFELFEVGFLSPATFTVYEYHRPDKQCTMFYSTSNIKIQKVCEGAACKCVEADCGQMQEELDLTISAETRKQTACKPEIAYAYKVSITSITVENVFVKYKATLLDIYKTGEAVAEKDSEITFIKKVTCTNAELVKGRQYLIMGKEALQIKYNFSFRYIYPLDSLTWIEYWPRDTTCSSCQAFLANLDEFAEDIFLNGC

SEQ ID NO: 1914 - protein, 72 aa, Homo sapiens
MAVSVLRLTVVLGLLVLFLTCYADDKPDKPDDKPDDSGKDPKPDFPKFLSLLGTEIIENAVEFILRSMSRST

SEQ ID NO: 1915 - protein, 87 aa, Homo sapiens
MAVSVLRLTVVLGLLVLFLTCYADDKPDKPDDKPDDSGKDPKPDFPKFLSLLGTEIIENAVEFILRSMSRSTGFMEFDDNEGKHSSK

SEQ ID NO: 1916 - protein, 31 aa, Homo sapiens
MARRSVLYFILLNALINKGQACFCDHYAWTQ

SEQ ID NO: 1917 - protein, 133 aa, Homo sapiens
MARRSVLYFILLNALINKGQACFCDHYAWTQWTSCSKTCNSGTQSRHRQIVVDKYYQENFCEQICSKQETRECNWQRCPINCLLGDFGPWSDCDPCIEKQSKVRSVLRPSQFGGQPCTAPLVAFQPCIPSKLC

SEQ ID NO: 1918 - protein, 934 aa, Homo sapiens
MARRSVLYFILLNALINKGQACFCDHYAWTQWTSCSKTCNSGTQSRHRQIVVDKYYQENFCEQICSKQETRECNWQRCPINCLLGDFGPWSDCDPCIEKQSKVRSVLRPSQFGGQPCTAPLVAFQPCIPSKLCKIEEADCKNKFRCDSGRCIARKLECNGENDCGDNSDERDCGRTKAVCTRKYNPIPSVQLMGNGFHFLAGEPRGEVLDNSFTGGICKTVKSSRTSNPYRVPANLENVGFEVQTAEDDLKTDFYKDLTSLGHNENQQGSFSSQGGSSFSVPIFYSSKRSENINHNSAFKQAIQASHKKDSSFIRIHKVMKVLNFTTKAKDLHLSDVFLKALNHLPLEYNSALYSRIFDDFGTHYFTSGSLGGVYDLLYQFSSEELKNSGLTEEEAKHCVRIETKKRVLFAKKTKVEHRCTTNKLSEKHEGSFIQGAEKSISLIRGGRSEYGAALAWEKGSSGLEEKTFSEWLESVKENPAVIDFELAPIVDLVRNIPCAVTKRNNLRKALQEYAAKFDPCQCAPCPNNGRPTLSGTECLCVCQSGTYGENCEKQSPDYKSNAVDGQWGCWSSWSTCDATYKRSRTRECNNPAPQRGGKRCEGEKRQEEDCTFSIMENNGQPCINDDEEMKEVDLPEIEADSGCPQPVPPENGFIRNEKQLYLVGEDVEISCLTGFETVGYQYFRCLPDGTWRQGDVECQRTECIKPVVQEVLTITPFQRLYRIGESIELTCPKGFVVAGPSRYTCQGNSWTPPISNSLTCEKDTLTKLKGHCQLGQKQSGSECICMSPEEDCSHHSEDLCVFDTDSNDYFTSPACKFLAEKCLNNQQLHFLHIGSCQDGRQLEWGLERTRLSSNSTKKESCGYDTCYDWEKCSASTSKCVCLLPPQCFKGGNQLYCVKMGSSTSEKTLNICEVGTIRCANRKMEILHPGKCLA

SEQ ID NO: 1919 - protein, 934 aa, Homo sapiens; identical to SEQ ID NO: 1918

SEQ ID NO: 1920 - protein, 191 aa, Homo sapiens
MAAPRGRAAPWTTALLLLLASQVLSPGSCADEEEVPEEWVLLHVVQGQIGAGNYSYLRLNHEGKIVLRMRSLKGDADLYVSASSLHPSFDDYELQSATCGPDAVSIPAHFRRPVGIGVYGHPSHLESEFEMKVYYDGTVEQHPFGEAAYPADGADAGQKHAGAPEDASQEEESVLWTILISILKLVLEILF

SEQ ID NO: 1921 - protein, 325 aa, Homo sapiens
MQGRVAGSCAPLGLLLVCLHLPGLFARSIGVVEEKVSQNLGTNLPQLGQPSSTGPSNSEHPQPALDPRSNDLARVPLKLSVPASDGFPPAGGSAVQRWPPSWGLPAMDSWPPEDPWQMMAAAAEDRLGEALPEELSYLSSAAALAPGSGPLPGESSPDATGLSPKASLLHQDSESRRLPRSNSLGAGGKILSQRPPWSLIHRVLPDHPWGTLNPSVSWGGGGPGTGWGTRPMPHPEGIWGINNQPPGTSWGNINRYPGGSWGNINRYPGGSWGNINRYPGGSWGNIHLYPGINNPFPPGVLRPPGSSWNIPAGFPNPPSPRLQWG

SEQ ID NO: 1922 - protein, 330 aa, Homo sapiens
MAFLPSWVCVLVGSFSASLAGTSNLSETEPPLWKESPGQLSDYRVENSMYIINPWVYLERMGMYKIILNQTARYFAKFAPDNEQNILWGLPLQYGWQYRTGRLADPTRRTNCGYESGDHMCISVDSWWADLNYFLSSLPFLAAVDSGVMGISSDQVRLLPPPKNERKFCYDVSSCRSSFPETMNKWNTFYQYLQSPFSKFDDLLKYLWAAHTSTLADNIKSFEDRYDYYSKAEAHFERSWVLAVDHLAAVLFPTTLIRSYKFQKGMPPRILLNTDVAPFISDFTAFQNVVLVLLNMLDNVDKSIGYLCTEKSNVYRDHSESSSRSYGNNS

SEQ ID NO: 1923 - protein, 843 aa, Homo sapiens
MKVISLFILVGFIGEFQSFSSASSPVNCQWDFYAPWSECNGCTKTQTRRRSVAVYGQYGGQPCVGNAFETQSCEPTRGCPTEEGCGERFRCFSGQCISKSLVCNGDSDCDEDSADEDRCEDSERRPSCDIDKPPPNIELTGNGYNELTGQFRNRVINTKSFGGQCRKVFSGDGKDFYRLSGNVLSYTFQVKINNDFNYEFYNSTWSYVKHTSTEHTSSSRKRSFFRSSSSSSRSYTSHTNEIHKGKSYQLLVVENTVEVAQFINNNPEFLQLAEPFWKELSHLPSLYDYSAYRRLIDQYGTHYLQSGSLGGEYRVLFYVDSEKLKQNDFNSVEEKKCKSSGWHFVVKFSSHGCKELENALKAASGTQNNVLRGEPFIRGGGAGFISGLSYLELDNPAGNKRRYSAWAESVTNLPQVIKQKLTPLYELVKEVPCASVKKLYLKWALEEYLDEFDPCHCRPCQNGGLATVEGTHCLCHCKPYTFGAACEQGVLVGNQAGGVDGGWSCWSSWSPCVQGKKTRSRECNNPPPSGGGRSCVGETTESTQCEDEELEHLRLLEPHCFPLSLVPTEFCPSPPALKDGFVQDEGTMFPVGKNVVYTCNEGYSLIGNPVARCGEDLRWLVGEMHCQKIACVLPVLMDGIQSHPQKPFYTVGEKVTVSCSGGMSLEGPSAFLCGSSLKWSPEMKNARCVQKENPLTQAVPKCQRWEKLQNSRCVCKMPYECGPSLDVCAQDERSKRILPLTVCKMHVLHCQGRNYTLTGRDSCTLPASAEKACGACPLWGKCDAESSKCVCREASECEEEGFSICVEVNGKEQTMSECEAGALRCRGQSISVTSIRPCAAETQ

SEQ ID NO: 1924 - protein, 324 aa, Homo sapiens
MLWFRGALGVWVWLAAASQPCKNSNAGRRGQHPRRPAGSCVQRLTMRNTSKELQGATHRYAPCDWYYHVPVKRSEKAVDAPPASQIPGLSNLGDSHSENLPGTRRYWIKETDSEYVKLAKQGGRPDLLKHFAPGTRKGSPVAYSLPDWYIHHSKPPTASQQEVRAVSMPDYMVHEEFNPDQANGSYASRRGPFDFDMKTVWQREAEELEKEKKKLRLPAIDSKYLSKAGTPLGPKNPAGSRLSFPPVNGYKDEWLQQQQRADSDKRTPKTSRASVLSQSPRDLEGPQDAARLQDAEASEGPEDTPESSQSPEESVSASTPAELK

SEQ ID NO: 1925 - protein, 340 aa, Homo sapiens
MLWFRGALGVWVWLAAASQPCKNSNAGRRGQHPRRPAGSCVQRLTMRNTSKELQGATHRYAPCDWYYHVPVKRSEKAVDAPPASQIPGLSNLGDSHSENLPGTRRYWIKETDSEYVKLAKQGGRPDLLKHFAPGTRKGSPVAYSLPDWYIHHSKPPTASQQEVRAVSMPDYMVHEEFNPDQANGSYASRRGPFDFDMKTVWQREAEELEKEKKKLRLPAIDSKYLSKAGTPLGPKNPAGSRLSFPPVPGQKNSSPTNFSKLISNGYKDEWLQQQQRADSDKRTPKTSRASVLSQSPRDLEGPQDAARLQDAEASEGPEDTPESSQSPEESVSASTPAELK

SEQ ID NO: 1926 - protein, 157 aa, Homo sapiens
MPDYMVHEEFNPDQANGSYASRRGPFDFDMKTVWQREAEELEKEKKKLRLPAIDSKYLSKAGTPLGPKNPAGSRLSFPPVNGYKDEWLQQQQRADSDKRTPKTSRASVLSQSPRDLEGPQDAARLQDAEASEGPEDTPESSQSPEESVSASTPAELK

SEQ ID NO: 1927 - protein, 153 aa, Homo sapiens
MPDYMVHEEFNPDQANGSYASRRGPFDFDMKTVWQREAEELEKEKKKLRLPAIDSKYLSKAGTPLGPKNPAGSRLSFPPVNGYKDEWLQQQQRADSDKRTPKTSRASVLSQSPRDLEGPQDAARLQDAEASEGPEDTPGPEESVSASTPAELK

SEQ ID NO: 1928 - protein, 295 aa, Homo sapiens
MRNTSKELQGATHRYAPCDWYYHVPVKRSEKAVDAPPASQIPGLSNLGDSHSENLPGTRRYWIKETDSEYVKLAKQGGRPDLLKHFAPGTRKGSPVAYSLPDWYIHHSKPPTASQQEVRAVSMPDYMVHEEFNPDQANGSYASRRGPFDFDMKTVWQREAEELEKEKKKLRLPAIDSKYLSKAGTPLGPKNPAGSRLSFPPVPGQKNSSPTNFSKLISNGYKDEWLQQQQRADSDKRTPKTSRASVLSQSPRDLEGPQDAARLQDAEASEGPEDTPESSQSPEESVSASTPAELK

SEQ ID NO: 1929 - protein, 584 aa, Homo sapiens
MFAVVFFILSLMTCQPGVTAQEKVNQRVRRAATPAAVTCQLSNWSEWTDCFPCQDKKYRHRSLLQPNKFGGTICSGDIWDQASCSSSTTCVRQAQCGQDFQCKETGRCLKRHLVCNGDQDCLDGSDEDDCEDVRAIDEDCSQYEPIPGSQKAALGYNILTQEDAQSVYDASYYGGQCETVYNGEWRELRYDSTCERLYYGDDEKYFRKPYNFLKYHFEALADTGISSEFYDNANDLLSKVKKDKSDSFGVTIGIGPAGSPLLVGVGVSHSQDTSFLNELNKYNEKKFIFTRIFTKVQTAHFKMRKDDIMLDEGMLQSLMELPDQYNYGMYAKFINDYGTHYITSGSMGGIYEYILVIDKAKMESLGITSRDITTCFGGSLGIQYEDKINVGGGLSGDHCKKFGGGKTERARKAMAVEDIISRVRGGSSGWSGGLAQNRSTITYRSWGRSLKYNPVVIDFEMQPIHEVLRHTSLGPLEAKRQNLRRALDQYLMEFNACRCGPCFNNGVPILEGTSCRCQCRLGSLGAACEQTQTEGAKADGSWSCWSSWSVCRAGIQERRRECDNPAPQNGGASCPGRKVQTQAC

SEQ ID NO: 1930 - protein, 529 aa, Homo sapiens
MDTCMTLAFTLSGRFFMLLSQYRYAYLLQPSQFHGEPCNFSDKEVEDCVTNRPCGSQVRCEGFVCAQTGRCVNRRLLCNGDNDCGDQSDEANCRRIYKKCQHEMDQYWGIGSLASGINLFTNSFEGPVLDHRYYAGGCSPHYILNTRFRKPYNVESYTPQTQGKYEFILKEYESYSDFERNVTEKMASKSGFSFGFKIPGIFELGISSQSDRGKHYIRRTKRFSHTKSVFLHARSDLEVAHYKLKPRSLMLHYEFLQRVKRLPLEYSYGEYRDLFRDFGTHYITEAVLGGIYEYTLVMNKEAMERGDYTLNNVHACAKNDFKIGGAIEEVYVSLGVSVGKCRGILNEIKDRNKRDTMVEDLVVLVRGGASEHITTLAYQELPTADLMQEWGDAVQYNPAIIKVKVEPLYELVTATDFAYSSTVRQNMKQALEEFQKEVSSCHCAPCQGNGVPVLKGSRCDCICPVGSQGLACEVSYRKNTPIDGKWNCWSNWSSCSGRRKTRQRQCNNPPPQNGGSPCSGPASETLDCS

SEQ ID NO: 1931 - protein, 591 aa, Homo sapiens
MKNSRTWAWRAPVELFLLCAALGCLSLPGSRGERPHSFGSNAVNKSFAKSRQMRSVDVTLMPIDCELSSWSSWTTCDPCQKKRYRYAYLLQPSQFHGEPCNFSDKEVEDCVTNRPCGSQVRCEGFVCAQTGRCVNRRLLCNGDNDCGDQSDEANCRRIYKKCQHEMDQYWGIGSLASGINLFTNSFEGPVLDHRYYAGGCSPHYILNTRFRKPYNVESYTPQTQGKYEFILKEYESYSDFERNVTEKMASKSGFSFGFKIPGIFELGISSQSDRGKHYIRRTKRFSHTKSVFLHARSDLEVAHYKLKPRSLMLHYEFLQRVKRLPLEYSYGEYRDLFRDFGTHYITEAVLGGIYEYTLVMNKEAMERGDYTLNNVHACAKNDFKIGGAIEEVYVSLGVSVGKCRGILNEIKDRNKRDTMVEDLVVLVRGGASEHITTLAYQELPTADLMQEWGDAVQYNPAIIKVKVEPLYELVTATDFAYSSTVRQNMKQALEEFQKEVSSCHCAPCQGNGVPVLKGSRCDCICPVGSQGLACEVSYRKNTPIDGKWNCWSNWSSCSGRRKTRQRQCNNPPPQNGGSPCSGPASETLDCS

SEQ ID NO: 1932 - protein, 539 aa, Homo sapiens
MRSVDVTLMPIDCELSSWSSWTTCDPCQKKRYRYAYLLQPSQFHGEPCNFSDKEVEDCVTNRPCGSQVRCEGFVCAQTGRCVNRRLLCNGDNDCGDQSDEANCRRIYKKCQHEMDQYWGIGSLASGINLFTNSFEGPVLDHRYYAGGCSPHYILNTRFRKPYNVESYTPQTQGKYEFILKEYESYSDFERNVTEKMASKSGFSFGFKIPGIFELGISSQSDRGKHYIRRTKRFSHTKSVFLHARSDLEVAHYKLKPRSLMLHYEFLQRVKRLPLEYSYGEYRDLFRDFGTHYITEAVLGGIYEYTLVMNKEAMERGDYTLNNVHACAKNDFKIGGAIEEVYVSLGVSVGKCRGILNEIKDRNKRDTMVEDLVVLVRGGASEHITTLAYQELPTADLMQEWGDAVQYNPAIIKVKVEPLYELVTATDFAYSSTVRQNMKQALEEFQKEVSSCHCAPCQGNGVPVLKGSRCDCICPVGSQGLACEVSYRKNTPIDGKWNCWSNWSSCSGRRKTRQRQCNNPPPQNGGSPCSGPASETLDCS

SEQ ID NO: 1933 - protein, 202 aa, Homo sapiens
MLPPGTATLLTLLLAAGSLGQKPQRPRRPASPISTIQPKANFDAQQFAGTWLLVAVGSACRFLQEQGHRAEATTLHVAPQGTAMAVSTFRKLDGICWQVRQLYGDTGVLGRFLLQARDARGAVHVVVAETDYQSFAVLYLERAGQLSVKLYARSLPVSDSVLSGFEQRVQEAHLTEDQIFYFPKYGFCEAADQFHVLDEVRR

SEQ ID NO: 1934 - protein, 164 aa, Homo sapiens
MLPPGTATLLTLLLAAGSLGQKPQRPRRPASPISTIQPKANFDAQQFAGTWLLVAVGSACRFLQEQGHRAEATTLHVAPQGTAMAVSTFRKLDGICWQVRQLYGDTGVLGRFLLQARDARGAVHVVVAETDYQSFAVLYLERAGQLSVKLYGAQGVVTDRPGVG

SEQ ID NO: 1935 - protein, 559 aa, Homo sapiens
MSACRSFAVAICILEISILTAQYTTSYDPELTESSGSASHIDCRMSPWSEWSQCDPCLRQMFRSRSIEVFGQFNGKRCTDAVGDRRQCVPTEPCEDAEDDCGNDFQCSTGRCIKMRLRCNGDNDCGDFSDEDDCESEPRPPCRDRVVEESELARTAGYGINILGMDPLSTPFDNEFYNGLCNRDRDGNTLTYYRRPWNVASLIYETKGEKNFRTEHYEEQIEAFKSIIQEKTSNFNAAISLKFTPTETNKAEQCCEETASSISLHGKGSFRFSYSKNETYQLFLSYSSKKEKMFLHVKGEIHLGRFVMRNRDVVLTTTFVDDIKALPTTYEKGEYFAFLETYGTHYSSSGSLGGLYELIYVLDKASMKRKGVELKDIKRCLGYHLDVSLAFSEISVGAEFNKDDCVKRGEGRAVNITSENLIDDVVSLIRGGTRKYAFELKEKLLRGTVIDVTDFVNWASSINDAPVLISQKLSPIYNLVPVKMKNAHLKKQNLERAIEDYINEFSVRKCHTCQNGGTVILMDGKCLCACPFKFEGIACEISKQKISEGLPALEFPNEK

SEQ ID NO: 1936 - protein, 183 aa, Homo sapiens
MVRIWTTIMIVLILLLRIGPNKPSLSGRQAPAQAQTSDLVPSLFPLGLWAPGFCTWSSPDEDKRPRKPVPGTGNRDSGTRRRLQDATEQDPRPGNDVASAETAGPPSPSGIRAQDRAPRHRRAPPARMPVAPAPSADGEPLQEQGGGLFHRTRSVYNGLELNTWMKVERLFVEKFHQSFSLDN

SEQ ID NO: 1937 - protein, 235 aa, Homo sapiens
MVRIWTTIMIVLILLLRIGPNKPSLSGRQAPAQAQTSDLVPSLFPLGLWAPGFCTWSSPDEDKRPRKPVPGTGNRDSGTRRRLQDATEQDPRPGNDVASAETAGPPSPSGIRAQDRAPRHRRAPPARMPVAPAPSADGGERRARAGRGTRVGGWGPKDPPFQQNPHRSRARRGLGRATAAGALHISTPPPEPLQEQGGGLFHRTRSVYNGLELNTWMKVERLFVEKFHQSFSLDN

SEQ ID NO: 1938 - protein, 202 aa, Homo sapiens
MVRIWTTIMIVLILLLRIGPNKPSLSGRQAPAQAQTSDLVPSLFPLGLWAPGFCTWSSPDEDKVWRPAWEQGPKGEPDPRGLRPRKPVPGTGNRDSGTRRRLQDATEQDPRPGNDVASAETAGPPSPSGIRAQDRAPRHRRAPPARMPVAPAPSADGEPLQEQGGGLFHRTRSVYNGLELNTWMKVERLFVEKFHQSFSLDN

SEQ ID NO: 1939 - protein, 56 aa, Homo sapiens
HVSLRLDKEHLVNISGGPMTYSHRLEEIRLHFGSEDSQGSEHLLNGQAFSGEEKVC

SEQ ID NO: 1940 - protein, 328 aa, Homo sapiens
MEIVWEVLFLLQANFIVCISAQQNSPKIHEGWWAYKEVVQGSFVPVPSFWGLVNSAWNLCSVGKRQSPVNIETSHMIFDPFLTPLRINTGGRKVSGTMYNTGRHVSLRLDKEHLVNISGGPMTYSHRLEEIRLHFGSEDSQGSEHLLNGQAFSGEVQLIHYNHELYTNVTEAAKSPNGLVVVSIFIKVSDSSNPFLNRMLNRDTITRITYKNDAYLLQGLNIEELYPETSSFITYDGSMTIPPCYETASWIIMNKPVYITRMQMHSLRLLSQNQPSQIFLSMSDNFRPVQPLNNRCIRTNINFSLQGKDCPNNRAQKLQYRVNEWLLK

SEQ ID NO: 1941 - protein, 328 aa, Homo sapiens; identical to SEQ ID NO: 1940

SEQ ID NO: 1942 - protein, 328 aa, Homo sapiens; identical to SEQ ID NO: 1940

SEQ ID NO: 1943 - protein, 276 aa, Homo sapiens
MEIVWEVLFLLQANFIVCISAQQNSPKIHEGWWAYKEVVQGSFVPVPSFWGLVNSAWNLCSVGKRQSPVNIETSHMIFDPFLTPLRINTGGRKVSGTMYNTGRHVSLRLDKEHLVNISGGPMTYSHRLEEIRLHFGSEDSQGSEHLLNGQAFSGEVQLIHYNHELYTNVTEAAKSPNGLVVVSIFIKVSDSSNPFLNRMLNRDTITRITYKNDAYLLQGLNIEELYPETSSFITYDGSMTIPPCYETASWIIMNKPVYITRMQMHSLRLLSQNQPS

SEQ ID NO: 1944 - protein, 42 aa, Homo sapiens
MEIVWEVLFLLQANFIVCISGDLRRAVRRLWWQSGLEMQVTC

SEQ ID NO: 1945 - protein, 253 aa, Homo sapiens
MIFDPFLTPLRINTGGRKVSGTMYNTGRHVSLRLDKEHLVNISGGPMTYSHRLEEIRLHFGSEDSQGSEHLLNGQAFSGEVQLIHYNHELYTNVTEAAKSPNGLVVVSIFIKVSDSSNPFLNRMLNRDTITRITYKNDAYLLQGLNIEELYPETSSFITYDGSMTIPPCYETASWIIMNKPVYITRMQMHSLRLLSQNQPSQIFLSMSDNFRPVQPLNNRCIRTNINFSLQGKDCPNNRAQKLQYRVNEWLLK

SEQ ID NO: 1946 - protein, 328 aa, Homo sapiens
MGAAARLSAPRALVLWAALGAAAHIGPAPDPEDWWSYKDNLQGNFVPGPPFWGLVNAAWSLCAVGKRQSPVDVELKRVLYDPFLPPLRLSTGGEKLRGTLYNTGRHVSFLPAPRPVVNVSGGPLLYSHRLSELRLLFGARDGAGSEHQINHQGFSAEVQLIHFNQELYGNFSAASRGPNGLAILSLFVNVASTSNPFLSRLLNRDTITRISYKNDAYFLQDLSLELLFPESFGFITYQGSLSTPPCSETVTWILIDRALNITSLQMHSLRLLSQNPPSQIFQSLSGNSRPLQPLAHRALRGNRDPRHPERRCRGPNYRLHVDGVPHGR

SEQ ID NO: 1947 - protein, 113 aa, Homo sapiens
  SITE 1: note = misc_feature - Xaa can be any naturally occurring amino acid
XDAYFLQDLSLELLFPESFGFITYQGSLSTPPCSETVTWILIDRALNITSLQMHSLRLLSQNPPSQIFQSLSGNSRPLQPLAHRALRGNRDPRHPERRCRGPNYRLHAQCFST

SEQ ID NO: 1948 - protein, 187 aa, Homo sapiens
MRALVLLLSLFLLGGQAQHVSDWTYSEGALDEAHWPQHYPACGGQRQSPINLQRTKISLPSTMRMTVADGTVYIAQQMHFHWGGASSEISGSEHTVDGIRHVIEIHIVHYNSKYKSYDIAQDAPDGLAVLAAFVEVKNYPENTYYSNFISHLANIKYPGQRTTLTGLDVQDMLPRNLQHYYTYHGSL

SEQ ID NO: 1949 - protein, 179 aa, Homo sapiens
MRALVLLLSLFLLGGQAQHVSDWTYSEGALDEAHWPQHYPACGGQRQSPINLQRTKVRYNPSLKGLNMTGYETQAGEFPMVNNGHTDWQAELFLPSLSSPCGEGAKHKGQRQWLCSPSLDSWWEAIIDGGSLWATLAECGLRAEGPEEGRHMEEKSPASQGACSGSRLPISRGPCTFFL

SEQ ID NO: 1950 - protein, 313 aa, Homo sapiens
MRALVLLLSLFLLGGQAQHVSDWTYSEGALDEAHWPQHYPACGGQRQSPINLQRTKVRYNPSLKGLNMTGYETQAGEFPMVNNGHTVQISLPSTMRMTVADGTVYIAQQMHFHWGGASSEISGSEHTVDGIRHVIEIHIVHYNSKYKSYDIAQDAPDGLAVLAAFVEVKNYPENTYYSNFISHLANIKYPGQRTTLTGLDVQDMLPRNLQHYYTYHGSLTTPPCTENVHWFVLADFVKLSRTQVWKLENSLLDHRNKTIHNDYRRTQPLNHRVVESNFPNQGKGHGGHRGRSQNPRVQPTSTRHPLALGSLEA

SEQ ID NO: 1951 - protein, 308 aa, Homo sapiens
MRALVLLLSLFLLGGQAQHVSDWTYSEGALDEAHWPQHYPACGGQRQSPINLQRTKVRYNPSLKGLNMTGYETQAGEFPMVNNGHTVQISLPSTMRMTVADGTVYIAQQMHFHWGGASSEISGSEHTVDGIRHVIEIHIVHYNSKYKSYDIAQDAPDGLAVLAAFVEVKNYPENTYYSNFISHLANIKYPGQRTTLTGLDVQDMLPRNLQHYYTYHGSLTTPPCTENVHWFVLADFVKLSRTQVWKLENSLLDHRNKTIHNDYRRTQPLNHRVVESNFPNQEYTLGSEFQFYLHKIEEILDYLRRALN

SEQ ID NO: 1952 - protein, 248 aa, Homo sapiens
MRALVLLLSLFLLGGQAQHVSDWTYSVQISLPSTMRMTVADGTVYIAQQMHFHWGGASSEISGSEHTVDGIRHVIEIHIVHYNSKYKSYDIAQDAPDGLAVLAAFVEVKNYPENTYYSNFISHLANIKYPGQRTTLTGLDVQDMLPRNLQHYYTYHGSLTTPPCTENVHWFVLADFVKLSRTQVWKLENSLLDHRNKTIHNDYRRTQPLNHRVVESNFPNQEYTLGSEFQFYLHKIEEILDYLRRALN

SEQ ID NO: 1953 - protein, 459 aa, Homo sapiens
MAPLCPSPWLPLLIPAPAPGLTVQLLLSLLLLVPVHPQRLPRMQEDSPLGGGSSGEDDPLGEEDLPSEEDSPREEDPPGEEDLPGEEDLPGEEDLPEVKPKSEEEGSLKLEDLPTVEAPGDPQEPQNNAHRDKEGDDQSHWRYGGDPPWPRVSPACAGRFQSPVDIRPQLAAFCPALRPLELLGFQLPPLPELRLRNNGHSVQLTLPPGLEMALGPGREYRALQLHLHWGAAGRPGSEHTVEGHRFPAEIHVVHLSTAFARVDEALGRPGGLAVLAAFLEEGPEENSAYEQLLSRLEEIAEEGSETQVPGLDISALLPSDFSRYFQYEGSLTTPPCAQGVIWTVFNQTVMLSAKQLHTLSDTLWGPGDSRLQLNFRATQPLNGRVIEASFPAGVDSSPRAAEPVQLNSCLAAGDILALVFGLLFAVTSVAFLVQMRRQHRRGTKGGVSYRPAEVAETGA

SEQ ID NO: 1954 - protein, 356 aa, Homo sapiens [sequence omitted]

SEQ ID NO: 1955 - protein, 633 aa, Homo sapiens
MAAAAAAATTAACSSGSAGTDAAGASGLQQPPPQPQPQPAAAAPAQPPPEPPRKPRMDPRRRQAALSFLTNISLDGRLPPQDAEWGGGEEGGAAKPGAGGACGARTRFSLLAAAERGGCIALAAPGTPAAGLAAGSGPCLPQPSSLPPLIPGGHATVSGPGVARGFASPLGAGRASGEQWQPPRPAPLAACAQLQLLDGSGAAGQEELEEDDAFISVQVPAAAFLGSGTPGSGSGSRGRLNSFTQGILPIAFSRPTSQNYCSLEQPGQGGSTSAFEQLQRSRRRLISQRSSLETLEDIEENAPLRRCRTLSGSPRPKNFKKIHFIKNMRQHDTRNGRIVLISGRRSFCSIFSVLPYRDSTQVGDLKLDGGRQSTGAVSLKEIIGLEGVELGADGKTVSYTQFLLPTNAFGARRNTIDSTSSFSQFRNLSHRSLSIGRASGTQGSLDTGSDLGDFMDYDPNLLDDPQWPCGKHKRVLIFPSYMTTVIDYVKPSDLKKDMNETFKEKFPHIKLTLSKIRSLKREMRKLAQEDCGLEEPTVAMAFVYFEKLALKGKLNKQNRKLCAGACVLLAAKIGSDLKKHEVKHLIDKLEEKFRLNRRELIAFEFPVLVALEFALHLPEHEVMPHYRRLVQSS

SEQ ID NO: 1956 - protein, 368 aa, Homo sapiens
MLSKRGCHARIYADFPIRRLISQRSSLETLEDIEENAPLRRCRTLSGSPRPKNFKKIHFIKNMRQHDTRNGRIVLISGRRSFCSIFSVLPYRDSTQVGDLKLDGGRQSTGAVSLKEIIGLEGVELGADGKTVSYTQFLLPTNAFGARRNTIDSTSSFSQFRNLSHRSLSIGRASGTQGSLDTGSDLGDFMDYDPNLLDDPQWPCGKHKRVLIFPSYMTTVIDYVKPSDLKKDMNETFKEKFPHIKLTLSKIRSLKREMRKLAQEDCGLEEPTVAMAFVYFEKLALKGKLNKQNRKLCAGACVLLAAKIGSDLKKHEVKHLIDKLEEKFRLNRRELIAFEFPVLVALEFALHLPEHEVMPHYRRLVQSS

SEQ ID NO: 1957 - protein, 9 aa, Homo sapiens
MRQHDTRNG

SEQ ID NO: 1958 - protein, 306 aa, Homo sapiens
MRQHDTRNGRIVLISGRRSFCSIFSVLPYRDSTQVGDLKLDGGRQSTGAVSLKEIIGLEGVELGADGKTVSYTQFLLPTNAFGARRNTIDSTSSFSQFRNLSHRSLSIGRASGTQGSLDTGSDLGDFMDYDPNLLDDPQWPCGKHKRVLIFPSYMTTVIDYVKPSDLKKDMNETFKEKFPHIKLTLSKIRSLKREMRKLAQEDCGLEEPTVAMAFVYFEKLALKGKLNKQNRKLCAGACVLLAAKIGSDLKKHEVKHLIDKLEEKFRLNRRELIAFEFPVLVALEFALHLPEHEVMPHYRRLVQSS

SEQ ID NO: 1959 - protein, 38 aa, Homo sapiens
MRQHDTRNGRIVLISGRRSFCSIFSVLPYRDSTQVGQQ

SEQ ID NO: 1960 - protein, 163 aa, Homo sapiens
  SITE 1: note = misc_feature - Xaa can be any naturally occurring amino acid
XAAFLGSGTPGSGSGSRGRLNSFTQGILPIAFSRPTSQNYCSLEQPGQGGSTSAFEQLQRSRRRLISQRSSLETLEDIEENAPLRRCRTLSGSPRPKNFKKIHFIKNMRQHDTRNGRIVLISGRRSFCSIFSVLPYRDSTQVGYVYACMLCSSLGEKISHQCT

SEQ ID NO: 1961 - protein, 306 aa, Homo sapiens
MCQCVRACVCVCVCACATQRASHSALPGTTISVKDWRLCLLDQFDACARSGLSEPRSLTLRVPSCGKPLPGPGARLGREVTPCLSFAFAWCWLKMCQEEQTSYMVVQTSEEGLAADAELPGPLLMLAQNCAVMHNLLGPACIFLRKGFAENRQPDRSLRPEEIEELREAFREFDKDKDGYINCRDLGNCMRTMGYMPTEMELIELSQQINMNLGGHVDFDDFVELMGPKLLAETADMIGVKELRDAFREFDTNGDGEISTSELREAMRKLLGHQVGHRDIEEIIRDVDLNGDGRVDFEEFVRMMSR

SEQ ID NO: 1962 - protein, 370 aa, Homo sapiens
MGGGDGAAFKRPGDGARLQRVLGLGSRREPRSLPAGGPAPRRTAPPPPGHASAGPAAMSSHIAKSESKTSLLKAAAAAASGGSRAPRHGPARDPGLPSRRLPGSCPATPQSSGDPSSRRPLCRPAPREEGARGSQRVLPQAHCRPREALPAAASRPSPSSPLPPARGRDGEERGLSPALGLRGSLRARGRGDSVPAAASEADPFLHRLRPMLSSAFGQDRSLRPEEIEELREAFREFDKDKDGYINCRDLGNCMRTMGYMPTEMELIELSQQINMNLGGHVDFDDFVELMGPKLLAETADMIGVKELRDAFREFDTNGDGEISTSELREAMRKLLGHQVGHRDIEEIIRDVDLNGDGRVDFEEFVRMMSR

SEQ ID NO: 1963 - protein, 167 aa, Homo sapiens
MGNCVKYPLRNLSRKDRSLRPEEIEELREAFREFDKDKDGYINCRDLGNCMRTMGYMPTEMELIELSQQINMNLGGHVDFDDFVELMGPKLLAETADMIGVKELRDAFREFDTNGDGEISTSELREAMRKLLGHQVGHRDIEEIIRDVDLNGDGRVDFEEFVRMMSR

SEQ ID NO: 1964 - protein, 227 aa, Homo sapiens
MGNCVKYPLRNLSRKMCQEEQTSYMVVQTSEEGLAADAELPGPLLMLAQNCAVMHNLLGPACIFLRKGFAENRQPDRSLRPEEIEELREAFREFDKDKDGYINCRDLGNCMRTMGYMPTEMELIELSQQINMNLGGHVDFDDFVELMGPKLLAETADMIGVKELRDAFREFDTNGDGEISTSELREAMRKLLGHQVGHRDIEEIIRDVDLNGDGRVDFEEFVRMMSR

SEQ ID NO: 1965 - protein, 1091 aa, Homo sapiens
MAAGCLLALTLTLFQSLLIGPSSEEPFPSAVTIKSWVDKMQEDLVTLAKTASGVNQLVDIYEKYQDLYTVEPNNARQLVEIAARDIEKLLSNRSKALVRLALEAEKVQAAHQWREDFASNEVVYYNAKDDLDPEKNDSEPGSQRIKPVFIEDANFGRQISYQHAAVHIPTDIYEGSTIVLNELNWTSALDEVFKKNREEDPSLLWQVFGSATGLARYYPASPWVDNSRTPNKIDLYDVRRRPWYIQGAASPKDMLILVDVSGSVSGLTLKLIRTSVSEMLETLSDDDFVNVASFNSNAQDVSCFQHLVQANVRNKKVLKDAVNNITAKGITDYKKGFSFAFEQLLNYNVSRANCNKIIMLFTDGGEERAQEIFNKYNKDKKVRVFTFSVGQHNYDRGPIQWMACENKGYYYEIPSIGAIRINTQEYLDVLGRPMVLAGDKAKQVQWTNVYLDALELGLVITGTLPVFNITGQFENKTNLKNQLILGVMGVDVSLEDIKRLTPRFTLCPNGYYFAIDPNGYVLLHPNLQPKNPKSQEPVTLDFLDAELENDIKVEIRNKMIDGESGEKTFRTLVKSQDERYIDKGNRTYTWTPVNGTDYSLALVLPTYSFYYIKAKLEETITQARSKKGKMKDSETLKPDNFEESGYTFIAPRDYCNDLKISDNNTEFLLNFNEFIDRKTPNNPSCNADLINRVLLDAGFTNELVQNYWSKQKNIKGVKARFVVTDGGITRVYPKEAGENWQENPETYEDSFYKRSLDNDNYVFTAPYFNKSGPGAYESGIMVSKAVEIYIQGKLLKPAVVGIKIDVNSWIENFTKTSIRDPCAGPVCDCKRNSDVMDCVILDDGGFLLMANHDDYTNQIGRFFGEIDPSLMRHLVNISVYAFNKSYDYQSVCEPGAAPKQGAGHRSAYVPSVADILQIGWWATAAAWSILQQFLLSLTFPRLLEAVEMEDDDFTASLSKQSCITEQTQYFFDNDSKSFSGVLDCGNCSRIFHGEKLMNTNLIFIMVESKGTCPCDTRLLIQAEQTSDGPNPCDMVKQPRYRKGPDVCFDNNVLEDYTDCGGVSGLNPSLWYIIGIQFLLLWLVSGSTHRLL

SEQ ID NO: 1966 - protein, 1103 aa, Homo sapiens
MAAGCLLALTLTLFQSLLIGPSSEEPFPSAVTIKSWVDKMQEDLVTLAKTASGVNQLVDIYEKYQDLYTVEPNNARQLVEIAARDIEKLLSNRSKALVRLALEAEKVQAAHQWREDFASNEVVYYNAKDDLDPEKNDSEPGSQRIKPVFIEDANFGRQISYQHAAVHIPTDIYEGSTIVLNELNWTSALDEVFKKNREEDPSLLWQVFGSATGLARYYPASPWVDNSRTPNKIDLYDVRRRPWYIQGAASPKDMLILVDVSGSVSGLTLKLIRTSVSEMLETLSDDDFVNVASFNSNAQDVSCFQHLVQANVRNKKVLKDAVNNITAKGITDYKKGFSFAFEQLLNYNVSRANCNKIIMLFTDGGEERAQEIFNKYNKDKKVRVFTFSVGQHNYDRGPIQWMACENKGYYYEIPSIGAIRINTQEYLDVLGRPMVLAGDKAKQVQWTNVYLDALELGLVITGTLPVFNITGQFENKTNLKNQLILGVMGVDVSLEDIKRLTPRFTLCPNGYYFAIDPNGYVLLHPNLQPKPIGVGIPTINLRKRRPNIQNPKSQEPVTLDFLDAELENDIKVEIRNKMIDGESGEKTFRTLVKSQDERYIDKGNRTYTWTPVNGTDYSLALVLPTYSFYYIKAKLEETITQARYSETLKPDNFEESGYTFIAPRDYCNDLKISDNNTEFLLNFNEFIDRKTPNNPSCNADLINRVLLDAGFTNELVQNYWSKQKNIKGVKARFVVTDGGITRVYPKEAGENWQENPETYEDSFYKRSLDNDNYVFTAPYFNKSGPGAYESGIMVSKAVEIYIQGKLLKPAVVGIKIDVNSWIENFTKTSIRDPCAGPVCDCKRNSDVMDCVILDDGGFLLMANHDDYTNQIGRFFGEIDPSLMRHLVNISVYAFNKSYDYQSVCEPGAAPKQGAGHRSAYVPSVADILQIGWWATAAAWSILQQFLLSLTFPRLLEAVEMEDDDFTASLSKQSCITEQTQYFFDNDSKSFSGVLDCGNCSRIFHGEKLMNTNLIFIMVESKGTCPCDTRLLIQAEQTSDGPNPCDMVKQPRYRKGPDVCFDNNVLEDYTDCGGVSGLNPSLWYIIGIQFLLLWLVSGSTHRLL

SEQ ID NO: 1967 - protein, 309 aa, Homo sapiens
MAAGCLLALTLTLFQSLLIGPSSEEPFPSAVTIKSWVDKMQEDLVTLAKTASGVNQLVDIYEKYQDLYTVEPNNARQLVEIAARDIEKLLSNRSKALVRLALEAEKVQAAHQWREDFASNEVVYYNAKDDLDPEKNDSEPGSQRIKPVFIEDANFGRQISYQHAAVHIPTDIYEGSTIVLNELNWTSALDEVFKKNREEDPSLLWQVFGSATGLARYYPASPWVDNSRTPNKIDLYDVRRRPWYIQGAASPKDMLILVDVSGSVSGLTLKLIRTSVSEMLETLSDDDFVNVASDSKEISPSPEEIFNAE

SEQ ID NO: 1968 - protein, 280 aa, Homo sapiens
  SITE 1: note = misc_feature - Xaa can be any naturally occurring amino acid
XKRLTPRFTLCPNGYYFAIDPNGYVLLHPNLQPKPIGVGIPTINLRKRRPNIQEPVTLDFLDAELENDIKVEIRNKMIDGESGEKTFRTLVKSQDERYIDKGNRTYTWTPVNGTDYSLALVLPTYSFYYIKAKLEETITQARYSETLKPDNFEESGYTFIAPRDYCNDLKISDNNTEFLLNFNEFIDRKTPNNPSCNADLINRVLLDAGFTNELVQNYWSKQKNIKGVKARFVVTDGGITRVYPKEAGENWQENPETYEDSFYKRSLDNDNYVFTAPYFN

SEQ ID NO: 1969 - protein, 1073 aa, Homo sapiens
MAVALGTRRRDRVKLWADTFGGDLYNTVTKYSGSLLLQKKYKDVESSLKIEEVDGLELVRKFSEDMENMLRRKVEAVQNLVEAAEEADLNHEFNESLVFDYYNSVLINERDEKGNFVELGAEFLLESNAHFSNLPVNTSISSVQLPTNVYNKDPDILNGVYMSEALNAVFVENFQRDPTLTWQYFGSATGFFRIYPGIKWTPDENGVITFDCRNRGWYIQAATSPKDIVILVDVSGSMKGLRMTIAKHTITTILDTLGENDFINIIAYNDYVHYIEPCFKGILVQADRDNREHFKLLVEELMVKGVGVVDQALREAFQILKQFQEAKQGSLCNQAIMLISDGAVEDYEPVFEKYNWPDCKVRVFTYLIGREVSFADRMKWIACNNKGYYTQISTLADTQENVMEYLHVLSRPMVINHDHDIIWTEAYMDSKLLSSQAQSLTLLTTVAMPVFSKKNETRSHGILLGVVGSDVALRELMKLAPRYKLGVHGYAFLNTNNGYILSHPDLRPLYREGKKLKPKPNYNSVDLSEVEWEDQAESLRTAMINRETGTLSMDVKVPMDKGKRVLFLTNDYFFTDISDTPFSLGVVLSRGHGEYILLGNTSVEEGLHDLLHPDLALAGDWIYCITDIDPDHRKLSQLEAMIRFLTRKDPDLECDEELVREVLFDAVVTAPMEAYWTALALNMSEESEHVVDMAFLGTRAGLLRSSLFVGSEKVSDRKFLTPEDEASVFTLDRFPLWYRQASEHPAGSFVFNLRWAEGPESAGEPMVVTASTAVAVTVDKRTAIAAAAGVQMKLEFLQRKFWAATRQCSTVDGPCTQSCEDSDLDCFVIDNNGFILISKRSRETGRFLGEVDGAVLTQLLSMGVFSQVTMYDYQAMCKPSSHHHSAAQPLVSPISAFLTATRWLLQELVLFLLEWSVWGSWYDRGAEAKSVFHHSHKHKKQDPLQPCDTEYPVFVYQPAIREANGIVECGPCQKVFVVQQIPNSNLLLLVTDPTCDCSIFPPVLQEATEVKYNASVKCDRMRSQKLRRRPDSCHAFHPEENAQDCGGASDTSASPPLLLLPVCAWGLLPQLLR

SEQ ID NO: 1970 - protein, 1090 aa, Homo sapiens
MAVALGTRRRDRVKLWADTFGGDLYNTVTKYSGSLLLQKKYKDVESSLKIEEVDGLELVRKFSEDMENMLRRKVEAVQNLVEAAEEADLNHEFNESLVFDYYNSVLINERDEKGNFVELGAEFLLESNAHFSNLPVNTSISSVQLPTNVYNKDPDILNGVYMSEALNAVFVENFQRDPTLTWQYFGSATGFFRIYPGIKWTPDENGVITFDCRNRGWYIQAATSPKDIVILVDVSGSMKGLRMTIAKHTITTILDTLGENDFINIIAYNDYVHYIEPCFKGILVQADRDNREHFKLLVEELMVKGVGVVDQALREAFQILKQFQEAKQGSLCNQAIMLISDGAVEDYEPVFEKYNWPDCKVRVFTYLIGREVSFADRMKWIACNNKGYYTQISTLADTQENVMEYLHVLSRPMVINHDHDIIWTEAYMDSKLLSSQAQSLTLLTTVAMPVFSKKNETRSHGILLGVVGSDVALRELMKLAPRYKLGVHGYAFLNTNNGYILSHPDLRPLYREGKKLKPKPNYNSVDLSEVEWEDQAESLRTAMINRETGTLSMDVKVPMDKGKRVLFLTNDYFFTDISDTPFSLGVVLSRGHGEYILLGNTSVEEGLHDLLHPDLALAGDWIYCITDIDPDHRKLSQLEAMIRFLTRKDPDLECDEELVREVLFDAVVTAPMEAYWTALALNMSEESEHVVDMAFLGTRAGLLRSSLFVGSEKVSDRKFLTPEDEASVFTLDRFPLWYRQASEHPAGSFVFNLRWAEGPESAGEPMVVTASTAVAVTVDKRTAIAAAAGVQMKLEFLQRKFWAATRQCSTVDGPCTQSCEDSDLDCFVIDNNGFILISKRSRETGRFLGEVDGAVLTQLLSMGVFSQVTMYDYQAMCKPSSHHHSAAQPLVSPISAFLTATRWLLQELVLFLLEWSVWGSWYDRGAEAKSVFHHSHKHKKQDPLQPCDTEYPVFVYQPAIREANGIVECGPCQKVFVVQQIPNSNLLLLVTDPTCDCSIFPPVLQEATEVKYNASVKCDRMRSQKLRRRPDSCHAFHPEVRVEADRGWAGFSSPNPLCLGLCPCRQEHIGMPMNTPVPVLLGGNIRVYAL

SEQ ID NO: 1971 - protein, 56 aa, Homo sapiens
MKLEFLQRKFWAATRQCSTVDGPCTQSCEDSDLDCFVIDNNGFILISKRSRESDYV

SEQ ID NO: 1972 - protein, 56 aa, Homo sapiens; identical to SEQ ID NO: 1971

SEQ ID NO: 1973 - protein, 282 aa, Homo sapiens
MKLEFLQRKFWAATRQCSTVDGPCTQSCEDSDLDCFVIDNNGFILISKRSRETGRFLGEVDGAVLTQLLSMGVFSQVTMYDYQAMCKPSSHHHSAAQPLVSPISAFLTATRWLLQELVLFLLEWSVWGSWYDRGAEAKSVFHHSHKHKKQDPLQPCDTEYPVFVYQPAIREANGIVECGPCQKVFVVQQIPNSNLLLLVTDPTCDCSIFPPVLQEATEVKYNASVKCDRMRSQKLRRRPDSCHAFHPEENAQDCGGASDTSASPPLLLLPVCAWGLLPQLLR

SEQ ID NO: 1974 - protein, 41 aa, Homo sapiens
MKLEFLQRKFWAATRQDLDCFVIDNNGFILISKRSRESDYV

SEQ ID NO: 1975 - protein, 267 aa, Homo sapiens
MKLEFLQRKFWAATRQDLDCFVIDNNGFILISKRSRETGRFLGEVDGAVLTQLLSMGVFSQVTMYDYQAMCKPSSHHHSAAQPLVSPISAFLTATRWLLQELVLFLLEWSVWGSWYDRGAEAKSVFHHSHKHKKQDPLQPCDTEYPVFVYQPAIREANGIVECGPCQKVFVVQQIPNSNLLLLVTDPTCDCSIFPPVLQEATEVKYNASVKCDRMRSQKLRRRPDSCHAFHPEENAQDCGGASDTSASPPLLLLPVCAWGLLPQLLR

SEQ ID NO: 1976 - protein, 1137 aa, Homo sapiens
MVCGCSALLPLPNPRPTMPATPNFLANPSSSSRWIPLQPMPVAWAFVQKTSALLWLLLLGTSLSPAWGQAKIPLETVKLWADTFGGDLYNTVTKYSGSLLLQKKYKDVESSLKIEEVDGLELVRKFSEDMENMLRRKVEAVQNLVEAAEEADLNHEFNESLVFDYYNSVLINERDEKGNFVELGAEFLLESNAHFSNLPVNTSISSVQLPTNVYNKDPDILNGVYMSEALNAVFVENFQRDPTLTWQYFGSATGFFRIYPGIKWTPDENGVITFDCRNRGWYIQAATSPKDIVILVDVSGSMKGLRMTIAKHTITTILDTLGENDFINIIAYNDYVHYIEPCFKGILVQADRDNREHFKLLVEELMVKGVGVVDQALREAFQILKQFQEAKQGSLCNQAIMLISDGAVEDYEPVFEKYNWPDCKVRVFTYLIGREVSFADRMKWIACNNKGYYTQISTLADTQENVMEYLHVLSRPMVINHDHDIIWTEAYMDSKLLSSQAQSLTLLTTVAMPVFSKKNETRSHGILLGVVGSDVALRELMKLAPRYKLGVHGYAFLNTNNGYILSHPDLRPLYREGKKLKPKPNYNSVDLSEVEWEDQAESLRTAMINRETGTLSMDVKVPMDKGKRVLFLTNDYFFTDISDTPFSLGVVLSRGHGEYILLGNTSVEEGLHDLLHPDLALAGDWIYCITDIDPDHRKLSQLEAMIRFLTRKDPDLECDEELVREVLFDAVVTAPMEAYWTALALNMSEESEHVVDMAFLGTRAGLLRSSLFVGSEKVSDRKFLTPEDEASVFTLDRFPLWYRQASEHPAGSFVFNLRWAEGPESAGEPMVVTASTAVAVTVDKRTAIAAAAGVQMKLEFLQRKFWAATRQCSTVDGPCTQSCEDSDLDCFVIDNNGFILISKRSRETGRFLGEVDGAVLTQLLSMGVFSQVTMYDYQAMCKPSSHHHSAAQPLVSPISAFLTATRWLLQELVLFLLEWSVWGSWYDRGAEAKSVFHHSHKHKKQDPLQPCDTEYPVFVYQPAIREANGIVECGPCQKVFVVQQIPNSNLLLLVTDPTCDCSIFPPVLQEATEVKYNASVKCDRMRSQKLRRRPDSCHAFHPEENAQDCGGASDTSASPPLLLLPVCAWGLLPQLLR

SEQ ID NO: 1977 - protein, 601 aa, Homo sapiens
MVCGCSALLPLPNPRPTMPATPNFLANPSSSSRWIPLQPMPVAWAFVQKTSALLWLLLLGTSLSPAWGQAKIPLETVKLWADTFGGDLYNTVTKYSGSLLLQKKYKDVESSLKIEEVDGLELVRKFSEDMENMLRRKVEAVQNLVEAAEEADLNHEFNESLVFDYYNSVLINERDEKGNFVELGAEFLLESNAHFSNLPVNTSISSVQLPTNVYNKDPDILNGVYMSEALNAVFVENFQRDPTLTWQYFGSATGFFRIYPGIKWTPDENGVITFDCRNRGWYIQAATSPKDIVILVDVSGSMKGLRMTIAKHTITTILDTLGENDFINIIAYNDYVHYIEPCFKGILVQADRDNREHFKLLVEELMVKGVGVVDQALREAFQILKQFQEAKQGSLCNQAIMLISDGAVEDYEPVFEKYNWPDCKVRVFTYLIGREVSFADRMKWIACNNKGYYTQISTLADTQENVMEYLHVLSRPMVINHDHDIIWTEAYMDSKLLSSQAQSLTLLTTVAMPVFSKKNETRSHGILLGVVGSDVALRELMKLAPRYKMPSTNSRPNAPPPWTLAAWSARIRLSEHQQWLHPLPSRPPAPVQRGEETKTQT

SEQ ID NO: 1978 - protein, 1154 aa, Homo sapiens
MVCGCSALLPLPNPRPTMPATPNFLANPSSSSRWIPLQPMPVAWAFVQKTSALLWLLLLGTSLSPAWGQAKIPLETVKLWADTFGGDLYNTVTKYSGSLLLQKKYKDVESSLKIEEVDGLELVRKFSEDMENMLRRKVEAVQNLVEAAEEADLNHEFNESLVFDYYNSVLINERDEKGNFVELGAEFLLESNAHFSNLPVNTSISSVQLPTNVYNKDPDILNGVYMSEALNAVFVENFQRDPTLTWQYFGSATGFFRIYPGIKWTPDENGVITFDCRNRGWYIQAATSPKDIVILVDVSGSMKGLRMTIAKHTITTILDTLGENDFINIIAYNDYVHYIEPCFKGILVQADRDNREHFKLLVEELMVKGVGVVDQALREAFQILKQFQEAKQGSLCNQAIMLISDGAVEDYEPVFEKYNWPDCKVRVFTYLIGREVSFADRMKWIACNNKGYYTQISTLADTQENVMEYLHVLSRPMVINHDHDIIWTEAYMDSKLLSSQAQSLTLLTTVAMPVFSKKNETRSHGILLGVVGSDVALRELMKLAPRYKLGVHGYAFLNTNNGYILSHPDLRPLYREGKKLKPKPNYNSVDLSEVEWEDQAESLRTAMINRETGTLSMDVKVPMDKGKRVLFLTNDYFFTDISDTPFSLGVVLSRGHGEYILLGNTSVEEGLHDLLHPDLALAGDWIYCITDIDPDHRKLSQLEAMIRFLTRKDPDLECDEELVREVLFDAVVTAPMEAYWTALALNMSEESEHVVDMAFLGTRAGLLRSSLFVGSEKVSDRKFLTPEDEASVFTLDRFPLWYRQASEHPAGSFVFNLRWAEGPESAGEPMVVTASTAVAVTVDKRTAIAAAAGVQMKLEFLQRKFWAATRQCSTVDGPCTQSCEDSDLDCFVIDNNGFILISKRSRETGRFLGEVDGAVLTQLLSMGVFSQVTMYDYQAMCKPSSHHHSAAQPLVSPISAFLTATRWLLQELVLFLLEWSVWGSWYDRGAEAKSVFHHSHKHKKQDPLQPCDTEYPVFVYQPAIREANGIVECGPCQKVFVVQQIPNSNLLLLVTDPTCDCSIFPPVLQEATEVKYNASVKCDRMRSQKLRRRPDSCHAFHPEVRVEADRGWAGFSSPNPLCLGLCPCRQEHIGMPMNTPVPVLLGGNIRVYAL

SEQ ID NO: 1979 - protein, 780 aa, Homo sapiens
MVCGCSALLPLPNPRPTMPATPNFLANPSSSSRWIPLQPMPVAWAFVQKTSALLWLLLLGTSLSPAWGQAKIPLETVKLWADTFGGDLYNTVTKYSGSLLLQKKYKDVESSLKIEEVDGLELVRKFSEDMENMLRRKVEAVQNLVEAAEEADLNHEFNESLVFDYYNSVLINERDEKGNFVELGAEFLLESNAHFSNLPVNTSISSVQLPTNVYNKDPDILNGVYMSEALNAVFVENFQRDPTLTWQYFGSATGFFRIYPGILVQADRDNREHFKLLVEELMVKGVGVVDQALREAFQILKQFQEAKQGSLCNQAIMLISDGAVEDYEPVFEKYNWPDCKISTLADTQENVMEYLHVLSRPMVINHDHDIIWTEAYMDSKLLSSQAQSLTLLTTVAMPVFSKKNETRSHGILLGVVGSDVALRELMKLAPRYKLGVHGYAFLNTNNGYILSHPDLRPLYREGKKLKPKPNYNSVDLSEVEWEDQAESKRVLFLTNDYFFTDISDTPFSLGVVLSRGHGEYILLGNTSVEEGLHDLLHPDLALAGDWIYCITDIDPDHRKLSQLEAMIRFLTRKDPDLECDEELVREVLFDAVVTAPMEAYWTALALNMSEESEHVVDMAFLGTRAGLLRSSLFVGSEKVSDRKFLTPEDEASVFTLDRFPLWYRQASEHPAGSFVFNLRWAEGPESAGEPMVVTASTAVAVTVDKRTAIAAAAGVQMKLEFLQRKFWAATRQCSTVDGPCTQSCEDSDLDCFVIDNNGFILISKRSREPGIKLRKKPIQT

SEQ ID NO: 1980 - protein, 1112 aa, Homo sapiens
MVCGCSALLPLPNPRPTMPATPNFLANPSSSSRWIPLQPMPVAWAFVQKTSALLWLLLLGTSLSPAWGQAKIPLETVKLWADTFGGDLYNTVTKYSGSLLLQKKYKDVESSLKIEEVDGLELVRKFSEDMENMLRRKVEAVQNLVEAAEEADLNHEFNESLVFDYYNSVLINERDEKGNFVELGAEFLLESNAHFSNLPVNTSISSVQLPTNVYNKDPDILNGVYMSEALNAVFVENFQRDPTLTWQYFGSATGFFRIYPGIKWTPDENGVITFDCRNRGWYIQAATSPKDIVILVDVSGSMKGLRMTIAKHTITTILDTLGENDFINIIAYNDYVHYIEPCFKGILVQADRDNREHFKLLVEELMVKGVGVVDQALREAFQILKQFQEAKQGSLCNQAIMLISDGAVEDYEPVFEKYNWPDCKVRVFTYLIGREVSFADRMKWIACNNKGYYTQISTLADTQENVMEYLHVLSRPMVINHDHDIIWTEAYMDSKLLSSQAQSLTLLTTVAMPVFSKKNETRSHGILLGVVGSDVALRELMKLAPRYKYREGKKLKPKPNYNSVDLSEVEWEDQAESLRTAMINRETGTLSMDVKVPMDKGKRVLFLTNDYFFTDISDTPFSLGVVLSRGHGEYILLGNTSVEEGLHDLLHPDLALAGDWIYCITDIDPDHRKLSQLEAMIRFLTRKDPDLECDEELVREVLFDAVVTAPMEAYWTALALNMSEESEHVVDMAFLGTRAGLLRSSLFVGSEKVSDRKFLTPEDEASVFTLDRFPLWYRQASEHPAGSFVFNLRWAEGPESAGEPMVVTASTAVAVTVDKRTAIAAAAGVQMKLEFLQRKFWAATRQCSTVDGPCTQSCEDSDLDCFVIDNNGFILISKRSRETGRFLGEVDGAVLTQLLSMGVFSQVTMYDYQAMCKPSSHHHSAAQPLVSPISAFLTATRWLLQELVLFLLEWSVWGSWYDRGAEAKSVFHHSHKHKKQDPLQPCDTEYPVFVYQPAIREANGIVECGPCQKVFVVQQIPNSNLLLLVTDPTCDCSIFPPVLQEATEVKYNASVKCDRMRSQKLRRRPDSCHAFHPEENAQDCGGASDTSASPPLLLLPVCAWGLLPQLLR

SEQ ID NO: 1981 - protein, 192 aa, Homo sapiens
  SITE 1: note = misc_feature - Xaa can be any naturally occurring amino acid
XELVREVLFDAVVTAPMEAYWTALALNMSEESEHVVDMAFLGTRAGLLRSSLFVGSEKVSDRKFLTPEDEASVFTLDRFPLWYRQASEHPAGSFVFNLRWAEGPESAGEPMVVTASTAVAVTVDKRTAIAAAAGVQMKLEFLQRKFWAATRQCSTVDGPCTQSCEDSDLDCFVIDNNGFILISKRSRESDYV

SEQ ID NO: 1982 - protein, 284 aa, Homo sapiens
  SITE 1: note = misc_feature - Xaa can be any naturally occurring amino acid
XGVQMKLEFLQRKFWAATRQCSTVDGPCTQSCEDSDLDCFVIDNNGFILISKRSRETGRFLGEVDGAVLTQLLSMGVFSQVTMYDYQAMCKPSSHHHSAAQPLPISAFLTATRWLLQELVLFLLEWSVWGSWYDRGAEAKSVFHHSHKHKKQDPLQPCDTEYPVFVYQPAIREANGIVECGPCQKVFVVQQIPNSNLLLLVTDPTCDCSIFPPVLQEATEVKYNASVKCDRMRSQKLRRRPDSCHAFHPEENAQDCGGASDTSASPPLLLLPVCAWGLLPQLLR

SEQ ID NO: 1983 - protein, 234 aa, Homo sapiens
MGAPAASLLLLLLLFACCWAPGGANLSQDDSQPWTSDETVVAGGTVVLKCQVKDHEDSSLQWSNPAQQTLYFGEKRALRDNRIQLVTSTPHELSISISNVALADEGEYTCSIFTMPVRTAKSLVTVLGIPQKPIITGYKSSLREKDTATLNCQSSGSKPAARLTWRKGDQELHGEPTRIQEDPNDTPTAMIRPDPPHPREGQKLLLHCEGRGNPVPQQYLWEKEGSVPPLKMTQ

SEQ ID NO: 1984 - protein, 398 aa, Homo sapiens
MGAPAASLLLLLLLFACCWAPGGANLSQDDSQPWTSDETVVAGGTVVLKCQVKDHEDSSLQWSNPAQQTLYFGEKRALRDNRIQLVTSTPHELSISISNVALADEGEYTCSIFTMPVRTAKSLVTVLGIPQKPIITGYKSSLREKDTATLNCQSSGSKPAARLTWRKGDQELHGEPTRIQEDPNGKTFTVSSSVTFQVTREDDGASIVCSVNHESLKGADRSTSQRIEVLYTPTAMIRPDPPHPREGQKLLLHCEGRGNPVPQQYLWEKEGSVPPLKMTQESALIFPFLNKSDSGTYGCTATSNMGSYKAYYTLNVNDPSPVPSSSSTYHAIIGGIVAFIVFLLLIMLIFLGHYLIRHKGTYLTHEAKGSDDAPDADTAIINAEGGQSGGDDKKEYFI

SEQ ID NO: 1985 - protein, 432 aa, Homo sapiens
MGAPAASLLLLLLLFACCWAPGGANLSQDGYWQEQDLELGTLAPLDEAISSTVWSSPDMLASQDSQPWTSDETVVAGGTVVLKCQVKDHEDSSLQWSNPAQQTLYFGEKRALRDNRIQLVTSTPHELSISISNVALADEGEYTCSIFTMPVRTAKSLVTVLGIPQKPIITGYKSSLREKDTATLNCQSSGSKPAARLTWRKGDQELHGEPTRIQEDPNGKTFTVSSSVTFQVTREDDGASIVCSVNHESLKGADRSTSQRIEVLYTPTAMIRPDPPHPREGQKLLLHCEGRGNPVPQQYLWEKEGSVPPLKMTQESALIFPFLNKSDSGTYGCTATSNMGSYKAYYTLNVNDPSPVPSSSSTYHAIIGGIVAFIVFLLLIMLIFLGHYLIRHKGTYLTHEAKGSDDAPDADTAIINAEGGQSGGDDKKEYFI

SEQ ID NO: 1986 - protein, 128 aa, Homo sapiens
MGFQKFSPFLALSILVLLQAGSLHAAPFRSALESSPADPATLSEDEARLLLAALVQDYVQMKASELEQEQEREGSRIIAQKRACDTATCVTHRLAGLLSRSGGVVKNNFVPTNVGSKAFGRRRRDLQA

SEQ ID NO: 1987 - protein, 128 aa, Homo sapiens; identical to SEQ ID NO: 1986

SEQ ID NO: 1988 - protein, 141 aa, Homo sapiens
MGFQKFSPFLALSILVLLQAGSLHAAPFRSALESSPADPATLSEDEARLLLAALVQDYVQMKASELEQEQEREGSSLDSPRSKRCGNLSTCMLGTYTQDFNKFHTFPQTAIGVGAPGKKRDMSSDLERDHRPHNHCPEESL

SEQ ID NO: 1989 - protein, 141 aa, Homo sapiens
MGFQKFSPFLALSILVLLQAGSLHAAPFRSALESSPADPATLSEDEARLLLAALVQDYVQMKASELEQEQEREGSSLDSPRSKRCGNLSTCMLGTYTQDFNKFHTFPQTAIGVGAPGKKRDMSSDLERDHRPHVSMPQNAN

SEQ ID NO: 1990 - protein, 141 aa, Homo sapiens; identical to SEQ ID NO: 1989

SEQ ID NO: 1991 - protein, 127 aa, Homo sapiens
MGFRKFSPFLALSILVLYQAGSLQAAPFRSALESSPDPATLSKEDARLLLAALVQDYVQMKASELKQEQETQGSSSAAQKRACNTATCVTHRLAGLLSRSGGMVKSNFVPTNVGSKAFGRRRRDLQA

SEQ ID NO: 1992 - protein, 127 aa, Homo sapiens; identical to SEQ ID NO: 1991

SEQ ID NO: 1993 - protein, 138 aa, Homo sapiens
MKKEANLQRGGMGFRKFSPFLALSILVLYQAGSLQAAPFRSALESSPDPATLSKEDARLLLAALVQDYVQMKASELKQEQETQGSSSAAQKRACNTATCVTHRLAGLLSRSGGMVKSNFVPTNVGSKAFGRRRRDLQA

SEQ ID NO: 1994 - protein, 508 aa, Homo sapiens
MQFSGEKISGQRDLQKSKMRFTFTSRCLALFLLLNHPTPILPAFSNQTYPTIEPKPFLYVVGRKKMMDAQYKCYDRMQQLPAYQGEGPYCNRTWDGWLCWDDTPAGVLSYQFCPDYFPDFDPSEKVTKYCDEKGVWFKHPENNRTWSNYTMCNAFTPEKLKNAYVLYYLAIVGHSLSIFTLVISLGIFVFFRKLTTIFPLNWKYRKALSLGCQRVTLHKNMFLTYILNSMIIIIHLVEVVPNGELVRRDPVSCKILHFFHQYMMACNYFWMLCEGIYLHTLIVVAVFTEKQRLRWYYLLGWGFPLVPTTIHAITRAVYFNDNCWLSVETHLLYIIHGPVMAALVVNFFFLLNIVRVLVTKMRETHEAESHMYLKAVKATMILVPLLGIQFVVFPWRPSNKMLGKIYDYVMHSLIHFQGFFVATIYCFCNNEVQTTVKRQWAQFKIQWNQRWGRRPSNRSARAAAAAAEAGDIPIYICHQELRNEPANNQGEESAEIIPLNIIEQESSA

SEQ ID NO: 1995 - protein, 162 aa, Homo sapiens
MRFTFTSRCLALFLLLNHPTPILPAFSNQTYPTIEPKPFLYVVGRKKMMDAQYKCYDRMQQLPAYQGEGPYCNRTWDGWLCWDDTPAGVLSYQFCPDYFPDFDPSEKVTKYCDEKGVWFKHPENNRTWSNYTMCNAFTPEKLKNAYVLYYLAIVGHSCQFSP

SEQ ID NO: 1996 - protein, 290 aa, Homo sapiens
MRFTFTSRCLALFLLLNHPTPILPAFSNQTYPTIEPKPFLYVVGRKKMMDAQYKCYDRMQQLPAYQGEGPYCNRTWDGWLCWDDTPAGVLSYQFCPDYFPDFDPSEKVTKYCDEKGVWFKHPENNRTWSNYTMCNAFTPEKLKNAYVLYYLAIVGHSLSIFTLVISLGIFVFFRKLTTIFPLNWKYRKALSLGCQRVTLHKNMFLTYILNSMIIIIHLVEVVPNGELVRRDPVSCKILHFFHQYMMACNYFWMLCEGIYLHTLIVVAVFTEKQRLRWYYLLGWAPAFHRD

SEQ ID NO: 1997 - protein, 490 aa, Homo sapiens
MRFTFTSRCLALFLLLNHPTPILPAFSNQTYPTIEPKPFLYVVGRKKMMDAQYKCYDRMQQLPAYQGEGPYCNRTWDGWLCWDDTPAGVLSYQFCPDYFPDFDPSEKVTKYCDEKGVWFKHPENNRTWSNYTMCNAFTPEKLKNAYVLYYLAIVGHSLSIFTLVISLGIFVFFRKLTTIFPLNWKYRKALSLGCQRVTLHKNMFLTYILNSMIIIIHLVEVVPNGELVRRDPVSCKILHFFHQYMMACNYFWMLCEGIYLHTLIVVAVFTEKQRLRWYYLLGWGFPLVPTTIHAITRAVYFNDNCWLSVETHLLYIIHGPVMAALVVNFFFLLNIVRVLVTKMRETHEAESHMYLKAVKATMILVPLLGIQFVVFPWRPSNKMLGKIYDYVMHSLIHFQGFFVATIYCFCNNEVQTTVKRQWAQFKIQWNQRWGRRPSNRSARAAAAAAEAGDIPIYICHQELRNEPANNQGEESAEIIPLNIIEQESSA

SEQ ID NO: 1998 - protein, 474 aa, Homo sapiens
MRFTFTSRCLALFLLLNHPTPILPAFSNQTYPTIEPKPFLYVVGRKKMMDAQYKCYDRMQQLPAYQGEGPYCNRTWDGWLCWDDTPAGVLSYQFCPDYFPDFDPSEKVTKYCDEKGVWFKHPENNRTWSNYTMCNAFTPEKLKNAYVLYYLAIVGHSLSIFTLVISLGIFVFFRSLGCQRVTLHKNMFLTYILNSMIIIIHLVEVVPNGELVRRDPVSCKILHFFHQYMMACNYFWMLCEGIYLHTLIVVAVFTEKQRLRWYYLLGWGFPLVPTTIHAITRAVYFNDNCWLSVETHLLYIIHGPVMAALVVNFFFLLNIVRVLVTKMRETHEAESHMYLKAVKATMILVPLLGIQFVVFPWRPSNKMLGKIYDYVMHSLIHFQGFFVATIYCFCNNEVQTTVKRQWAQFKIQWNQRWGRRPSNRSARAAAAAAEAGDIPIYICHQELRNEPANNQGEESAEIIPLNIIEQESSA

SEQ ID NO: 1999 - protein, 474 aa, Homo sapiens; identical to SEQ ID NO: 1998

SEQ ID NO: 2000 - protein, 274 aa, Homo sapiens
MRFTFTSRCLALFLLLNHPTPILPAFSNQTYPTIEPKPFLYVVGRKKMMDAQYKCYDRMQQLPAYQGEGPYCNRTWDGWLCWDDTPAGVLSYQFCPDYFPDFDPSEKVTKYCDEKGVWFKHPENNRTWSNYTMCNAFTPEKLKNAYVLYYLAIVGHSLSIFTLVISLGIFVFFRSLGCQRVTLHKNMFLTYILNSMIIIIHLVEVVPNGELVRRDPVSCKILHFFHQYMMACNYFWMLCEGIYLHTLIVVAVFTEKQRLRWYYLLGWAPAFHRD

SEQ ID NO: 2001 - protein, 37 aa, Homo sapiens
MEKKCTLYFLVLLPFFMILVTAELEESPEDSIQLGVT

SEQ ID NO: 2002 - protein, 78 aa, Homo sapiens
MEKKCTLYFLVLLPFFMILVTAELEESPEDSIQLGVTRNKIMTAQYECYQKIMQDPIQQAEGVYCNRTWDGWLCWNDV

SEQ ID NO: 2003 - protein, 461 aa, Homo sapiens [sequence omitted]

SEQ ID NO: 2004 - protein, 461 aa, Homo sapiens [sequence omitted]

SEQ ID NO: 2005 - protein, 461 aa, Homo sapiens [sequence omitted]

SEQ ID NO: 2006 - protein, 170 aa, Homo sapiens
MAPRSAKETFRINPNVAANLSAPSDVILVRDEIALLHRYQSQMLGWILITLATIAALVSCCVAKCCSPLTSLQHCYWTSHLQNERELFEQAAEQHSRLLMMHRIKKLFGFIPGSEDVKHIRIPSCQDWKDISVPTLLCMGDDLQGHYSFLGNRVDEDNEEDRSRGIELKP

SEQ ID NO: 2007 - protein, 314 aa, Homo sapiens
MCPTLNNIVSSLQRNGIFINSLIAALTIGGQQLFSSSTFSCPCQVGKNFYYGSAFLVIPALILLVAGFALRSQMWTITGEYCCSCAPPYRRISPLECKLACLRFFSITGRAVIAPLTWLAVTLLTGTYYECAASEFASVDHYPMFDNVSASKREEILAGFPCCRSAPSDVILVRDEIALLHRYQSQMLGWILITLATIAALVSCCVAKCCSPLTSLQHCYWTSHLQNERELFEQAAEQHSRLLMMHRIKKLFGFIPGSEDVKHIRIPSCQDWKDISVPTLLCMGDDLQGHYSFLGNRVDEDNEEDRSRGIELKP

SEQ ID NO: 2008 - protein, 171 aa, Homo sapiens
MFDNVSASKREEILAGFPCCRSAPSDVILVRDEIALLHRYQSQMLGWILITLATIAALVSCCVAKCCSPLTSLQHCYWTSHLQNERELFEQAAEQHSRLLMMHRIKKLFGFIPGSEDVKHIRIPSCQDWKDISVPTLLCMGDDLQGHYSFLGNRVDEDNEEDRSRGIELKP

SEQ ID NO: 2009 - protein, 123 aa, Homo sapiens
MLGWILITLATIAALVSCCVAKCCSPLTSLQHCYWTSHLQNERELFEQAAEQHSRLLMMHRIKKLFGFIPGSEDVKHIRIPSCQDWKDISVPTLLCMGDDLQGHYSFLGNRVDEDNEEDRSRG

SEQ ID NO: 2010 - protein, 128 aa, Homo sapiens
MLGWILITLATIAALVSCCVAKCCSPLTSLQHCYWTSHLQNERELFEQAAEQHSRLLMMHRIKKLFGFIPGSEDVKHIRIPSCQDWKDISVPTLLCMGDDLQGHYSFLGNRVDEDNEEDRSRGIELKP

SEQ ID NO: 2011 - protein, 417 aa, Homo sapiens
MLLSVPLLLGLLGLAVAEPAVYFKEQFLDGDGWTSRWIESKHKSDFGKFVLSSGKFYGDEEKDKGLQTSQDARFYALSASFEPFSNKGQTLVVQFTVKHEQNIDCGGGYVKLFPNSLDQTDMHGDSEYNIMFGPDICGPGTKKVHVIFNYKGKNVLINKDIRCKDDEFTHLYTLIVRPDNTYEVKIDNSQVESGSLEDDWDFLPPKKIKDPDASKPEDWDERAKIDDPTDSKPEDWDKPEHIPDPDAKKPEDWDEEMDGEWEPPVIQNPEYKGEWKPRQIDNPDYKGTWIHPEIDNPEYSPDPSIYAYDNFGVLGLDLWQVKSGTIFDNFLITNDEAYAEEFGNETWGVTKAAEKQMKDKQDEEQRLKEEEEDKKRKEEEEAEDKEDDEDKDEDEEDEEDKEEDEEEDVPGQAKDEL

SEQ ID NO: 2012 - protein, 247 aa, Homo sapiens
MLLSVPLLLGLLGLAVAEPAVYFKEQFLDGDGWTSRWIESKHKSDFGKFVLSSGKFYGDEEKDKGPDICGPGTKKVHVIFNYKGKNVLINKDIRCKDDEFTHLYTLIVRPDNTYEVKIDNSQVESGSLEDDWDFLPPKKIKDPDASKPEDWDERAKIDDPTDSKPEDWDKPEHIPDPDAKKPEDWDEEMDGEWEPPVIQNPEYKGEWKPRQIDNPDYKGTWIHPEIDNPEYSPDPSIYAYDNFGVLG

SEQ ID NO: 2013 - protein, 163 aa, Homo sapiens
  SITE 1: note = misc_feature - Xaa can be any naturally occurring amino acid
XEDWDERAKIDDPTDSKPEDWDKPEHIPDPDAKKPEDWDEEMDGEWEPPVIQNPEYKGEWKPRQIDNPDYKGTWIHPEIDNPEYSPDPSIYAYDNFGVLGLDLWQVKSGTIFDNFLITNDEAYAEEFGNETWGVTKAAEKQMKDKQDEEQRPERSCRRAGRAK

SEQ ID NO: 2014 - protein, 13 aa, Homo sapiens
  SITE 1: note = misc_feature - Xaa can be any naturally occurring amino acid
XEEDVPGQAKDEL

SEQ ID NO: 2015 - protein, 384 aa, Homo sapiens
MARALVQLWAICMLRVALATVYFQEEFLDGEHWRNRWLQSTNDSRFGHFRLSSGKFYGHKEKDKGLQTTQNGRFYAISARFKPFSNKGKTLVIQYTVKHEQKMDCGGGYIKVFPADIDQKNLNGKSQYYIMFGPDICGFDIKKVHVILHFKNKYHENKKLIRCKVDGFTHLYTLILRPDLSYDVKIDGQSIESGSIEYDWNLTSLKKETSPAESKDWEQTKDNKAQDWEKHFLDASTSKQSDWNGDLDGDWPAPMLQKPPYQDGLKPEGIHKDVWLHRKMKNTDYLTQYDLSEFENIGAIGLELWQVRSGTIFDNFLITDDEEYADNFGKATWGETKGPEREMDAIQAKEEMKKAREEEEEELLSGKINRHEHYFNQFHRRNEL

SEQ ID NO: 2016 - protein, 142 aa, Homo sapiens
  SITE 1: note = misc_feature - Xaa can be any naturally occurring amino acid
XLVQLWAICMLRVALATVYFQEEFLDGEHWRNRWLQSTNDSRFGHFRLSSGKFYGHKEKDKGPDICGFDIKKVHVILHFKNKYHENKKLIRCKVDGFTHLYTLILRPDLSYDVKIDGQSIESGSIEYDWNLTSLKKETSPAE

SEQ ID NO: 2017 - protein, 315 aa, Homo sapiens
MDLRQFLMCLSLCTAFALSKPTEKKDRVHHEPQLSDKVHNDAQSFDYDHDAFLGAEEAKTFDQLTPEESKERLGKIVSKIDGDKDGFVTVDELKDWIKFAQKRWIYEDVERQWKGHDLNEDGLVSWEEYKNATYGYVLDDPDPDDGFNYKQMMVRDERRFKMADKDGDLIATKEEFTAFLHPEEYDYMKDIVVQETMEDIDKNADGFIDLEEYIGDMYSHDGNTDEPEWVKTEREQFVEFRDKNRDGKMDKEETKDWILPSDYDHAEAEARHLVYESDQNKDGKLTKEEIVDKYDLFVGSQATDFGEALVRHDEF

SEQ ID NO: 2018 - protein, 224 aa, Homo sapiens
MDLRQFLMCLSLCTAFALSKPTEKKDRVHHEPQLSDKVHNDAQSFDYDHDAFLGAEEAKTFDQLTPEESKERLGKIVSKIDGDKDGFVTVDELKDWIKFAQKRWIYEDVERQWKGHDLNEDGLVSWEEYKNATYGYVLDDPDPDDGFNYKQMMVRDERRFKMADKDGDLIATKEEFTAFLHPEEYDYMKDIVVQETMEDIDKNADGFIDLEEYIGWQAYQGGDR

SEQ ID NO: 2019 - protein, 315 aa, Homo sapiens
MDLRQFLMCLSLCTAFALSKPTEKKDRVHHEPQLSDKVHNDAQSFDYDHDAFLGAEEAKTFDQLTPEESKERLGMIVDKIDADKDGFVTEGELKSWIKHAQKKYIYDNVENQWQEFDMNQDGLISWDEYRNVTYGTYLDDPDPDDGFNYKQMMVRDERRFKMADKDGDLIATKEEFTAFLHPEEYDYMKDIVVQETMEDIDKNADGFIDLEEYIGDMYSHDGNTDEPEWVKTEREQFVEFRDKNRDGKMDKEETKDWILPSDYDHAEAEARHLVYESDQNKDGKLTKEEIVDKYDLFVGSQATDFGEALVRHDEF

SEQ ID NO: 2020 - protein, 323 aa, Homo sapiens
MKETDLIIMDLRQFLMCLSLCTAFALSKPTEKKDRVHHEPQLSDKVHNDAQSFDYDHDAFLGAEEAKTFDQLTPEESKERLGKIVSKIDGDKDGFVTVDELKDWIKFAQKRWIYEDVERQWKGHDLNEDGLVSWEEYKNATYGYVLDDPDPDDGFNYKQMMVRDERRFKMADKDGDLIATKEEFTAFLHPEEYDYMKDIVVQETMEDIDKNADGFIDLEEYIGDMYSHDGNTDEPEWVKTEREQFVEFRDKNRDGKMDKEETKDWILPSDYDHAEAEARHLVYESDQNKDGKLTKEEIVDKYDLFVGSQATDFGEALVRHDEF

SEQ ID NO: 2021 - protein, 323 aa, Homo sapiens
MKETDLIIMDLRQFLMCLSLCTAFALSKPTEKKDRVHHEPQLSDKVHNDAQSFDYDHDAFLGAEEAKTFDQLTPEESKERLGMIVDKIDADKDGFVTEGELKSWIKHAQKKYIYDNVENQWQEFDMNQDGLISWDEYRNVTYGTYLDDPDPDDGFNYKQMMVRDERRFKMADKDGDLIATKEEFTAFLHPEEYDYMKDIVVQETMEDIDKNADGFIDLEEYIGDMYSHDGNTDEPEWVKTEREQFVEFRDKNRDGKMDKEETKDWILPSDYDHAEAEARHLVYESDQNKDGKLTKEEIVDKYDLFVGSQATDFGEALVRHDEF

SEQ ID NO: 2022 - protein, 147 aa, Homo sapiens
  SITE 1: note = misc_feature - Xaa can be any naturally occurring amino acid
XIATKEEFTAFLHPEEYDYMKDIVVQETMEDIDKNADGFIDLEEYIGDMYSHDGNTDEPEWVKTEREQFVEFRDKNRDGKMDKEETKDWILPSDYDHAEAEARHLVYESDQNKDGKLTKEEIVDKYDLFVGSQATDFGEALVRHDEF

SEQ ID NO: 2023 - protein, 194 aa, Homo sapiens
ILLVGYPPFWDEDQHRLYQQIKAGAYDFPSPEWDTVTPEAKDLINKMLTINPAKRITASEALKHPWICQRSTVASMMHRQETVDCLKKFNARRKLKGAILTTMLATRNFSAKSLLKKPDGVKSTESSNTTIEDEDVKARKQEIIKVTEQLIEAINNGDFEAYTKICDPGLTAFEPEALGNLVEGMDFHRFYFEN

SEQ ID NO: 2024 - protein, 512 aa, Homo sapiens
MASTTTCTRFTDEYQLFEELGKGAFSVVRRCMKIPTGQEYAAKIINTKKLSARDHQKLEREARICRLLKHPNIVRLHDSISEEGFHYLVFDLVTGGELFEDIVAREYYSEADASHCIQQILEAVLHCHQMGVVHRDLKPENLLLASKSKGAAVKLADFGLAIEVQGDQQAWFGFAGTPGYLSPEVLRKDPYGKPVDMWACGVILYILLVGYPPFWDEDQHRLYQQIKAGAYDFPSPEWDTVTPEAKDLINKMLTINPAKRITASEALKHPWICQRSTVASMMHRQETVDCLKKFNARRKLKGAILTTMLATRNFSAAKSLLKKPDGVKINNKANVVTSPKENIPTPALEPQTTVIHNPDGNKESTESSNTTIEDEDVKARKQEIIKVTEQLIEAINNGDFEAYTKICDPGLTAFEPEALGNLVEGMDFHRFYFENALSKSNKPIHTIILNPHVHLVGDDAACIAYIRLTQYMDGSGMPKTMQSEETRVWHRRDGKWQNVHFHRSGSPTVPIK

SEQ ID NO: 2025 - protein, 533 aa, Homo sapiens
MASTTTCTRFTDEYQLFEELGKGAFSVVRRCMKIPTGQEYAAKIINTKKLSARDHQKLEREARICRLLKHPNIVRLHDSISEEGFHYLVFDLVTGGELFEDIVAREYYSEADASHCIQQILEAVLHCHQMGVVHRDLKPENLLLASKSKGAAVKLADFGLAIEVQGDQQAWFGFAGTPGYLSPEVLRKDPYGKPVDMWACGVILYILLVGYPPFWDEDQHRLYQQIKAGAYDFPSPEWDTVTPEAKDLINKMLTINPAKRITASEALKHPWICQRSTVASMMHRQETVDCLKKFNARRKLKGAILTTMLATRNFSAAKSLLKKPDGVKINNKANVVTSPKENIPTPALEPQTTVIHNPDGNKESTESSNTTIEDEDVKARKQEIIKVTEQLIEAINNGDFEAYTKICDPGLTAFEPEALGNLVEGMDFHRFYFENALSKSNKPIHTIILNPHVHLVGDDAACIAYIRLTQYMDGSGMPKTMQSEETRVWHRRDGKWQNVHFHRSGSPTVPIKPPCIPNGKENFSGGTSLWQNI

SEQ ID NO: 2026 - protein, 478 aa, Homo sapiens
MASTTTCTRFTDEYQLFEELGKGAFSVVRRCMKIPTGQEYAAKIINTKKLSARDHQKLEREARICRLLKHPNIVRLHDSISEEGFHYLVFDLVTGGELFEDIVAREYYSEADASHCIQQILESVNHCHLNGIVHRDLKPENLLLASKSKGAAVKLADFGLAIEVQGDQQAWFGFAGTPGYLSPEVLRKDPYGKPVDMWACGVILYILLVGYPPFWDEDQHRLYQQIKAGAYDFPSPEWDTVTPEAKDLINKMLTINPAKRITASEALKHPWICQRSTVASMMHRQETVDCLKKFNARRKLKGAILTTMLATRNFSAAKSLLKKPDGVKESTESSNTTIEDEDVKARKQEIIKVTEQLIEAINNGDFEAYTKICDPGLTAFEPEALGNLVEGMDFHRFYFENALSKSNKPIHTIILNPHVHLVGDDAACIAYIRLTQYMDGSGMPKTMQSEETRVWHRRDGKWQNVHFHRSGSPTVPIK

SEQ ID NO: 2027 - protein, 499 aa, Homo sapiens
MASTTTCTRFTDEYQLFEELGKGAFSVVRRCMKIPTGQEYAAKIINTKKLSARDHQKLEREARICRLLKHPNIVRLHDSISEEGFHYLVFDLVTGGELFEDIVAREYYSEADASHCIQQILESVNHCHLNGIVHRDLKPENLLLASKSKGAAVKLADFGLAIEVQGDQQAWFGFAGTPGYLSPEVLRKDPYGKPVDMWACGVILYILLVGYPPFWDEDQHRLYQQIKAGAYDFPSPEWDTVTPEAKDLINKMLTINPAKRITASEALKHPWICQRSTVASMMHRQETVDCLKKFNARRKLKGAILTTMLATRNFSAAKSLLKKPDGVKESTESSNTTIEDEDVKARKQEIIKVTEQLIEAINNGDFEAYTKICDPGLTAFEPEALGNLVEGMDFHRFYFENALSKSNKPIHTIILNPHVHLVGDDAACIAYIRLTQYMDGSGMPKTMQSEETRVWHRRDGKWQNVHFHRSGSPTVPIKPPCIPNGKENFSGGTSLWQNI

SEQ ID NO: 2028 - protein, 492 aa, Homo sapiens
MASTTTCTRFTDEYQLFEELGKGAFSVVRRCMKIPTGQEYAAKIINTKKLSARDHQKLEREARICRLLKHPNIVRLHDSISEEGFHYLVFDLVTGGELFEDIVAREYYSEADASHCIQQILESVNHCHLNGIVHRDLKPENLLLASKSKGAAVKLADFGLAIEVQGDQQAWFGFAGTPGYLSPEVLRKDPYGKPVDMWACGVILYILLVGYPPFWDEDQHRLYQQIKAGAYDFPSPEWDTVTPEAKDLINKMLTINPAKRITASEALKHPWICQRSTVASMMHRQETVDCLKKFNARRKLKGAILTTMLATRNFSAAKSLLKKPDGVKEPQTTVIHNPDGNKESTESSNTTIEDEDVKARKQEIIKVTEQLIEAINNGDFEAYTKICDPGLTAFEPEALGNLVEGMDFHRFYFENALSKSNKPIHTIILNPHVHLVGDDAACIAYIRLTQYMDGSGMPKTMQSEETRVWHRRDGKWQNVHFHRSGSPTVPIK

SEQ ID NO: 2029 - protein, 478 aa, Homo sapiens
MASTTTCTRFTDEYQLFEELGKGAFSVVRRCMKIPTGQEYAAKIINTKKLSARDHQKLEREARICRLLKHPNIVRLHDSISEEGFHYLVFDLVTGGELFEDIVAREYYSEADASHCIQQILESVNHCHLNGIVHRDLKPENLLLASKSKGAAVKLADFGLAIEVQGDQQAWFGFAGTPGYLSPEVLRKDPYGKPVDMWACGVILYILLVGYPPFWDEDQHRLYQQIKAGAYDFPSPEWDTVTPEAKDLINKMLTINPAKRITASEALKHPWICQRSTVASMMHRQETVDCLKKFNARRKLKGAILTTMLATRNFSAAKSLLKKPDGVKESTESSNTTIEDEDVKARKQEIIKVTEQLIEAINNGDFEAYTKICDPGLTAFEPEALGNLVEGMDFHRFYFENALSKSNKPIHTIILNPHVHLVGDDAACIAYIRLTQYMDGSGMPKTMQSEETRVWHRRDGKWQNVHFHRSGSPTVPIN

SEQ ID NO: 2030 - protein, 478 aa, Homo sapiens; identical to SEQ ID NO: 2026

SEQ ID NO: 2031 - protein, 510 aa, Homo sapiens
MASTTTCTRFTDEYQLFEELGKGAFSVVRRCMKIPTGQEYAAKIINTKKLSARDHQKLEREARICRLLKHPNIVRLHDSISEEGFHYLVFDLVTGGELFEDIVAREYYSEADASHCIQQILESVNHCHLNGIVHRDLKPENLLLASKSKGAAVKLADFGLAIEVQGDQQAWFGFAGTPGYLSPEVLRKDPYGKPVDMWACGVILYILLVGYPPFWDEDQHRLYQQIKAGAYDFPSPEWDTVTPEAKDLINKMLTINPAKRITASEALKHPWICQRSTVASMMHRQETVDCLKKFNARRKLKGAILTTMLATRNFSAAKSLLKKPDGVKKRKSSSSVQMMESTESSNTTIEDEDVKARKQEIIKVTEQLIEAINNGDFEAYTKICDPGLTAFEPEALGNLVEGMDFHRFYFENALSKSNKPIHTIILNPHVHLVGDDAACIAYIRLTQYMDGSGMPKTMQSEETRVWHRRDGKWQNVHFHRSGSPTVPIKPPCIPNGKENFSGGTSLWQNI

SEQ ID NO: 2032 - protein, 489 aa, Homo sapiens
MASTTTCTRFTDEYQLFEELGKGAFSVVRRCMKIPTGQEYAAKIINTKKLSARDHQKLEREARICRLLKHPNIVRLHDSISEEGFHYLVFDLVTGGELFEDIVAREYYSEADASHCIQQILESVNHCHLNGIVHRDLKPENLLLASKSKGAAVKLADFGLAIEVQGDQQAWFGFAGTPGYLSPEVLRKDPYGKPVDMWACGVILYILLVGYPPFWDEDQHRLYQQIKAGAYDFPSPEWDTVTPEAKDLINKMLTINPAKRITASEALKHPWICQRSTVASMMHRQETVDCLKKFNARRKLKGAILTTMLATRNFSAAKSLLKKPDGVKKRKSSSSVQMMESTESSNTTIEDEDVKARKQEIIKVTEQLIEAINNGDFEAYTKICDPGLTAFEPEALGNLVEGMDFHRFYFENALSKSNKPIHTIILNPHVHLVGDDAACIAYIRLTQYMDGSGMPKTMQSEETRVWHRRDGKWQNVHFHRSGSPTVPIK

SEQ ID NO: 2033 - protein, 498 aa, Homo sapiens
MASTTTCTRFTDEYQLFEELGKGAFSVVRRCMKIPTGQEYAAKIINTKKLSARDHQKLEREARICRLLKHPNIVRLHDSISEEGFHYLVFDLVTGGELFEDIVAREYYSEADASHCIQQILESVNHCHLNGIVHRDLKPENLLLASKSKGAAVKLADFGLAIEVQGDQQAWFGFAGTPGYLSPEVLRKDPYGKPVDMWACGVILYILLVGYPPFWDEDQHRLYQQIKAGAYDFPSPEWDTVTPEAKDLINKMLTINPAKRITASEALKHPWICQRSTVASMMHRQETVDCLKKFNARRKLKGAILTTMLATRNFSAKSLLKKPDGVKESTESSNTTIEDEDVKARKQEIIKVTEQLIEAINNGDFEAYTKICDPGLTAFEPEALGNLVEGMDFHRFYFENALSKSNKPIHTIILNPHVHLVGDDAACIAYIRLTQYMDGSGMPKTMQSEETRVWHRRDGKWQNVHFHRSGSPTVPIKPPCIPNGKENFSGGTSLWQNI

SEQ ID NO: 2034 - protein, 182 aa, Homo sapiens
  SITE 1: note = misc_feature - Xaa can be any naturally occurring amino acid
XRKLKGAILTTMLATRNFSAAKSLLKKPDGVKESTESSNTTIEDEDVKARKQEIIKVTEQLIEAINNGDFEAYTKICDPGLTAFEPEALGNLVEGMDFHRFYFENALSKSNKPIHTIILNPHVHLVGDDAACIAYIRLTQYMDGSGMPKTMQSEETRVWHRRDGKWQNVHFHRSGSPTVPIK

SEQ ID NO: 2035 - protein, 173 aa, Homo sapiens
MGTMKTQRDGHSLGRWSLVLLLLGLVMPLAIIAQVLSYKEAVLRAIDGINQRSSDANLYRLLDLDPRPTMDGDPDTPKPVSFTVKETVCPRTTQQSPEDCDFKKDGLVKRCMGTVTLNQARGSFDISCDKDNKRFALLGDFFRKSKEKIGKEFKRIVQRIKDFLRNLVPRTES

SEQ ID NO: 2036 - protein, 32 aa, Homo sapiens
MEGKWLLCMLLVLGTAIVEAHDGHDDDVIDIE

SEQ ID NO: 2037 - protein, 61 aa, Homo sapiens
MEGKWLLCMLLVLGTAIVEAHDGHDDDVIDIEDDLDDVIEEVEDSKPDTTAPPSSPKESGR

SEQ ID NO: 2038 - protein, 79 aa, Homo sapiens
MEGKWLLCMLLVLGTAIVEAHDGHDDDVIDIEDDLDDVIEEVEDSKPDTTAPPSSPKVTYKAPVPTGEVYFADSFDRGT

SEQ ID NO: 2039 - protein, 96 aa, Homo sapiens
MEGKWLLCMLLVLGTAIVEAHDGHDDDVIDIEDDLDDVIEEVEDSKPDTTAPPSSPKVTYKAPVPTGEVYFADSFDRGTLSGKVGGRGNEGVKASR

SEQ ID NO: 2040 - protein, 107 aa, Homo sapiens
MEGKWLLCMLLVLGTAIVEAHDGHDDDVIDIEDDLDDVIEEVEDSKPDTTAPPSSPKVTYKAPVPTGEVYFADSFDRGTLSGWILSKAKKDDTDDEIAKYDGKWEVE

SEQ ID NO: 2041 - protein, 134 aa, Homo sapiens
MEGKWLLCMLLVLGTAIVEAHDGHDDDVIDIEDDLDDVIEEVEDSKPDTTAPPSSPKVTYKAPVPTGEVYFADSFDRGTLSGWILSKAKKDDTDDEIAKYDGKWEVEEMKESKLPGDKGLVLMSRAKHHAISAK

SEQ ID NO: 2042 - protein, 144 aa, Homo sapiens
MEGKWLLCMLLVLGTAIVEAHDGHDDDVIDIEDDLDDVIEEVEDSKPDTTAPPSSPKVTYKAPVPTGEVYFADSFDRGTLSGWILSKAKKDDTDDEIAKYDGKWEVEEMKESKLPGDKGLVLMSRAKHHAISAKLNKPFLFDTK

SEQ ID NO: 2043 - protein, 168 aa, Homo sapiens
MEGKWLLCMLLVLGTAIVEAHDGHDDDVIDIEDDLDDVIEEVEDSKPDTTAPPSSPKVTYKAPVPTGEVYFADSFDRGTLSGWILSKAKKDDTDDEIAKYDGKWEVEEMKESKLPGDKGLVLMSRAKHHAISAKLNKPFLFDTKPLIVQYEVNFQNGIECGGAYVKLL

SEQ ID NO: 2044 - protein, 592 aa, Homo sapiens
MEGKWLLCMLLVLGTAIVEAHDGHDDDVIDIEDDLDDVIEEVEDSKPDTTAPPSSPKVTYKAPVPTGEVYFADSFDRGTLSGWILSKAKKDDTDDEIAKYDGKWEVEEMKESKLPGDKGLVLMSRAKHHAISAKLNKPFLFDTKPLIVQYEVNFQNGIECGGAYVKLLSKTPELNLDQFHDKTPYTIMFGPDKCGEDYKLHFIFRHKNPKTGIYEEKHAKRPDADLKTYFTDKKTHLYTLILNPDNSFEILVDQSVVNSGNLLNDMTPPVNPSREIEDPEDRKPEDWDERPKIPDPEAVKPDDWDEDAPAKIPDEEATKPEGWLDDEPEYVPDPDAEKPEDWDEDMDGEWEAPQIANPRCESAPGCGVWQRPVIDNPNYKGKWKPPMIDNPSYQGIWKPRKIPNPDFFEDLEPFRMTPFSAIGLELWSMTSDIFFDNFIICADRRIVDDWANDGWGLKKAADGAAEPGVVGQMIEAAEERPWLWVVYILTVALPVFLVILFCCSGKKQTSGMEYKKTDAPQPDVKEEEEEKEEEKDKGDEEEEGEEKLEEKQKSDAEEDGGTVSQEEEDRKPKAEEDEILNRSPRNRKPRRE

SEQ ID NO: 2045 - protein, 592 aa, Homo sapiens; identical to SEQ ID NO: 2044

SEQ ID NO: 2046 - protein, 592 aa, Homo sapiens; identical to SEQ ID NO: 2044

SEQ ID NO: 2047 - protein, 308 aa, Homo sapiens
MEGKWLLCMLLVLGTAIVEAHDGHDDDVIDIEDDLDDVIEEVEEMKESKLPGDKGLVLMSRAKHHAISAKLNKPFLFDTKPLIVQYEVNFQNGIECGGAYVKLLSKTPELNLDQFHDKTPYTIMFGPDKCGEDYKLHFIFRHKNPKTGIYEEKHAKRPDADLKTYFTDKKTHLYTLILNPDNSFEILVDQSVVNSGNLLNDMTPPVNPSREIEDPEDRKPEDWDERPKIPDPEAVKPDDWDEDAPAKIPDEEATKPEGWLDDEPEYVPDPDAEKPEDWDEDMDGEWEAPQIANPRCESAPGCGVWQRP

SEQ ID NO: 2048 - protein, 131 aa, Homo sapiens
MKESKLPGDKGLVLMSRAKHHAISAKLNKPFLFDTKPLIVQYEVNFQNGIECGGAYVKLLSKTPELNLDQFHDKTPYTIMFGPDKCGEDYKLHFIFRHKNPKTGIYEEKHAKRPDADLKTYFTDKKTHLYT

SEQ ID NO: 2049 - protein, 190 aa, Homo sapiens
  SITE 1: note = misc_feature - Xaa can be any naturally occurring amino acid
XGLVLMSRAKHHAISAKLNKPFLFDTKPLIVQYEVNFQNGIECGGAYVKLLSKTPELNLDQFHDKTPYTIMFGPDKCGEDYKLHFIFRHKNPKTGIYEEKHAKRPDADLKTYFTDKKTHLYTLKSRGTNHLCFVHKEMGVSFPKTPGARHCSYPKASVLNPDNSFEILVDQSVVNSGNLLNDMTPPVNPS

SEQ ID NO: 2050 - protein, 170 aa, Homo sapiens
  SITE 1: note = misc_feature - Xaa can be any naturally occurring amino acid
XLYCGAGQGVRAGRGTGTPAVPGRLEVTYKAPVPTGEVYFADSFDRGTLSGWILSKAKKDDTDDEIAKYDGKWEVEEMKESKLPGDKGLVLMSRAKHHAISAKLNKPFLFDTKPLIVQYEVNFQNGIECGGAYVKLLSKTPELNLDQFHDKTPYTIMFGPDKCGEDYKLH

SEQ ID NO: 2051 - protein, 111 aa, Homo sapiens
AEQQALRLEVRAGPDSAGIALYSHEDVCVFKCSVSRETECSRVGKQSFIITLGCNSVLIQFATPNDFCSFYNILKTCRGHTLERSVFSERTEESSAVQYFQMRKLRLREVK

SEQ ID NO: 2052 - protein, 92 aa, Homo sapiens
ALYSHEDVCVFKCSVSRETECSRVGKQSFIITLGCNSVLIQFATPNDFCSFYNILKTCRGHTLERSVFSERTEESSAVQYFQMRKLRLREVK

SEQ ID NO: 2053 - protein, 176 aa, Homo sapiens
LAFWFDVAFIGSIQSYDISIVAQVDQTGSKSSNLLDLKNPFFRYTGTTPSPPPGSHYTSPSENMWNTGSTYNLSSGMAVAGMPTAYDLSSVIASGSSVGHNNLIPLANTGIVNHTHSRMGSIMSTGIVQGSSGAQGSGGGSTSAHYAVNSQFTMGGPAISMASPMSIPTNTMHYGS

SEQ ID NO: 2054 - protein, 608 aa, Homo sapiens
MAAAAAAVGPGAGGAGSAVPGGAGPCATVSVFPGARLLTIGDANGEIQRHAEQQALRLEVRAGPDSAGIALYSHEDVCVFKCSVSRETECSRVGKQSFIITLGCNSVLIQFATPNDFCSFYNILKTCRGHTLERSVFSERTEESSAVQYFQFYGYLSQQQNMMQDYVRTGTYQRAILQNHTDFKDKIVLDVGCGSGILSFFAAQAGARKIYAVEASTMAQHAEVLVKSNNLTDRIVVIPGKVEEVSLPEQVDIIISEPMGYMLFNERMLESYLHAKKYLKPSGNMFPTIGDVHLAPFTDEQLYMEQFTKANFWYQPSFHGVDLSALRGAAVDEYFRQPVVDTFDIRILMAKSVKYTVNFLEAKEGDLHRIEIPFKFHMLHSGLVHGLAFWFDVAFIGSIMTVWLSTAPTEPLTHWYQVRCLFQSPLFAKAGDTLSGTCLLIANKRQSYDISIVAQVDQTGSKSSNLLDLKNPFFRYTGTTPSPPPGSHYTSPSENMWNTGSTYNLSSGMAVAGMPTAYDLSSVIASGSSVGHNNLIPLANTGIVNHTHSRMGSIMSTGIVQGSSGAQGSGGGSTSAHYAVNSQFTMGGPAISMASPMSIPTNTMHYGS

SEQ ID NO: 2055 - protein, 585 aa, Homo sapiens
MAAAAAAVGPGAGGAGSAVPGGAGPCATVSVFPGARLLTIGDANGEIQRHAEQQALRLEVRAGPDSAGIALYSHEDVCVFKCSVSRETECSRVGKQSFIITLGCNSVLIQFATPNDFCSFYNILKTCRGHTLERSVFSERTEESSAVQYFQFYGYLSQQQNMMQDYVRTGTYQRAILQNHTDFKDKIVLDVGCGSGILSFFAAQAGARKIYAVEASTMAQHAEVLVKSNNLTDRIVVIPGKVEEVSLPEQVDIIISEPMGYMLFNERMLESYLHAKKYLKPSGNMFPTIGDVHLAPFTDEQLYMEQFTKANFWYQPSFHGVDLSALRGAAVDEYFRQPVVDTFDIRILMAKSVKYTVNFLEAKEGDLHRIEIPFKFHMLHSGLVHGLAFWFDVAFIGSIMTVWLSTAPTEPLTHWYQVRCLFQSPLFAKAGDTLSGTCLLIANKRQSYDISIVAQVDQTGSKSSNLLDLKNPFFRYTGTTPSPPPGSHYTSPSENMWNTGSTYNLSSGMAVAGMPTAYDLSSVIASGSSVGHNNLIPLGSSGAQGSGGGSTSAHYAVNSQFTMGGPAISMASPMSIPTNTMHYGS

SEQ ID NO: 2056 - protein, 161 aa, Homo sapiens
MAAAAAAVGPGAGGAGSAVPGGAGPCATVSVFPGARLLTIGDANGEIQRHAEQQALRLEVRAGPDSAGIALYSHEDVCVFKCSVSRETECSRVGKQSFIITLGCNSVLIQFATPNDFCSFYNILKTCRGHTLERSVFSERTEESSAVQYFQMRKLRLREVK

SEQ ID NO: 2057 - protein, 120 aa, Homo sapiens
MAAAAAAVGPGAGGAGSAVPGGAGPCATVSVFPGARLLTIGDANGEIQRHAEQQALRLEVRAGPDSAGIALYSHFCSFYNILKTCRGHTLERSVFSERTEESSAVQYFQFYGYLSQQQNM

SEQ ID NO: 2058 - protein, 343 aa, Homo sapiens
  SITE 1: note = misc_feature - Xaa can be any naturally occurring amino acid
XANGEIQRHAEQQALRLEVRAGPDSAGIALYSHEDVCVFKCSVSRETECSRVGKQSFIITLGCNSVLIQFATPNDFCSFYNILKTCRGHTLERSVFSERTEESSAVQYFQFYGYLSQQQNMMQDYVRTGTYQRAILQNHTDFKDKIVLDVGCGSGILSFFAAQAGARKIYAVEASTMAQHAEVLVKSNNLTDRIVVIPGKVEEVSLPEQVDIIISEPMGYMLFNERMLESYLHAKKYLKPSGNMFPTIGDVHLAPFTDEQLYMEQFTKANFWYQPSFHGVDLSALRGAAVDEYFRQPVVDTFDIRILMAKSVKYTVNFLEAKEGDLHSACLASPAATALCLPG

SEQ ID NO: 2059 - protein, 827 aa, Homo sapiens
MLLCLSPAWLMKVPAPGQPGEAALLVSKAVSFHPGGLTFLDDFVPPRRATYFLAGLGLGPGRGREAAELARDLTCPTGASAELARLLEDRLLTRQLLAQQGGVAVPATLAFTYKPPGLLRGGDASLGLRLVELSGKEGQETLVKEEVEAFLRSEALGDILQVAVKLSGWRWRGRQAWRLHPRAELGAVVDTVLALLEKLEEEESVLVEAVYPPAQLPCSDGPSPGPGLAVRICAVVCRTQGDRPLLSKVVCGVGRGDRPLRHHNSLPRTLEVALAQCGLGEEAQVAAVRQRVKAAAEAALAAVLALEAGLSAEQRGGRRAHTDFLGVDFALTAAGGVLTPVALELNGGLCLEACGALEGLWAAPRLGPAADEAVAAPLVETMLRRSARCLMEGKQLLVVGAGGVSKKFVWEAARDYGLQLHLVESDPNHFASQLVQTFIHFDMTEHRRDEENARLLAELVRARGLKLDGCFSYWDDCLVLTALLCQELGLPCSSPAAMRLAKQKSLTQLHLLHHHGPPWPAPSLHAVPCCPLESEADVERAVHQVPLPGVMKLEFGAGAVGVRLVEDAPQCHEHFSRITRDLQGEADHPGIGLGWGNAMLLMEFVEGTEHDVDLVLFGGRLLAAFVSDNGPTRLPGFTETAACMPTGLAPEQEAQMVQAAFRCCLGCGLLDGVFNVELKLTGAGPRLIEINPRMGGFYLRDWILELYGVDLLLAAVMVACGLRPALPTRPRARGHLVGVMCLVSQHLQALSSTASRETLQALHDRGLLRLNLLEEALVPGEYEEPYCSVACAGPSPTEARLRLLGLCQGLGIDGPSYPVAHFLSHFK

SEQ ID NO: 2060 - protein, 950 aa, Homo sapiens
MLSLDPSGPEWDCPLGSKDLEEEGPWGGGSGLPPTGCFPGSWRQDVGLDCKGSPEGAEARAWTVYYYSLLQSCLQQAGLPETQDRGQVPRTGCPGAEVTLCVLGSPSTFLPVLLEGGVQSPGNMLLCLSPAWLMKVPAPGQPGEAALLVSKAVSFHPGGLTFLDDFVPPRRATYFLAGLGLGPGRGREAAELARDLTCPTGASAELARLLEDRLLTRQLLAQQGGVAVPATLAFTYKPPGLLRGGDASLGLRLVELSGKEGQETLVKEEVEAFLRSEALGDILQVAVKLSGWRWRGRQAWRLHPRAELGAVVDTVLALLEKLEEEESVLVEAVYPPAQLPCSDGPSPGPGLAVRICAVVCRTQGDRPLLSKVVCGVGRGDRPLRHHNSLPRTLEVALAQCGLGEEAQVAAVRQRVKAAAEAALAAVLALEAGLSAEQRGGRRAHTDFLGVDFALTAAGGVLTPVALELNGGLCLEACGALEGLWAAPRLGPAADEAVAAPLVETMLRRSARCLMEGKQLLVVGAGGVSKKFVWEAARDYGLQLHLVESDPNHFASQLVQTFIHFDMTEHRRDEENARLLAELVRARGLKLDGCFSYWDDCLVLTALLCQELGLPCSSPAAMRLAKQKSLTQLHLLHHHGPPWPAPSLHAVPCCPLESEADVERAVHQVPLPGVMKLEFGAGAVGVRLVEDAPQCHEHFSRITRDLQGEADHPGIGLGWGNAMLLMEFVEGTEHDVDLVLFGGRLLAAFVSDNGPTRLPGFTETAACMPTGLAPEQEAQMVQAAFRCCLGCGLLDGVFNVELKLTGAGPRLIEINPRMGGFYLRDWILELYGVDLLLAAVMVACGLRPALPTRPRARGHLVGVMCLVSQHLQALSSTASRETLQALHDRGLLRLNLLEEALVPGEYEEPYCSVACAGPSPTEARLRLLGLCQGLGIDGPSYPVAHFLSHFK

SEQ ID NO: 2061 - protein, 924 aa, Homo sapiens
MLSLDPSGPEWDCPLGSKDLEEEGPWGGGSGLPPTGCFPGSWRQDVGLDCKGSPEGAEARAWTVYYYSLLQSCLQQAGLPETQDRGQVPRTGCPGAEVTLCVLGSPSTFLPVLLEGGVQSPGNMLLCLSPAWLMKVPAPGQPGEAALLVSKAVSFHPGGLTFLDDFVPPRRATYFLAGLGLGPGRGREAAELARDLTCPTGASAELARLLEDRLLTRQLLAQQGGVAVPATLAFTYKPPGLLRGGDASLGLRLVELSGKEGQETLVKEEVEAFLRSEALGDILQVAVKLSGWRWRGRQAWRLHPRAELGAVVDTVLALLEKLEEEESVLVEAVYPPAQLPCSDGPSPGPGLAVRICAVVCRTQGDRPLLSKVVCGVGRGDRPLRHHNSLPRTLEAALAAVLALEAGLSAEQRGGRRAHTDFLGVDFALTAAGGVLTPVALELNGGLCLEACGALEGLWAAPRLGPAADEAVAAPLVETMLRRSARCLMEGKQLLVVGAGGVSKKFVWEAARDYGLQLHLVESDPNHFASQLVQTFIHFDMTEHRRDEENARLLAELVRARGLKLDGCFSYWDDCLVLTALLCQELGLPCSSPAAMRLAKQKSLTQLHLLHHHGPPWPAPSLHAVPCCPLESEADVERAVHQVPLPGVMKLEFGAGAVGVRLVEDAPQCHEHFSRITRDLQGEADHPGIGLGWGNAMLLMEFVEGTEHDVDLVLFGGRLLAAFVSDNGPTRLPGFTETAACMPTGLAPEQEAQMVQAAFRCCLGCGLLDGVFNVELKLTGAGPRLIEINPRMGGFYLRDWILELYGVDLLLAAVMVACGLRPALPTRPRARGHLVGVMCLVSQHLQALSSTASRETLQALHDRGLLRLNLLEEALVPGEYEEPYCSVACAGPSPTEARLRLLGLCQGLGIDGPSYPVAHFLSHFK

SEQ ID NO: 2062 - protein, 116 aa, Homo sapiens
MESSRVRLLPLLGAALLLMLPLLGTRAQEDAELQPRALDIYSAVDDASHEKELIEALQEVLKKLKSKRVPIYEKKYGQVPMCDAGEQCAVRKGARIGKLCDCPRGTSCNSFLLKCL

SEQ ID NO: 2063 - protein, 117 aa, Homo sapiens
MDGIHIVAFAEEADPDGFEFLETLKAVAQDNTENPDLSIIWIDPDDFPLLVPYWEKTFDIDLSAPQIGVVNVTDADSVWMEMDDEEDLPSAEELEDWLEDVLEGEINTEDDDDDDDD

SEQ ID NO: 2064 - protein, 396 aa, Homo sapiens
MSATDRMGPRAVPGLRLALLLLLVLGTPKSGVQGQEGLDFPEYDGVDRVINVNAKNYKNVFKKYEVLALLYHEPPEDDKASQRQFEMEELILELAAQVLEDKGVGFGLVDSEKDAAVAKKLGLTEVDSMYVFKGDEVIEYDGEFSADTIVEFLLDVLEDPVELIEGERELQAFENIEDEIKLIGYFKSKDSEHYKAFEDAAEEFHPYIPFFATFDSKVAKKLTLKLNEIDFYEAFMEEPVTIPDKPNSEEEIVNFVEEHRRSTLRKLKPESMYETWEDDMDGIHIVAFAEEADPDGFEFLETLKAVAQDNTENPDLSIIWIDPDDFPLLVPYWEKTFDIDLSAPQIGVVNVTDADSVWMEMDDEEDLPSAEELEDWLEDVLEGEINTEDDDDDDDD

SEQ ID NO: 2065 - protein, 399 aa, Homo sapiens
MKRTHLFIVGIYFLSSCRAEEGLNFPTYDGKDRVVSLSEKNFKQVLKKYDLLCLYYHEPVSSDKVTQKQFQLKEIVLELVAQVLEHKAIGFVMVDAKKEAKLAKKLGFDEEGSLYILKGDRTIEFDGEFAADVLVEFLLDLIEDPVEIISSKLEVQAFERIEDYIKLIGFFKSEDSEYYKAFEEAAEHFQPYIKFFATFDKGVAKKLSLKMNEVDFYEPFMDEPIAIPNKPYTEEELVEFVKEHQRPTLRRLRPEEMFETWEDDLNGIHIVAFAEKSDPDGYEFLEILKQVARDNTDNPDLSILWIDPDDFPLLVAYWEKTFKIDLFRPQIGVVNVTDADSVWMEIPDDDDLPTAEELEDWIEDVLSGKINTEDDDEDDDDDDNSDEEDNDDSDDDDDE

SEQ ID NO: 2066 - protein, 1119 aa, Homo sapiens
MCGPAMFPAGPPWPRVRVVQVLWALLAVLLASWRLWAIKDFQECTWQVVLNEFKRVGESGVSDSFFEQEPVDTVSSLFHMLVDSPIDPSEKYLGFPYYLKINYSCEEKPSEDLVRMGHLTGLKPLVLVTFQSPVNFYRWKIEQLQIQMEAAPFRSKEPCMAEEVCSMSWYTPMPIKKGSVVMRVDISSNGLGTFIPDKRFQMNINGFLKRDRDNNIQFTVGEELFNLMPQYFVGVSSRPLWHTVDQSPVLILGGIPNEKYVLMTDTSFKDFSLVELSIDSCWVGSFYCPHSGFTATIYDTIATESTLFIRQNQLVYYFTGTYTTLYERNRGSGSWIRVLASECIKKLCPVYFHSNGSEYIMALTTGKHEGYVHFGTIRDGQVSFEMLPRQWSVCEQIGASDDLELLYHIPEFIPEARGLEFLMILGTESYTSTAMAPKGIFCNPYNNLIFIWGNFLLQSSNKENFIYLADFPKELSIKYMARSFRGAVAIVTETEEIWYLLEGSYRVYQLFPSKGWQVHISLKLMQQSSLYASNETMLTLFYEDSKLYQLVYLMNNQKGQLVKRLVPVEQLLMYQQHTSHYDLERKGGYLMLSFIDFCPFSVMRLRSLPSPQRYTRQERYRARPPRVLERSGFHNENSLAIYQGLVYYLLWLHSVYDKPYADPVHDPTWRWWANNKQDQDYYFFLASNWRSAGGVSIEMDSYEKIYNLESAYELPERIFLDKGTEYSFAIFLSAQGHSFRTQSELGTAFQLHSQVDVGVVLADPGCIEASVKQEVLINRNSVLFSITLKDKKLCYDQGISGHHLMETSMTVNVVGSSGLCFQETHLGPHMQGNLMVPVFIGCPPGKRLAFDITYTLEYSRLKNKHYFDCVNVNPEMPCFLFRDIFYPFFLIQDLVTGDSGSFQGSYVLLVVGGGPTLDSLKDYSEDEIYRFNSPLDKTNSLIWTTRTTRTTKDSAFHIMSHESPGIEWLCLENAPCYDNVPQGIFAPEFFFKVLVSNRGVDTSTYCNYQLTFLLHIHGLPLSPKRALFIIMVSASVFVGLVIFYIAFCLLWPLVVKGCTMIRWKINNLIASESYYTYASISGISSMPSLRHSRMGSMFSSRMTEDRAEPKEAVERQLMT

SEQ ID NO: 2067 - protein, 661 aa, Homo sapiens
MCGPAMFPAGPPWPRVRVVQVLWALLAVLLASWRLWAIKDFQECTWQVVLNEFKRVGESGVSDSFFEQEPVDTVSSLFHMLVDSPIDPSEKYLGFPYYLKINYSCEEKPSEDLVRMGHLTGLKPLVLVTFQSPVNFYRWKIEQLQIQMEAAPFRSKEPCMAEEVCSMSWYTPMPIKKGSVVMRVDISSNGLGTFIPDKRFQMNINGFLKRDRDNNIQFTVGEELFNLMPQYFVGVSSRPLWHTVDQSPVLILGGIPNEKYVLMTDTSFKDFSLVELSIDSCWVGSFYCPHSGFTATIYDTIATESTLFIRQNQLVYYFTGTYTTLYERNRGSGSWIRVLASECIKKLCPVYFHSNGSEYIMALTTGKHEGYVHFGTIRDGQVSFEMLPRQWSVCEQIGVTTCSIIWSEYIAGEYTLLLLVESGYGNASKRFQVVSYNTASDDLELLYHIPEFIPEARGLEFLMILGTESYTSTAMAPKGIFCNPYNNLIFIWGNFLLQSSNKENFIYLADFPKELSIKYMARSFRGAVAIVTETEEIWYLLEGSYRVYQLFPSKGWQVHISLKLMQQSSLYASNETMLTLFYEDSKLYQLVYLMNNQKGQLVKRLVPVEQLLMYQQHTSHYDLERKGGYLMLSFIDFCPFSVMRLRSLPSPQRYTRQERYR

SEQ ID NO: 2068 - protein, 1159 aa, Homo sapiens
MCGPAMFPAGPPWPRVRVVQVLWALLAVLLASWRLWAIKDFQECTWQVVLNEFKRVGESGVSDSFFEQEPVDTVSSLFHMLVDSPIDPSEKYLGFPYYLKINYSCEEKPSEDLVRMGHLTGLKPLVLVTFQSPVNFYRWKIEQLQIQMEAAPFRSKEPCMAEEVCSMSWYTPMPIKKGSVVMRVDISSNGLGTFIPDKRFQMNINGFLKRDRDNNIQFTVGEELFNLMPQYFVGVSSRPLWHTVDQSPVLILGGIPNEKYVLMTDTSFKDFSLVELSIDSCWVGSFYCPHSGFTATIYDTIATESTLFIRQNQLVYYFTGTYTTLYERNRGSGSWIRVLASECIKKLCPVYFHSNGSEYIMALTTGKHEGYVHFGTIRDGQVSFEMLPRQWSVCEQIGVTTCSIIWSEYIAGEYTLLLLVESGYGNASKRFQVVSYNTASDDLELLYHIPEFIPEARGLEFLMILGTESYTSTAMAPKGIFCNPYNNLIFIWGNFLLQSSNKENFIYLADFPKELSIKYMARSFRGAVAIVTETEEIWYLLEGSYRVYQLFPSKGWQVHISLKLMQQSSLYASNETMLTLFYEDSKLYQLVYLMNNQKGQLVKRLVPVEQLLMYQQHTSHYDLERKGGYLMLSFIDFCPFSVMRLRSLPSPQRYTRQERYRARPPRVLERSGFHNENSLAIYQGLVYYLLWLHSVYDKPYADPVHDPTWRWWANNKQDQDYYFFLASNWRSAGGVSIEMDSYEKIYNLESAYELPERIFLDKGTEYSFAIFLSAQGHSFRTQSELGTAFQLHSQVDVGVVLADPGCIEASVKQEVLINRNSVLFSITLKDKKLCYDQGISGHHLMETSMTVNVVGSSGLCFQETHLGPHMQGNLMVPVFIGCPPGKRLAFDITYTLEYSRLKNKHYFDCVNVNPEMPCFLFRDIFYPFFLIQDLVTGDSGSFQGSYVLLVVGGGPTLDSLKDYSEDEIYRFNSPLDKTNSLIWTTRTTRTTKDSAFHIMSHESPGIEWLCLENAPCYDNVPQGIFAPEFFFKVLVSNRGVDTSTYCNYQLTFLLHIHGLPLSPKRALFIIMVSASVFVGLVIFYIAFCLLWPLVVKGCTMIRWKINNLIASESYYTYASISGISSMPSLRHSRMGSMFSSRMTEDRAEPKEAVERQLMT

SEQ ID NO: 2069 - protein, 292 aa, Homo sapiens
MCGPAMFPAGPPWPRVRVVQVLWALLAVLLASWRLWAIKDFQECTWQVVLNEFKRVGESGVSDSFFEQEPVDTVSSLFHMLVDSPIDPSEKYLGFPYYLKINYSCEEKSPVNFYRWKIEQLQIQMEAAPFRSKEPCMAEEVCSMSWYTPMPIKKGSVVMRVDISSNGLGTFIPDKRFQMNINGFLKRDRDNNIQFTVGEELFNLMPQYFVGVSSRPLWHTVDQSPVLILGGIPNEKYVLMTDTSFKDFSLVEAPIPHSMRETAAVAVGFVSWPASASRSCALCISIAMALST

SEQ ID NO: 2070 - protein, 136 aa, Homo sapiens
MCGPAMFPAGPPWPRVRVVQVLWALLAVLLASWRLWAIKDFQECTWQVVLNEFKRVGESGVSDSFFEQEPVDTVSSLFHMLVDSPIDPSEKYLGFPYYLKINYSCEEKSPVNFYRWKIEQLQIQMEAAPFRSKGSR

SEQ ID NO: 2071 - protein, 159 aa, Homo sapiens
MCGPAMFPAGPPWPRVRVVQVLWALLAVLLASWRLWAIKDFQECTWQVVLNEFKRVGESGVSDSFFEQEPVDTVSSLFHMLVDSPIDPSEKYLGFPYYLKINYSCEEKTESCAVAQTGVQWRDLGSLQPPPPVFKRCSCLGLPSSWNYSPLRTWCAWAT

SEQ ID NO: 2072 - protein, 165 aa, Homo sapiens
RWKIEQLQIQMEAAPFRSKEPCMAEEVCSMSWYTPMPIKKGSVVMRVDISSNGLGTFIPDKRFQMNINGFLKRDRDNNIQFTVGEELFNLMPQYFVGVSSRPLWHTVDQSPVLILGGIPNEKYVLMTDTSFKDFSLVEAVGFVSWPASASRSCALCISIAMALST

SEQ ID NO: 2073 - protein, 180 aa, Homo sapiens
  SITE 1: note = misc_feature - Xaa can be any naturally occurring amino acid
XRNRGSGSWIRVLASECIKKLCPVYFHSNGSEYIMALTTGKHEGYVHFGTIRASDDLELLYHIPEFIPEARGLEFLMILGTESYTSTAMAPKGIFCNPYNNLIFIWGNFLLQSSNKENFIYLADFPKELSIKYMARSFRGAVAIVTETEEIWYLLEGSYRVYQLFPSKGWQVHISLKLMQ

SEQ ID NO: 2074 - protein, 193 aa, Homo sapiens
MLGVLELLLLGAAWLAGPARGQNETEPIVLEGKCLVVCDSNPTSDPTGTALGISVRSGSAKVAFSAIRSTNHEPSEMSNRTMIIYFDQVLVNIGNNFDSERSTFIAPRKGIYSFNFHVVKVYNRQTIQVSLMLNGWPVISAFAGDQDVTREAASNGVLIQMEKGDRAYLKLERGNLMGGWKYSTFSGFLVFPL

SEQ ID NO: 2075 - protein, 193 aa, Homo sapiens; identical to SEQ ID NO: 2074

SEQ ID NO: 2076 - protein, 140 aa, Homo sapiens
MLGVLELLLLGAAWLAGPARGQNETEPIVLEGKCLVVCDSNPTSDPTGTALGISVRSGSAKVAFSAIRSTNHEPSEMSNRTMIIYFDQVSVPSSRGVQIGLVKEGWMEDRCPVLSKGSAEARGRQSGTDSCPLPFVPVSL

SEQ ID NO: 2077 - protein, 110 aa, Homo sapiens
MDWDKVLVNIGNHFDLASSIFVAPRKGIYSFSFHVVKVYNRQTIQVSLMQNGYPVISAFAGDQDVTREAASNGVLLLMEREDKVHLKLERGNLMGGWKYSTFSGFLVFPL

SEQ ID NO: 2078 - protein, 108 aa, Homo sapiens
MFQVLVNIGNHFDLASSIFVAPRKGIYSFSFHVVKVYNRQTIQVSLMQNGYPVISAFAGDQDVTREAASNGVLLLMEREDKVHLKLERGNLMGGWKYSTFSGFLVFPL

SEQ ID NO: 2079 - protein, 224 aa, Homo sapiens
MQAPGRGPLGLRLMMPGRRGALREPGGCGSCLGVALALLLLLLPACCPVRAQNDTEPIVLEGKCLVVCDSSPSADGAVTSSLGISVRSGSAKVAFSATRSTNHEPSEMSNRTMTIYFDQVLVNIGNHFDLASSIFVAPRKGIYSFSFHVVKVYNRQTIQVSLMQNGYPVISAFAGDQDVTREAASNGVLLLMEREDKVHLKLERGNLMGGWKYSTFSGFLVFPL

SEQ ID NO: 2080 - protein, 224 aa, Homo sapiens; identical to SEQ ID NO: 2079

SEQ ID NO: 2081 - protein, 205 aa, Homo sapiens
MLGAKPHWLPGPLHSPGLPLVLVLLALGAGWAQEGSEPVLLEGECLVVCEPGRAAAGGPGGAALGEAPPGRVAFAAVRSHHHEPAGETGNGTSGAIYFDQVLVNEGGGFDRASGSFVAPVRGVYSFRFHVVKVYNRQTVQVSLMLNTWPVISAFANDPDVTREAATSSVLLPLDPGDRVSLRLRRGNLLGGWKYSSFSGFLIFPL

SEQ ID NO: 2082 - protein, 154 aa, Homo sapiens
MWGLSGQSFGRTLTPTLKMRSTWGCCSRTLFSASADTAKRSGDAGRAPQVLVNEGGGFDRASGSFVAPVRGVYSFRFHVVKVYNRQTVQVSLMLNTWPVISAFANDPDVTREAATSSVLLPLDPGDRVSLRLRRGNLLGGWKYSSFSGFLIFPL

SEQ ID NO: 2083 - protein, 201 aa, Homo sapiens
MGSGRRALSAVPAVLLVLTLPGLPVWAQNDTEPIVLEGKCLVVCDSNPATDSKGSSSSPLGISVRAANSKVAFSAVRSTNHEPSEMSNKTRIIYFDQILVNVGNFFTLESVFVAPRKGIYSFSFHVIKVYQSQTIQVNLMLNGKPVISAFAGDKDVTREAATNGVLLYLDKEDKVYLKLEKGNLVGGWQYSTFSGFLVFPL

SEQ ID NO: 2084 - protein, 46 aa, Homo sapiens
MVKAGTCCATCKEFYQMKQTVLQLKQKIALLPNNAADLGKYITGDK

SEQ ID NO: 2085 - protein, 406 aa, Homo sapiens
MVPPPPSRGGAARGQLGRSLGPLLLLLALGHTWTYREEPEDGDREICSESKIATTKYPCLKSSGELTTCYRKKCCKGYKFVLGQCIPEDYDVCAEAPCEQQCTDNFGRVLCTCYPGYRYDRERHRKREKPYCLDIDECASSNGTLCAHICINTLGSYRCECREGYIREDDGKTCTRGDKYPNDTGHEKSENMVKAGTCCATCKEFYQMKQTVLQLKQKIALLPNNAADLGKYITGDKVLASNTYLPGPPGLPGGQGPPGSPGPKGSPGFPGMPGPPGQPGPRGSMGPMGPSPDLSHIKQGRRGPVGPPGAPGRDGSKGERGAPGPRGSPGPPGSFDFLLLMLADIRNDITELQEKVFGHRTHSSAEEFPLPQEFPSYPEAMDLGSGDDHPRRTETRDLRAPRDFYP

SEQ ID NO: 2086 - protein, 336 aa, Homo sapiens
RKKCCKGYKFVLGQCIPEDYDVCAEAPCEQQCTDNFGRVLCTCYPGYRYDRERHRKREKPYCLDIDECASSNGTLCAHICINTLGSYRCECREGYIREDDGKTCTRGDKYPNDTGHEKSENMVKAGTCCATCKEFYQMKQTVLQLKQKIALLPNNAADLGKYITGDKVLASNTYLPGPPGLPGGQGPPGSPGPKGSPGFPGMPGPPGQPGPRGSMGPMGPSPDLSHIKQGRRGPVGPPGAPGRDGSKGERGAPGPRGSPGPPGSFDFLLLMLADIRNDITELQEKVFGHRTHSSAEEFPLPQEFPSYPEAMDLGSGDDHPRRTETRDLRAPRDFYP

SEQ ID NO: 2087 - protein, 529 aa, Homo sapiens
MAALTTVVVAAAATAVAGAVAGAGAATGTGVGATPAPQQSDGCFSTSGGIRPFHLQNWKQKVNQTKKAEFVRTAEKFKNQVINMEKDKHSHFYNQKSDFRIEHSMLEELENKLIHSRKTERAKIQQQLAKIHNNVKKLQHQLKDVKPTPDFVEKLREMMEEIENAINTFKEEQRLIYEELIKEEKTTNNELSAISRKIDTWALGNSETEKAFRAISSKVPVDKVTPSTLPEEVLDFEKFLQQTGGRQGAWDDYDHQNFVKVRNKHKGKPTFMEEVLEHLPGKTQDEVQQHEKWYQKFLALEERKKESIQIWKTKKQQKREEIFKLKEKADNTPVLFHNKQEDNQKQKEEQRKKQKLAVEAWKKQKSIEMSMKCASQLKEEEEKEKKHQKERQRQFKLKLLLESYTQQKKEQEEFLRLEKEIREKAEKAEKRKNAADEISRFQERDLHKLELKILDRQAKEDEKSQKQRRLAKLKEKVENNVSRDPSRLYKPTKGWEERTKKIGPTGSGPLLHIPHRAIPTWRQGIQRRV

SEQ ID NO: 2088 - protein, 446 aa, Homo sapiens
MEKDKHSHFYNQKSDFRIEHSMLEELENKLIHSRKTERAKIQQQLAKIHNNVKKLQHQLKDVKPTPDFVEKLREMMEEIENAINTFKEEQRLIYEELIKEEKTTNNELSAISRKIDTWALGNSETEKAFRAISSKVPVDKVTPSTLPEEVLDFEKFLQQTGGRQGAWDDYDHQNFVKVRNKHKGKPTFMEEVLEHLPGKTQDEVQQHEKWYQKFLALEERKKESIQIWKTKKQQKREEIFKLKEKADNTPVLFHNKQEDNQKQKEEQRKKQKLAVEAWKKQKSIEMSMKCASQLKEEEEKEKKHQKERQRQFKLKLLLESYTQQKKEQEEFLRLEKEIREKAEKAEKRKNAADEISRFQERDLHKLELKILDRQAKEDEKSQKQRRLAKLKEKVENNVSRDPSRLYKPTKGWEERTKKIGPTGSGPLLHIPHRAIPTWRQGIQRRV

SEQ ID NO: 2089 - protein, 414 aa, Homo sapiens
MEKDKHSHFYNQKSDFRIEHSMLEELENKLIHSRKTERAKIQQQLAKIHNNVKKLQHQLKDVKPTPDFVEKLREMMEEIENAINTFKEEQRLIYEELIKEEKTTNNELSAISRKIDTWALGNSETEKAFRAISSKVPVDKVTPSTLPEEVLDFEKFLQQTGGRQGAWDDYDHQNFVKVRNKHKGKPTFMEEVLEHLPGKTQDEVQQHEKWYQKFLALEERKKESIQIWKTKKQQKREEIFKLKEKADNTPVLFHNKQEDNQKQKEEQRKKQKLAVEAWKKQKSIEMSMKCASQLKEEEEKEKKHQKERQRQFKLKLLLESYTQQKKEQEEFLRLEKEIREKAEKAEKRKNAADEISRFQERVENNVSRDPSRLYKPTKGWEERTKKIGPTGSGPLLHIPHRAIPTWRQGIQRRV

SEQ ID NO: 2090 - protein, 446 aa, Homo sapiens; identical to SEQ ID NO: 2088

SEQ ID NO: 2091 - protein, 142 aa, Homo sapiens
MMAQKSQGSDNLQEGQEKSKREILKCTKSAWAPLDEWLPPDPEEESQSLTIPMLEDSKQESIQQWLDSGFFVSANENFQQVIDRTVSLYEQGMVQMTVKDYMRSLHQFSETPILSRGTSFNSCYSTASVPQSIPEWLEFWEI

SEQ ID NO: 2092 - protein, 163 aa, Homo sapiens
MMAQKSQGSDNLQEGQEKSKREILKCTKSAWAPLDEWLPPDPEEESQSLTIPMLEDSKQESIQQWLDSGFFVSANENFQQVIDRTVSLYEQGMVQMTVKDYMRSLHQFSETPILSRGTSFNSCYSTASVPQSIPEWLEFWEIDPVEILLDLGFGADEPDICMQ

SEQ ID NO: 2093 - protein, 168 aa, Homo sapiens
MMAQKSQGSDNLQEGQEKSKREILKCTKSAWAPLDEWLPPDPEEESQSLTIPMLEDSKQESIQQWLDSGFFVSANENFQQVIDRTVSLYEQGMVQMTVKDYMRSLHQFSETPILSRGTSFNSCYSTASVPQSIPEWLEFWEIDPVEILLDLGFGADEPDICMQIPARF

SEQ ID NO: 2094 - protein, 896 aa, Homo sapiens
MMAQKSQGSDNLQEGQEKSKREILKCTKSAWAPLDEWLPPDPEEESQSLTIPMLEDSKQESIQQWLDSGFFVSANENFQQVIDRTVSLYEQGMVQMTVKDYMRSLHQFSETPILSRGTSFNSCYSTASVPQSIPEWLEFWEIDPVEILLDLGFGADEPDICMQIPARFLGCGSAARGINIRVFLEAQKQRMDIENPNLYGRFRQLEILDHVTNAFSSLLSDVSILPNRAEEKAGGESVQRTSVQSFEEETGNPLDMTSGTVGARVDRANSCQSDSSGFLEEPLEPLPLQMPSLPNSQSPAENGGRKPRDQSHSLVSSQDCQLESDGPDSKSRASMSFSSQEANALEQRASVSVMEEEFLLEAMEGPPELYIPDMACAKTTTRGECPRKDSHLWQLLPMPHAEYEVTRPTATSKYDHPLGFMVTHVTEMQDSFVRPEGAGKVQSHHNESQRSPGNDHTQDKFLHVDSEAPREEESSGFCPHTNHSLLVPESSSQCIPKHSEITPYATDLAQTSEKLIPHLHKLPGDPAQVKSRSGTLGQILPGTEAEMENLPLNTGSSRSVMTQMSSSLVSAAQRAVALGTGPRGTSLECTVCDPVTATETRLGTKARQLNDASIQTSALSNKTLTHGPQPLTKSVSLDSGFSSICPMGTCHAIPAHCCICCHHHPHCHGERQSPGPEPSVCRHCLCSLTGHQEAQFMTTLKALQDTTVRELCSCTVHEMEAMKTICQSFREYLEEIEQHLMGQQALFSRDMSEEEREEAEQLQTLREALRQQVAELEFQLGDRAQQIREGILLQLEVLTAEPPEHYSNLHQYNWIEESNGQTSCSKIHPGMAPRTVFPPDDGQEAPCSGGTQLAAFTPPTLENSTRMSPSSSAWAKLGPTPLSNCPVGEKDADVFL

SEQ ID NO: 2095 - protein, 1044 aa, Homo sapiens
MMAQKSQGSDNLQEGQEKSKREILKCTKSAWAPLDEWLPPDPEEESQSLTIPMLEDSKQESIQQWLDSGFFVSANENFQQVIDRTVSLYEQGMVQMTVKDYMRSLHQFSETPILSRGTSFNSCYSTASVPQSIPEWLEFWEIDPVEILLDLGFGADEPDICMQIPARFLGCGSAARGINIRVFLEAQKQRMDIENPNLYGRFRQLEILDHVTNAFSSLLSDVSILPNRAEEKAGGESVQRTSVSAAKEHRRRMGKLLRRASKQNIRRDCNPEVSESFKVKDEVFVPFTKPWDCGAELAATSINHKQNHLSLSVEHQSLQACDDLLPYPPHGLLSKQWPCSSMPAKQAPPSCVSEGSVKGRTQKENLFQTNKLKSLSHLAGKGPDSFEMEEVQSFEEETGNPLDMTSGTVGARVDRANSCQSDSSGFLEEPLEPLPLQMPSLPNSQSPAENGGRKPRDQSHSLVSSQDCQLESDGPDSKSRASMSFSSQEANALEQRASVSVMEEEFLLEAMEGPPELYIPDMACAKTTTRGECPRKDSHLWQLLPMPHAEYEVTRPTATSKYDHPLGFMVTHVTEMQDSFVRPEGAGKVQSHHNESQRSPGNDHTQDKFLHVDSEAPREEESSGFCPHTNHSLLVPESSSQCIPKHSEITPYATDLAQTSEKLIPHLHKLPGDPAQVKSRSGTLGQILPGTEAEMENLPLNTGSSRSVMTQMSSSLVSAAQRAVALGTGPRGTSLECTVCDPVTATETRLGTKARQLNDASIQTSALSNKTLTHGPQPLTKSVSLDSGFSSICPMGTCHAIPAHCCICCHHHPHCHGERQSPGPEPSVCRHCLCSLTGHQEAQFMTTLKALQDTTVRELCSCTVHEMEAMKTICQSFREYLEEIEQHLMGQQALFSRDMSEEEREEAEQLQTLREALRQQVAELEFQLGDRAQQIREGILLQLEVLTAEPPEHYSNLHQYNWIEESNGQTSCSKIHPGMAPRTVFPPDDGQEAPCSGGTQLAAFTPPTLENSTRMSPSSSAWAKLGPTPLSNCPVGEKDADVFL

SEQ ID NO: 2096 - protein, 1062 aa, Homo sapiens
MPTTASCKTISLLKLLYSVSLQNYSPMMAQKSQGSDNLQEGQEKSKREILKCTKSAWAPLDEWLPPDPEEESQSLTIPMLEDSKQESIQQWLDSGFFVSANENFQQVIDRTVSLYEQGMVQMTVKDYMRSLHQFSETPILSRGTSFNSCYSTASVPQSIPEWLEFWEIDPVEILLDLGFGADEPDICMQIPARFLGCGSAARGINIRVFLEAQKQRMDIENPNLYGRFRQLEILDHVTNAFSSLLSDVSILPNRAEEKAGGESVQRTSVSAAKEHRRRMGKLLRRASKQNIRRDCNPEVSESFKVKDEVFVPFTKPWDCGAELAATSINHKQNHLSLSVEHQSLQACDDLLPYPPHGLLSKQWPCSSMPAKQAPPSCVSEGSVKGRTQKENLFQTNKLKSLSHLAGKGPDSFEMEEVQSFEEETGNPLDMTSGTVGARVDRANSCQSDSSGFLEEPLEPLPLQMPSLPNSQSPAENGGRKPRDQSHSLVSSQDCQLESDGPDSKSRASMSFSSQEANALEQRASVSVMEEEFLLEAMEGPPELYIPDMACAKTTTRGECPRKDSHLWQLLPMPHAEYEVTRPTATSKYDHPLGFMVTHVTEMQDSFVRPEGAGKVQSHHNESQRSPGNDHTQDKFLHVDSEAPREEESSGFCPHTNHSLLVPESSSQCIPKHSEITPYATDLAQTSEKLIPHLHKLPGDPAQVKSRSGTLGQILPGTEAEMENLPLNTGSSRSVMTQMSSSLVSAAQRAVALGTGPRGTSLECTVCDPVTATETRLGTKARQLNDASIQTSALSNKTLTHGPQPLTKSVSLDSGFSSICPMGTCHAIPAHCCICCHHHPHCHGERQSPGPEPSVCRHCLCSLTGHQEAQFMTTLKALQDTTVRELCSCTVHEMEAMKTICQSFREYLEEIEQHLMGQQALFSRDMSEEEREEAEQLQTLREALRQQVAELEFQLGDRAQQIREGILLQLEVLTAEPPEHYSNLHQYNWIEESNGQTSCSKIHPGMAPRTVFPPDDGQEAPCSGELLSAELDPFFFSSKANNSAKDEKIKSKDFLKTQDSGLL

SEQ ID NO: 2097 - protein, 1054 aa, Homo sapiens
MSVSLQNYSPMMAQKSQGSDNLQEGQEKSKREILKCTKSAWAPLDEWLPPDPEEESQSLTIPMLEDSKQESIQQWLDSGFFVSANENFQQVIDRTVSLYEQGMVQMTVKDYMRSLHQFSETPILSRGTSFNSCYSTASVPQSIPEWLEFWEIDPVEILLDLGFGADEPDICMQIPARFLGCGSAARGINIRVFLEAQKQRMDIENPNLYGRFRQLEILDHVTNAFSSLLSDVSILPNRAEEKAGGESVQRTSVSAAKEHRRRMGKLLRRASKQNIRRDCNPEVSESFKVKDEVFVPFTKPWDCGAELAATSINHKQNHLSLSVEHQSLQACDDLLPYPPHGLLSKQWPCSSMPAKQAPPSCVSEGSVKGRTQKENLFQTNKLKSLSHLAGKGPDSFEMEEVQSFEEETGNPLDMTSGTVGARVDRANSCQSDSSGFLEEPLEPLPLQMPSLPNSQSPAENGGRKPRDQSHSLVSSQDCQLESDGPDSKSRASMSFSSQEANALEQRASVSVMEEEFLLEAMEGPPELYIPDMACAKTTTRGECPRKDSHLWQLLPMPHAEYEVTRPTATSKYDHPLGFMVTHVTEMQDSFVRPEGAGKVQSHHNESQRSPGNDHTQDKFLHVDSEAPREEESSGFCPHTNHSLLVPESSSQCIPKHSEITPYATDLAQTSEKLIPHLHKLPGDPAQVKSRSGTLGQILPGTEAEMENLPLNTGSSRSVMTQMSSSLVSAAQRAVALGTGPRGTSLECTVCDPVTATETRLGTKARQLNDASIQTSALSNKTLTHGPQPLTKSVSLDSGFSSICPMGTCHAIPAHCCICCHHHPHCHGERQSPGPEPSVCRHCLCSLTGHQEAQFMTTLKALQDTTVRELCSCTVHEMEAMKTICQSFREYLEEIEQHLMGQQALFSRDMSEEEREEAEQLQTLREALRQQVAELEFQLGDRAQQIREGILLQLEVLTAEPPEHYSNLHQYNWIEESNGQTSCSKIHPGMAPRTVFPPDDGQEAPCSGGTQLAAFTPPTLENSTRMSPSSSAWAKLGPTPLSNCPVGEKDADVFL

SEQ ID NO: 2098 - protein, 952 aa, Homo sapiens
MVQMTVKDYMRSLHQFSETPILSRGTSFNSCYSTASVPQSIPEWLEFWEIDPVEILLDLGFGADEPDICMQIPARFLGCGSAARGINIRVFLEAQKQRMDIENPNLYGRFRQLEILDHVTNAFSSLLSDVSILPNRAEEKAGGESVQRTSVSAAKEHRRRMGKLLRRASKQNIRRDCNPEVSESFKVKDEVFVPFTKPWDCGAELAATSINHKQNHLSLSVEHQSLQACDDLLPYPPHGLLSKQWPCSSMPAKQAPPSCVSEGSVKGRTQKENLFQTNKLKSLSHLAGKGPDSFEMEEVQSFEEETGNPLDMTSGTVGARVDRANSCQSDSSGFLEEPLEPLPLQMPSLPNSQSPAENGGRKPRDQSHSLVSSQDCQLESDGPDSKSRASMSFSSQEANALEQRASVSVMEEEFLLEAMEGPPELYIPDMACAKTTTRGECPRKDSHLWQLLPMPHAEYEVTRPTATSKYDHPLGFMVTHVTEMQDSFVRPEGAGKVQSHHNESQRSPGNDHTQDKFLHVDSEAPREEESSGFCPHTNHSLLVPESSSQCIPKHSEITPYATDLAQTSEKLIPHLHKLPGDPAQVKSRSGTLGQILPGTEAEMENLPLNTGSSRSVMTQMSSSLVSAAQRAVALGTGPRGTSLECTVCDPVTATETRLGTKARQLNDASIQTSALSNKTLTHGPQPLTKSVSLDSGFSSICPMGTCHAIPAHCCICCHHHPHCHGERQSPGPEPSVCRHCLCSLTGHQEAQFMTTLKALQDTTVRELCSCTVHEMEAMKTICQSFREYLEEIEQHLMGQQALFSRDMSEEEREEAEQLQTLREALRQQVAELEFQLGDRAQQIREGILLQLEVLTAEPPEHYSNLHQYNWIEESNGQTSCSKIHPGMAPRTVFPPDDGQEAPCSGGTQLAAFTPPTLENSTRMSPSSSAWAKLGPTPLSNCPVGEKDADVFL

SEQ ID NO: 2099 - protein, 116 aa, Homo sapiens
MDLLQFLAFLFVLLLSGMGATGTLRTSLDPSLEIYKKMFEVKRREQLLALKNLAQLNDIHQQYKILDVMLKGLFKFIPSTDPFQKALREEEKRRKKEEKRKEIRKGPRISRSQSEL

SEQ ID NO: 2100 - protein, 229 aa, Homo sapiens
MDLLQFLAFLFVLLLSGMGATGTLRTSLDPSLEIYKKMFEVKRREQLLALKNLAQLNDIHQQYKILDVMLKGLFKVLEDSRTVLTAADVLPDGPFPQDEKLKDAFSHVVENTAFFGDVVLRFPRIVHYYFDHNSNWNLLIRWGISFCNQTGVFNQGPHSPILSLMAQELGISEKDSNFQNPFKIDRTEFIPSTDPFQKALREEEKRRKKEEKRKEIRKGPRISRSQSEL

SEQ ID NO: 2101 - protein, 141 aa, Homo sapiens
MEEEAMNGDRTESDWQGLVSEYLVCKRKLESKKEALLILSKELDTCQQERDQYKLMANQLRERHQSLKKKYRELIDGDPSLPPEKRKQANLAQLLRDSQDRNKHLGEEIKELQQRLGEVQGDNKGRLRSKKKMKVVPLLRR

SEQ ID NO: 2102 - protein, 529 aa, Homo sapiens
MEEEAMNGDRTESDWQGLVSEYLVCKRKLESKKEALLILSKELDTCQQERDQYKLMANQLRERHQSLKKKYRELIDGDPSLPPEKRKQANLAQLLRDSQDRNKHLGEEIKELQQRLGEVQGDNKLLRMTIAKQRLGDEAIGVRHFAAHEREDLVQQLERAKEQIESLEHDLQASVDELQDVKEERSSYQDKVERLNQELNHILSGHENRIIDVDALCMENRYLQERLKQLHEEVNLLKSNIAKYKNALERRKNSKGQGKSSSSALTGVLSAKQVQDLLSEDHGCSLPATPQSISDLKSLATALLETIHEKNMVIQHQRQTNKILGNRVAELEKKLRTLEVSGLWSLPGGKDTILFSDPTLPSGQRSRSPLLKFVEQPTENKADPKDGEAQKQEEDESCAAAEALTAPEDAGRPAVNSPANQSRGNQCKLFHPSLPQLPSEEEVNSLGREIIKLTKEQAAAELEEVRRESPIEGQRSETGPAPPGLAIQGELPKSHLDSFEASRPAAKASTPEDGKGIPEGGGMRSTVKT

SEQ ID NO: 2103 - protein, 540 aa, Homo sapiens
MEEEAMNGDRTESDWQGLVSEYLVCKRKLESKKEALLILSKELDTCQQERDQYKLMANQLRERHQSLKKKYRELIDGDPSLPPEKRKQANLAQLLRDSQDRNKHLGEEIKELQQRLGEVQGDNKLLRMTIAKQRLGDEAIGVRHFAAHEREDLVQQLERAKEQIESLEHDLQASVDELQDVKEERSSYQDKVERLNQELNHILSGHENRIIDVDALCMENRYLQERLKQLHEEVNLLKSNIAKYKNALERRKNSKGQGKSSSSALTGVLSAKQVQDLLSEDHGCSLPATPQSISDLKSLATALLETIHEKNMVIQHQRQTNKILGNRVAELEKKLRTLEVSGLWSLPGLSYNVSVGFGRGKDTILFSDPTLPSGQRSRSPLLKFVEQPTENKADPKDGEAQKQEEDESCAAAEALTAPEDAGRPAVNSPANQSRGNQCKLFHPSLPQLPSEEEVNSLGREIIKLTKEQAAAELEEVRRESPIEGQRSETGPAPPGLAIQGELPKSHLDSFEASRPAAKASTPEDGKGIPEGGGMRSTVKT

SEQ ID NO: 2104 - protein, 529 aa, Homo sapiens
MVVIVVVIIIIIARAATWDSEYLVCKRKLESKKEALLILSKELDTCQQERDQYKLMANQLRERHQSLKKKYRELIDGDPSLPPEKRKQANLAQLLRDSQDRNKHLGEEIKELQQRLGEVQGDNKLLRMTIAKQRLGDEAIGVRHFAAHEREDLVQQLERAKEQIESLEHDLQASVDELQDVKEERSSYQDKVERLNQELNHILSGHENRIIDVDALCMENRYLQERLKQLHEEVNLLKSNIAKYKNALERRKNSKGQGKSSSSALTGVLSAKQVQDLLSEDHGCSLPATPQSISDLKSLATALLETIHEKNMVIQHQRQTNKILGNRVAELEKKLRTLEVSGLWSLPGGKDTILFSDPTLPSGQRSRSPLLKFVEQPTENKADPKDGEAQKQEEDESCAAAEALTAPEDAGRPAVNSPANQSRGNQCKLFHPSLPQLPSEEEVNSLGREIIKLTKEQAAAELEEVRRESPIEGQRSETGPAPPGLAIQGELPKSHLDSFEASRPAAKASTPEDGKGIPEGGGMRSTVKT

SEQ ID NO: 2105 - protein, 145 aa, Homo sapiens
MDENYNLLPHGVNFQDAIFPDTQENRRMFSSLFQFSNCSQGQQLATFSSDWEIQEDSRLMCSSVQKALFEEEDHVKKLQQKVATLEKRNRQLRERVKKVKRSLRQARKKGRHLELANQKLSEKLAAGALPHINARGPVRPPYLRG

SEQ ID NO: 2106 - protein, 270 aa, Homo sapiens
MLRQLLLAALCLAGPPAPARACQLPSEWRPLSEGCRAELAETIVYARVLALHPEAPGLYNHLPWQYHAGQGGLFYSAEVEMLCDQAWGSMLEVPAGSRLNLTGLGYFSCHSHTVVQDYSYFFFLRMDENYNLLPHGVNFQDAIFPDTQENRRMFSSLFQFSNCSQGQQLATFSSDWEIQEDSRLMCSSVQKALFEEEDHVKKLQQKVATLEKRNRQLRERVKKVKRSLRQARKKGRHLELANQKLSEKLAAGALPHINARGPVRPPYLRG

SEQ ID NO: 2107 - protein, 212 aa, Homo sapiens
MALRSMGQFSVFFFFFFWAQKKIASLSHSGFLHWFLLFEAVSSNGVLLFFSRFRWRRRLLVISAPNDEDWAYSQQLSALSGQACNFGLRHITILKLLGVGEEVGGVLELFPINGSSVVEREDVPAHLVKDIRNYFQVSPEYFSMLLVGKDGNVKSWYPSPMWSMVIVYDLIDSMQLRRQEMAIQQSLGMRCPEDEYAGYGYHSYHQGYQDGY

SEQ ID NO: 2108 - protein, 950 aa, Homo sapiens
MTWRMGPRFTMLLAMWLVCGSEPHPHATIRGSHGGRKVPLVSPDSSRPARFLRHTGRSRGIERSTLEEPNLQPLQRRRSVPVLRLARPTEPPARSDINGAAVRPEQRPAARGSPREMIRDEGSSARSRMLRFPSGSSSPNILASFAGKNRVWVISAPHASEGYYRLMMSLLKDDVYCELAERHIQQIVLFHQAGEEGGKVRRITSEGQILEQPLDPSLIPKLMSFLKLEKGKFGMVLLKKTLQVEERYPYPVRLEAMYEVIDQGPIRRIEKIRQKGFVQKCKASGVEGQVVAEGNDGGGGAGRPSLGSEKKKEDPRRAQVPPTRESRVKVLRKLAATAPALPQPPSTPRATTLPPAPATTVTRSTSRAVTVAARPMTTTAFPTTQRPWTPSPSHRPPTTTEVITARRPSVSENLYPPSRKDQHRERPQTTRRPSKATSLESFTNAPPTTISEPSTRAAGPGRFRDNRMDRREHGHRDPNVVPGPPKPAKEKPPKKKAQDKILSNEYEEKYDLSRPTASQLEDELQVGNVPLKKAKESKKHEKLEKPEKEKKKKMKNENADKLLKSEKQMKKSEKKSKQEKEKSKKKKGGKTEQDGYQKPTNKHFTQSPKKSVADLLGSFEGKRRLLLITAPKAENNMYVQQRDEYLESFCKMATRKISVITIFGPVNNSTMKIDHFQLDNEKPMRVVDDEDLVDQRLISELRKEYGMTYNDFFMVLTDVDLRVKQYYEVPITMKSVFDLIDTFQSRIKDMEKQKKEGIVCKEDKKQSLENFLSRFRWRRRLLVISAPNDEDWAYSQQLSALSGQACNFGLRHITILKLLGVGEEVGGVLELFPINGSSVVEREDVPAHLVKDIRNYFQVSPEYFSMLLVGKDGNVKSWYPSPMWSMVIVYDLIDSMQLRRQEMAIQQSLGMRCPEDEYAGYGYHSYHQGYQDGYQDDYRHHESYHHGYPY

SEQ ID NO: 2109 - protein, 950 aa, Homo sapiens; identical to SEQ ID NO: 2108

SEQ ID NO: 2110 - protein, 261 aa, Homo sapiens
  SITE 1: note = misc_feature - Xaa can be any naturally occurring amino acid
XFTQSPKKSVADLLGSFEGKRRLLLITAPKAENNMYVQQRDEYLESFCKMATRKISVITIFGPVNNSTMKIDHFQLDNEKPMRVVDDEDLVDQRLISELRKEYGMTYNDFFMVLTDVDLRVKQYYEVPITMKSVFDLIDTFQSRIKDMEKQKKEGIVCKEDKKQSLENFLSRFRWRRRLLVISAPNDEDWAYSQQLSALSGQACNFGSSVVEREDVPAHLVKDIRNYFQVSPEYFSMLLVGKDGNVKSWYPSPMWSMVIVY

SEQ ID NO: 2111 - protein, 553 aa, Homo sapiens
MSKAAGGAAAAAAAAESCSPAPAGSSAAPPAPVEDLSKVSDEELLQWSKEELIRSLRRAEAEKVSAMLDHSNLIREVNRRLQLHLGEIRGLKDINQKLQEDNQELRDLCCFLDDDRQKGKRVSREWQRLGRYTAGVMHKEVALYLQKLKDLEVKQEEVVKENMELKELCVLLDEEKGAGCAGSRCSIDSQASLCQLTASTAPYVRDVGDGSSTSSTGSTDSPDHHKHHASSGSPEHLQKPRSEGSPEHSKHRSASPEHPQKPRACGTPDRPKALKGPSPEHHKPLCKGSPEQQRHPHPGSSPETLPKHVLSGSPEHFQKHRSGSSPEHARHSGGSPEHLQKHALGGSLEHLPRARGTSPEHLKQHYGGSPDHKHGGGSGGSGGSGGGSREGTLRRQAQEDGSPHHRNVYSGMNESTLSYVRQLEARVRQLEEENRMLPQASQNRRQPPTRNSSNMEKGWGSRARRVLQWWQGCRGIGRCLPTLPGSFRLSSGADGSNSSPNSAASFSGHATPSQQPEPVVHSLKVVWRKLGDAAGSCPGIRQHLSGNQYKGPM

SEQ ID NO: 2112 - protein, 712 aa, Homo sapiens
MAGVAAHRAHPPFTAHMKNRGLREELEKAVVRGKELGDRLEHLQRELEQAALERQEFLREKESQHQRYQGLEQRLEAELQAAATSKEEALMELKTRALQLEEELFQLRQGPAGLGPKKRAEPQLVETQNVRLIEVERSNAMLVAEKAALQGQLQHLEGQLGSLQGRAQELLLQSQRAQEHSSRLQAEKSVLEIQGQELHRKLEVLEEEVRAARQSQEETRGQQQALLRDHKALAQLQRRQEAELEGLLVRHRDLKANMRALELAHRELQGRHEQLQAQRASVEAQEVALLAERERLMQDGHRQRGLEEELRRLQSEHDRAQMLLAELSRERGELQGERGELRGRLARLELERAQLEMQSQQLRESNQQLDLSACRLTTQCELLTQLRSAQEEENRQLLAEVQALSRENRELLERSLESRDHLHREQREYLDQLNALRREKQKLVEKIMDQYRVLEPVPLPRTKKGSWLADKGPLPRHPCAGPRAPSACGMRPWQAGSGGNSAQGSRWGEALSHSALGTPLGNDSDSAIQAPWGRPSPTAKDLVWDGRTPLRPCRNTKQMPTERALRYRNRRNVPSPHPSASDTVGTAGLGVQPSRHWSVSGGPRQPKSSGSQGPQGESLDKEAWALRSSTVSAGARRWSWDECVDRGDGWPPRAAPGWSSGSSRWLPLRQRSLGDPPAEGGWQELAREPPALSRWEAESQCWGTVAWADLEP

SEQ ID NO: 2113 - protein, 1476 aa, Homo sapiens
MEGGKGPRLRDFLSGSLATWALGLAGLVGEAEDSEGEEEEEEEEPPLWLEKRFLRLSDGALLLRVLGIIAPSSRGGPRMLRGLDGPAAWRVWNLNHLWGRLRDFYQEELQLLILSPPPDLQTLGFDPLSEEAVEQLEGVLRLLLGASVQCEHRELFIRHIQGLSLEVQSELAAAIQEVTQPGAGVVLALSGPDPGELAPAELEMLSRSLMGTLSKLARERDLGAQRLAELLLEREPLCLRPEAPSRAPAEGPSHHLALQLANAKAQLRRLRQELEEKAELLLDSQAEVQGLEAEIRRLRQEAQALSGQAKRAELYREEAEALRERAGRLPRLQEELRRCRERLQAAEAYKSQLEEERVLSGVLEASKALLEEQLEAARERCARLHETQRENLLLRTRLGEAHAELDSLRHQVDQLAEENVELELELQRSLEPPPGSPGEAPLAGAAPSLQDEVREAEAGRLRTLERENRELRGLLQVLQGQPGGQHPLLEAPREDPVLPVLEEAPQTPVAFDHSPQGLVQKARDGGPQALDLAPPALDSVLEASAECPQAPDSDPQEAESPLQAAAMDPQASDWSPQESGSPVETQESPEKAGRRSSLQSPASVAPPQGPGTKIQAPQLLGGETEGREAPQGELVPEAWGLRQEGPEHKPGPSEPSSVQLEEQEGPNQGLDLATGQAEAREHDQRLEGTVRDPAWQKPQQKSEGALEVQVWEGPIPGESLASGVAEQEALREEVAQLRRKAEALGDELEAQARKLEAQNTEAARLSKELAQARRAEAEAHREAEAQAWEQARLREAVEAAGQELESASQEREALVEALAAAGRERRQWEREGSRLRAQSEAAEERMQVLESEGRQHLEEAERERREKEALQAELEKAVVRGKELGDRLEHLQRELEQAALERQEFLREKESQHQRYQGLEQRLEAELQAAATSKEEALMELKTRALQLEEELFQLRQGPAGLGPKKRAEPQLVETQNVRLIEVERSNAMLVAEKAALQGQLQHLEGQLGSLQGRAQELLLQSQRAQEHSSRLQAEKSVLEIQGQELHRKLEVLEEEVRAARQSQEETRGQQQALLRDHKALAQLQRRQEAELEGLLVRHRDLKANMRALELAHRELQGRHEQLQAQRASVEAQEVALLAERERLMQDGHRQRGLEEELRRLQSEHDRAQMLLAELSRERGELQGERGELRGRLARLELERAQLEMQSQQLRESNQQLDLSACRLTTQCELLTQLRSAQEEENRQLLAEVQALSRENRELLERSLESRDHLHREQREYLDQLNALRREKQKLVEKIMDQYRVLEPVPLPRTKKGSWLADKVKRLMRPRREGGPPGGLRLGADGAGSTESLGGPPETELPEGREADGTGSPSPAPMRRAQSSLCLRDETLAGGQRRKLSSRFPVGRSSESFSPGDTPRQRFRQRHPGPLGAPVSHSKGPGVGWENSAETLQEHETDANREGPEVQEPEKRPLTPSLSQ

SEQ ID NO: 2114 - protein, 139 aa, Homo sapiens
MPCAARSRSSWRRSWTNTACWSLCPCPGPRSPSPAPMRRAQSSLCLRDETLAGGQRRKLSSRFPVGRSSESFSPGDTPRQRFRQRHPGPLGAPVSHSKGPGVGWENSAETLQEHETDANREGPEVQEPEKRPLTPSLSQ

SEQ ID NO: 2115 - protein, 122 aa, Homo sapiens
EDEEEEKEERKRGPMETFEDLWQRHLENGGDLQKRVAEKASDKETAQFQAEEKGVRVLGGDRSLWQGAERGGGERREDLPHHHHHHHQPEAEPRQEKEEASEREEKEVEQLEHLRDELKKDC

SEQ ID NO: 2116 - protein, 266 aa, Homo sapiens
MPPRGPASELLLLRLLLLGAATAAPLAPRPSKEELTRCLAEVVTEVLTVGQVQRGPCTALLHKELCGTEPHGCASTEEKGLLLGDFKKQEAGKMRSSQEVRDEEEEEVAERTHKSEVQEQAIRMQGHRQLHQEEDEEEEKEERKRGPMETFEDLWQRHLENGGDLQKRVAEKASDKETAQFQAEEKGVRVLGGDRSLWQGAERGGGERREDLPHHHHHHHQPEAEPRQEKEEASEREEKEVEQLEHLRDELKKVTETLGEQLRREG

SEQ ID NO: 2117 - protein, 115 aa, Homo sapiens
MNSGVCLCVLMAVLAAGALTQPVPPADPAGSGLQRAEEAPRRQLRVSQRTDGESRAHLGALLARYIQQARKAPSGRMSIVKNLQNLDPSHRISDRDYMGWMDFGRRSAEEYEYPS

SEQ ID NO: 2118 - protein, 115 aa, Homo sapiens; identical to SEQ ID NO: 2117

SEQ ID NO: 2119 - protein, 115 aa, Homo sapiens; identical to SEQ ID NO: 2117

SEQ ID NO: 2120 - protein, 96 aa, Homo sapiens
MQIITTALVCLLLAGMWPEDVDSKSMQVPFSRCCFSFAEQEIPLRAILCYRNTSSICSNEGLIFKLKRGKEACALDTVGWVQRHRKMLRHCPSKRK

SEQ ID NO: 2121 - protein, 97 aa, Homo sapiens
MKVSAALLWLLLIAAAFSPQGLAGPASVPTTCCFNLANRKIPLQRLESYRRITSGKCPQKAVIFKTKLAKDICADPKKKWVQDSMKYLDQKSPTPKP

SEQ ID NO: 2122 - protein, 98 aa, Homo sapiens
MKVSAVLLCLLLMTAAFNPQGLAQPDALNVPSTCCFTFSSKKISLQRLKSYVITTSRCPQKAVIFRTKLGKEICADPKEKWVQNYMKHLGRKAHTLKT

SEQ ID NO: 2123 - protein, 63 aa, Homo sapiens
  SITE 1: note = misc_feature - Xaa can be any naturally occurring amino acid
XVPSTCCFTFSSKKISLQRLKSYVITTSSFRTKLGKEICADPKEKWVQNYMKHLGRKAHTLKT

SEQ ID NO: 2124 - protein, 109 aa, Homo sapiens
MKISVAAIPFFLLITIALGTKTESSSQTGGKPKVVKIQLKLVGGPYHPSECCFTYTTYKIPRQRIMDYYETNSQCSKPGIVFITKRGHSVCTNPSDKWVQDYIKDMKEN

SEQ ID NO: 2125 - protein, 65 aa, Homo sapiens
MKISVAAIPFFLLITIALGTKTESSSRGPYHPSECCFTYTTYKIPRQRIMDYYETNSQCSKPGIV

SEQ ID NO: 2126 - protein, 93 aa, Homo sapiens
MKISVAAIPFFLLITIALGTKTESSSRGPYHPSECCFTYTTYKIPRQRIMDYYETNSQCSKPGIVFITKRGHSVCTNPSDKWVQDYIKDMKEN

SEQ ID NO: 2127 - protein, 115 aa, Homo sapiens
MRKAYSPLQVLRGCLLLPSLLHALSLQEQPMVWPLTRGPSSASDALSSGGPYHPSECCFTYTTYKIPRQRIMDYYETNSQCSKPGIVFITKRGHSVCTNPSDKWVQDYIKDMKEN

SEQ ID NO: 2128 - protein, 113 aa, Homo sapiens
MKVSVAALSCLMLVAVLGSQAQFTNDAETELMMSKLPLENPVVLNSFHFAADCCTSYISQSIPCSLMKSYFETSSECSKPGVIFLTKKGRQVCAKPSGPGVQDCMKKLKPYSI

SEQ ID NO: 2129 - protein, 61 aa, Homo sapiens
  SITE 1: note = misc_feature - Xaa can be any naturally occurring amino acid
XCTSYISQSIPCSLMKSYFETSSECSKPGVIFLTKKGRQVCAKPSGPGVQDCMKKLKPYSI

SEQ ID NO: 2130 - protein, 120 aa, Homo sapiens
MKVSEAALSLLVLILIITSASRSQPKVPEWVNTPSTCCLKYYEKVLPRRLVVGYRKALNCHLPAIIFVTKRNREVCTNPNDDWVQEYIKDPNLPLLPTRNLSTVKIITAKNGQPQLLNSQ

SEQ ID NO: 2131 - protein, 53 aa, Homo sapiens
MKVSEAALSLLVLILIITSASRSQPSWSAVSRSRLTTTSASRVQVILLPQPPE

SEQ ID NO: 2132 - protein, 95 aa, Homo sapiens
  SITE 1: note = misc_feature - Xaa can be any naturally occurring amino acid
XVPEWVNTPSTCCLKYYEKVLPRRLVVGYRKALNCHLPAIIFVTKRNREVCTNPNDDWVQEYIKDPNLPLLPTRNLSTVKIITAKNGQPQLLNSQ

SEQ ID NO: 2133 - protein, 94 aa, Homo sapiens
MAPLKMLALVTLLLGASLQHIHAARGTNVGRECCLEYFKGAIPLRKLKTWYQTSEDCSRDAIVFVTVQGRAICSDPNNKRVKNAVKYLQSLERS

SEQ ID NO: 2134 - protein, 94 aa, Homo sapiens; identical to SEQ ID NO: 2133

SEQ ID NO: 2135 - protein, 89 aa, Homo sapiens
MKGLAAALLVLVCTMALCSCAQVGTNKELCCLVYTSWQIPQKFIVDYSETSPQCPKPGVILLTKRGRQICADPNKKWVQKYISDLKLNA

SEQ ID NO: 2136 - protein, 104 aa, Homo sapiens
MALLLALSLLVLWTSPAPTLSGTNDAEDCCLSVTQKPIPGYIVRNFHYLLIKDGCRVPAVVFTTLRGRQLCAPPDQPWVERIIQRLQRTSAKASLALPGPVSSL

SEQ ID NO: 2137 - protein, 98 aa, Homo sapiens
MALLLALSLLVLWTSPAPTLSGTNDAEDCCLSVTQKPIPGYIVRNFHYLLIKDGCRVPAVVFTTLRGRQLCAPPDQPWVERIIQRLQRTSAKMKRRSS

SEQ ID NO: 2138 - protein, 99 aa, Homo sapiens
MKVSAALLCLLLIAATFIPQGLAQPDAINAPVTCCYNFTNRKISVQRLASYRRITSSKCPKEAVIFKTIVAKEICADPKQKWVQDSMDHLDKQTQTPKT

SEQ ID NO: 2139 - protein, 65 aa, Homo sapiens
MKVSAALLCLLLIAATFIPQGLAQPDAINAPVTCCYNFTNRKISVQRLASYRRITSSKCPKEAVM

SEQ ID NO: 2140 - protein, 25 aa, Homo sapiens
MCCTKSLLLAALMSVLLLHLCGESE

SEQ ID NO: 2141 - protein, 96 aa, Homo sapiens
MCCTKSLLLAALMSVLLLHLCGESEAASNFDCCLGYTDRILHPKFIVGFTRQLANEGCDINAIIFHTKKKLSVCANPKQTWVKYIVRLLSKKVKNM

SEQ ID NO: 2142 - protein, 95 aa, Homo sapiens
MCCTKSLLLAALMSVLLLHLCGESEASNFDCCLGYTDRILHPKFIVGFTRQLANEGCDINAIIFHTKKKLSVCANPKQTWVKYIVRLLSKKVKNM

SEQ ID NO: 2143 - protein, 124 aa, Homo sapiens
MAQSLALSLLILVLAFGIPRTQGSDGGAQDCCLKYSQRKIPAKVVRSYRKQEPSLGCSIPAILFLPRKRSQAELCADPKELWVQQLMQHLDKTPSPQKPAQGCRKDRGASKTGKKGKGSKGCKR

SEQ ID NO: 2144 - protein, 134 aa, Homo sapiens
MAQSLALSLLILVLAFGIPRTQGSDGGAQDCCLKYSQRKIPAKVVRSYRKQEPSLGCSIPAILFLPRKRSQAELCADPKELWVQQLMQHLDKTPSPQKPAQGCRKDRGASKTGKKGKGSKGCKRTERSQTPKGP

SEQ ID NO: 2145 - protein, 93 aa, Homo sapiens
MDRLQTALLVVLVLLAVALQATEAGPYGANMEDSVCCRDYVRYRLPLRVVKHFYWTSDSCPRPGVVLLTFRDKEICADPRVPWVKMILNKLSQ

SEQ ID NO: 2146 - protein, 13 aa, Homo sapiens
FETNSECSKPGVM

SEQ ID NO: 2147 - protein, 137 aa, Homo sapiens
MKVSVAALSCLMLVTALGSQARVTKDAETEFMMSKLPLENPVLLDMLWRRKIGPQMTLSHAAGFHATSADCCISYTPRSIPCSLLESYFETNSECSKPGVIFLTKKGRRFCANPSDKQVQVCMRMLKLDTRIKTRKN

SEQ ID NO: 2148 - protein, 120 aa, Homo sapiens
MKVSVAALSCLMLVTALGSQARVTKDAETEFMMSKLPLENPVLLDRFHATSADCCISYTPRSIPCSLLESYFETNSECSKPGVIFLTKKGRRFCANPSDKQVQVCMRMLKLDTRIKTRKN

SEQ ID NO: 2149 - protein, 119 aa, Homo sapiens
MAGLMTIVTSLLFLGVCAHHIIPTGSVVIPSPCCMFFVSKRIPENRVVSYQLSSRSTCLKAGVIFTTKKGQQFCGDPKQEWVQRYMKNLDAKQKKASPRARAVAVKGPVQRYPGNQTTC

SEQ ID NO: 2150 - protein, 119 aa, Homo sapiens; identical to SEQ ID NO: 2149

SEQ ID NO: 2151 - protein, 150 aa, Homo sapiens
MNLWLLACLVAGFLGAWAPAVHTQGVFEDCCLAYHYPIGWAVLRRAWTYRIQEVSGSCNLPAAIFYLPKRHRKVCGNPKSREVQRAMKLLDARNKVFAKLHHNTQTFQAGPHAVKKLSSGNSKLSSSKFSNPISSSKRNVSLLISANSGK

SEQ ID NO: 2152 - protein, 150 aa, Homo sapiens
MNLWLLACLVAGFLGAWAPAVHTQGVFEDCCLAYHYPIGWAVLRRAWTYRIQEVSGSCNLPAAIFYLPKRHRKVCGNPKSREVQRAMKLLDARNKVFAKLHHNTQTFQAGPHAVKKLSSGNSKLSSSKFSNPISSSKRNVSLLISANSGL

SEQ ID NO: 2153 - protein, 149 aa, Homo sapiens
MNLWLLACLVAGFLGAWAPAVHTQGVFEDCCLAYHYPIGWAVLRRAWTYRIQEVSGSCNLPAAIFYLPKRHRKVCGNPKSREVQRAMKLLDARNKVFAKLHHNTQTFQGPHAVKKLSSGNSKLSSSKFSNPISSSKRNVSLLISANSGL

SEQ ID NO: 2154 - protein, 84 aa, Homo sapiens
MNLWLLACLVAGFLGAWAPAVHTQGVFEDCCLAYHYPIGWAVLRRAWTYRIQEVSGSCNLPAAIRPSCCKEVEFWKLQVIIVQV

SEQ ID NO: 2155 - protein, 94 aa, Homo sapiens
MMGLSLASAVLLASLLSLHLGTATRGSDISKTCCFQYSHKPLPWTWVRSYEFTSNSCSQRAVIFTTKRGKKVCTHPRKKWVQKYISLLKTPKQL

SEQ ID NO: 2156 - protein, 94 aa, Homo sapiens; identical to SEQ ID NO: 2155

SEQ ID NO: 2157 - protein, 112 aa, Homo sapiens
MKGPPTFCSLLLLSLLLSPDPTAAFLLPPSTACCTQLYRKPLSDKLLRKVIQVELQEADGDCHLQAFVLHLAQRSICIHPQNPSLSQWFEHQERKLHGTLPKLNFGMLRKMG

SEQ ID NO: 2158 - protein, 80 aa, Homo sapiens
MCRIQRADGDCDLAAVILHVKRRRICVSPHNHTVKQWMKVQAAKKNGKGNVCHRKKHHGKRNSNRAHQGKHETYGHKTPY

SEQ ID NO: 2159 - protein, 127 aa, Homo sapiens
MQQRGLAIVALAVCAALHASEAILPIASSCCTEVSHHISRRLLERVNMCRIQRADGDCDLAAVILHVKRRRICVSPHNHTVKQWMKVQAAKKNGKGNVCHRKKHHGKRNSNRAHQGKHETYGHKTPY

SEQ ID NO: 2160 - protein, 127 aa, Homo sapiens; identical to SEQ ID NO: 2159

SEQ ID NO: 2161 - protein, 92 aa, Homo sapiens
MQVSTAALAVLLCTMALCNQFSASLAADTPTACCFSYTSRQIPQNFIADYFETSSQCSKPGVIFLTKRSRQVCADPSEEWVQKYVSDLELSA

SEQ ID NO: 2162 - protein, 93 aa, Homo sapiens
MQVSTAALAVLLCTMALCNQVLSAPLAADTPTACCFSYTSRQIPQNFIADYFETSSQCSKPSVIFLTKRGRQVCADPSEEWVQKYVSDLELSA

SEQ ID NO: 2163 - protein, 92 aa, Homo sapiens
MKLCVTVLSLLMLVAAFCSPALSAPMGSDPPTACCFSYTARKLPRNFVVDYYETSSLCSQPAVVFQTKRSKQVCADPSESWVQEYVYDLELN

SEQ ID NO: 2164 - protein, 52 aa, Homo sapiens
MKLCVTVLSLLMLVAAFCSPALSAPNSKPKEASKSVLIPVNPGSRSTCMTWN

SEQ ID NO: 2165 - protein, 47 aa, Homo sapiens
MKLCVTVLSLLVLVAAFCSLALSAPKASKSALTPVSPGSRSTCMTWN

SEQ ID NO: 2166 - protein, 64 aa, Homo sapiens
MKLCVTVLSLLVLVAAFCSLALSAPMGSDPPTACCFSYTARKLPRNFVVDYYETSSLCSQPAVV

SEQ ID NO: 2167 - protein, 64 aa, Homo sapiens; identical to SEQ ID NO: 2166

SEQ ID NO: 2168 - protein, 96 aa, Homo sapiens
MKLCVTVLSLLVLVAAFCSLALSAPMGSDPPTACCFSYTARKLPRNFVVDYYETSSLCSQPAVVAAPGRIPSTRAAPHGPWSGRGRCLPQARDKAR

SEQ ID NO: 2169 - protein, 86 aa, Homo sapiens
MKLCVTVLSLLVLVAAFCSLALSAPMGSDPPTACCFSYTARKLPRNFVVDYYETSSLCSQPAVVAAPHGPWSGRGRCLPQARDKAR

SEQ ID NO: 2170 - protein, 103 aa, Homo sapiens
MKLCVTVLSLLVLVAAFCSLALSAPMGSDPPTACCFSYTARKLPRNFVVDYYETSSLCSQPAVVEWKLQGVCFQCCSGKDPIHQSCPTWTMVRQRKMPTTGKG

SEQ ID NO: 2171 - protein, 92 aa, Homo sapiens
MKLCVTVLSLLVLVAAFCSLALSAPMGSDPPTACCFSYTARKLPRNFVVDYYETSSLCSQPAVVFQTKRGKQVCADPSESWVQEYVYDLELN

SEQ ID NO: 2172 - protein, 87 aa, Homo sapiens
MKLCVTVLSLLVLVAAFCSLALSAPMGSDPPTACCFSYTARKLPRNFVVDYYETSSLCSQPAVVGKQVCADPSESWVQEYVYDLELN

SEQ ID NO: 2173 - protein, 103 aa, Homo sapiens
MKLCVTVLSLLVLVAAFCSLALSAPMGSDPPTACCFSYTARKLPRNFVVDYYETSSLCSQPAVVYRESASSAAPGRIPSTRAAPHGPWSGRGRCLPQARDKAR

SEQ ID NO: 2174 - protein, 68 aa, Homo sapiens
MKLCVTVLSLLVLVAAFCSLALSAPTKSSEWKLQGVCFQCCSGKDPIHQSCPTWTMVRQRKMPTTGKG

SEQ ID NO: 2175 - protein, 91 aa, Homo sapiens
MKVSAAALAVILIATALCAPASASPYSSDTTPCCFAYIARPLPRAHIKEYFYTSGKCSNPAVVFVTRKNRQVCANPEKKWVREYINSLEMS

SEQ ID NO: 2176 - protein, 91 aa, Homo sapiens; identical to SEQ ID NO: 2175

SEQ ID NO: 2177 - protein, 150 aa, Homo sapiens
  SITE 1: note = misc_feature - Xaa can be any naturally occurring amino acid
XAALAVILIATALCAPASASPYSSDTTPCCFAYIARPLPRAHIKEYFYTSGKCSNPAVVHRSRMPKREGQQVWQDFLYDSRLNKGKLCHPKEPPSVCQPREEMGSGVHQLFGDELGWRVLEPELTQICLFLLALVLAWEASPHYPTPPAP

SEQ ID NO: 2178 - protein, 47 aa, Homo sapiens
MKASAALLCLLLTAAAFSPQGLAQPASRPNWTRRSVLTPHRSGSRTL

SEQ ID NO: 2179 - protein, 81 aa, Homo sapiens
MKASAALLCLLLTAAAFSPQGLAQPERPRTHPQWTFLLVVSLQLGLILQLPAATDLSIRKSLSRGWRATEGPPVATVPGKL

SEQ ID NO: 2180 - protein, 99 aa, Homo sapiens
MKASAALLCLLLTAAAFSPQGLAQPVGINTSTTCCYRFINKKIPKQRLESYRRTTSSHCPREAVIFKTKLDKEICADPTQKWVQDFMKHLDKKTQTPKL

SEQ ID NO: 2181 - protein, 99 aa, Homo sapiens
MKVSAALLCLLLMAATFSPQGLAQPDSVSIPITCCFNVINRKIPIQRLESYTRITNIQCPKEAVIFKTKRGKEVCADPKERWVRDSMKHLDQIFQNLKP

SEQ ID NO: 2182 - protein, 68 aa, Homo sapiens [sequence omitted]

SEQ ID NO: 2183 - protein, 4 aa, Homo sapiens
MSLC

SEQ ID NO: 2184 - protein, 154 aa, Homo sapiens
MSLCEDMLLCNYRKCRIKLSGYAWVTACSHIFCDQHGSGEFSRSPAICPACNSTLSGKLDIVRTELSPSEEYKAMVLAGLRPEIVLDISSRALAFWTYQVHQERLYQEYNFSKAEGHLKQMEKIYTQQIQSKDVELTSMKGEVTSMKKVLEEYK

SEQ ID NO: 2185 - protein, 277 aa, Homo sapiens
MSLCEDMLLCNYRKCRIKLSGYAWVTACSHIFCDQHGSGEFSRSPAICPACNSTLSGKLDIVRTELSPSEEYKAMVLAGLRPEIVLDISSRALAFWTYQVHQERLYQEYNFSKAEGHLKQMEKIYTQQIQSKDVELTSMKGEVTSMKKVLEEYKKKFSDISEKLMERNRQYQKLQGLYDSLRLRNITIANHEGTLEPSMIAQSGVLGFPLGNNSKFPLDNTPVRNRGDGDGDFQFRPFFAGSPTAPEPSNSFFSFVSPSRELEQQQVSSRAFKVKRI

SEQ ID NO: 2186 - protein, 277 aa, Homo sapiens; identical to SEQ ID NO: 2185

SEQ ID NO: 2187 - protein, 277 aa, Homo sapiens; identical to SEQ ID NO: 2185

SEQ ID NO: 2188 - protein, 277 aa, Homo sapiens; identical to SEQ ID NO: 2185

SEQ ID NO: 2189 - protein, 277 aa, Homo sapiens; identical to SEQ ID NO: 2185

SEQ ID NO: 2190 - protein, 277 aa, Homo sapiens; identical to SEQ ID NO: 2185

SEQ ID NO: 2191 - protein, 102 aa, Homo sapiens
MSLCEDMLLCNYRKCRIKLSGYAWVTACSHIFCDQHGSGEFSRSPAICPACNSTLSGKLDIVRTELSPSEEYKAMVLAGLRPEIVLDISSRALAFWTYQYFL

SEQ ID NO: 2192 - protein, 64 aa, Homo sapiens
  SITE 1: note = misc_feature - Xaa can be any naturally occurring amino acid
XEFSRSPAICPACNSTLSGKLDIVRTELSPSEEYKAMVLAGLRPEIVLDISSRALAFWTYQYFL

SEQ ID NO: 2193 - protein, 31 aa, Homo sapiens
  SITE 1: note = misc_feature - Xaa can be any naturally occurring amino acid
XTLAPERWPSGHIRLVSNSWVQAILPPQPPE

SEQ ID NO: 2194 - protein, 526 aa, Homo sapiens
MASGPHSTATAAAAASSAAPSAGGSSSGTTTTTTTTTGGILIGDRLYSEVSLTIDHSLIPEERLSPTPSMQDGLDLPSETDLRILGCELIQAAGILLRLPQVAMATGQVLFHRFFYSKSFVKHSFEIVAMACINLASKIEEAPRRIRDVINVFHHLRQLRGKRTPSPLILDQNYINTKNQVIKAERRVLKELGFCVHVKHPHKIIVMYLQVLECERNQTLVQTAWNYMNDSLRTNVFVRFQPETIACACIYLAARALQIPLPTRPHWFLLFGTTEEEIQEICIETLRLYTRKKPNYELLEKEVEKRKVALQEAKLKAKGLNPDGTPALSTLGGFSPASKPSSPREVKAEEKSPISINVKTVKKEPEDRQQASKSPYNGVRKDSKRSRNSRSASRSRSRTRSRSRSHTPRRHYNNRRSRSGTYSSRSRSRSRSHSESPRRHHNHGSPHLKAKHTRDDLKSSNRHGHKRKKSRSRSQSKSRDHSDAAKKHRHERGHHRDRRERSRSFERSHKSKHHGGSRSGHGRHRR

SEQ ID NO: 2195 - protein, 428 aa, Homo sapiens
MASGPHSTATAAAAASSAAPSAGGSSSGTTTTTTTTTGGILIGDRLYSEVSLTIDHSLIPEERLSPTPSMQDGLDLPSETDLRILGCELIQAAGILLRLPQVAMATGQVLFHRFFYSKSFVKHSFEIVAMACINLASKIEEAPRRIRDVINVFHHLRQLRGKRTPSPLILDQNYINTKNQVIKAERRVLKELGFCVHVKHPHKIIVMYLQVLECERNQTLVQTAWNYMNDSLRTNVFVRFQPETIACACIYLAARALQIPLPTRPHWFLLFGTTEEEIQEICIETLRLYTRKKPNYELLEKEVEKRKVALQEAKLKAKGLNPDGTPALSTLGGFSPASKPSSPREVKAEEKSPISINVKTVKKEPEDRQQASKSPYNGVRKDSKRSRNSRSASRSRSRTRSRSRSHTPRRQDEVLLRCPGRSRTPGLK

SEQ ID NO: 2196 - protein, 232 aa, Homo sapiens
MASGPHSTATAAAAASSAAPSAGGSSSGTTTTTTTTTGGILIGDRLYSEVSLTIDHSLIPEERLSPTPSMQDGLDLPSETDLRILGCELIQAAGILLRLPQVAMATGQVLFHRFFYSKSFVKHSFEIVAMACINLASKIEEAPRRIRDVINVFHHLRQLRGKRTPSPLILDQNYINTKNQVIKAERRVLKELGFCVHVKHPHKIIVMYLQVLECERNQTLVQTAWVVHDGKS

SEQ ID NO: 2197 - protein, 172 aa, Homo sapiens
MASGPHSTATAAAAASSAAPSAGGSSSGTTTTTTTTTGGILIGDRLYSEVSLTIDHSLIPEERLSPTPSMQDGLDLPSETDLRILGCELIQAAGILLRLPQVAMATGQVLFHRFFYSKSFVKHSFEIVAMACINLASKIEEAPRRIRDVINVFHHLRQLRGKSDQLHLPKPG

SEQ ID NO: 2198 - protein, 172 aa, Homo sapiens; identical to SEQ ID NO: 2197

SEQ ID NO: 2199 - protein, 172 aa, Homo sapiens; identical to SEQ ID NO: 2197

SEQ ID NO: 2200 - protein, 172 aa, Homo sapiens; identical to SEQ ID NO: 2197

SEQ ID NO: 2201 - protein, 172 aa, Homo sapiens; identical to SEQ ID NO: 2197

SEQ ID NO: 2202 - protein, 59 aa, Homo sapiens
  SITE 1: note = misc_feature - Xaa can be any naturally occurring amino acid
XRKKPNYELLEKEVEKRKVALQEAKLKAKGLNPDGTPALSTLGGFSPASKPCKMYLELK

SEQ ID NO: 2203 - protein, 520 aa, Homo sapiens
MAAAAAAAGAAGSAAPAAAAGAPGSGGAPSGSQGVLIGDRLYSGVLITLENCLLPDDKLRFTPSMSSGLDTDTETDLRVVGCELIQAAGILLRLPQVAMATGQVLFQRFFYTKSFVKHSMEHVSMACVHLASKIEEAPRRIRDVINVFHRLRQLRDKKKPVPLLLDQDYVNLKNQIIKAERRVLKELGFCVHVKHPHKIIVMYLQVLECERNQHLVQTSWNYMNDSLRTDVFVRFQPESIACACIYLAARTLEIPLPNRPHWFLLFGATEEEIQEICLKILQLYARKKVDLTHLEGEVEKRKHAIEEAKAQARGLLPGGTQVLDGTSGFSPAPKLVESPKEGKGSKPSPLSVKNTKRRLEGAKKAKADSPVNGLPKGRESRSRSRSREQSYSRSPSRSASPKRRKSDSGSTSGGSKSQSRSRSRSDSPPRQAPRSAPYKGSEIRGSRKSKDCKYPQKPHKSRSRSSSRSRSRSRERADNPGKYKKKSHYYRDQRRERSRSYERTGRRYERDHPGHSRHRR

SEQ ID NO: 2204 - protein, 236 aa, Homo sapiens
MAAAAAAAGAAGSAAPAAAAGAPGSGGAPSGSQGVLIGDRLYSGVLITLENCLLPDDKLRFTPSMSSGLDTDTETDLRVVGCELIQAAGILLRLPQVAMATGQVLFQRFFYTKSFVKHSMEHVSMACVHLASKIEEAPRRIRDVINVFHRLRQLRDKKKPVPLLLDQDYVNLKNQIIKAERRVLKELGFCVHVKHPHKIIVMYLQVLECERNQHLVQTSWVASEDPLLKWDSWQRL

SEQ ID NO: 2205 - protein, 227 aa, Homo sapiens
MAAAAAAAGAAGSAAPAAAAGAPGSGGAPSGSQGVLIGDRLYSGVLITLENCLLPDDKLRFTPSMSSGLDTDTETDLRVVGCELIQAAGILLRLPQVAMATGQVLFQRFFYTKSFVKHSMEHVSMACVHLASKIEEAPRRIRDVINVFHRLRQLRDKKKPVPLLLDQDYVNLKNQIIKAERRVLKELGFCVHVKHPHKIIVMYLQVLECERNQHLVQTSWVASEGIT

SEQ ID NO: 2206 - protein, 226 aa, Homo sapiens
MAAAAAAAGAAGSAAPAAAAGAPGSGGAPSGSQGVLIGDRLYSGVLITLENCLLPDDKLRFTPSMSSGLDTDTETDLRVVGCELIQAAGILLRLPQVAMATGQVLFQRFFYTKSFVKHSMEHVSMACVHLASKIEEAPRRIRDVINVFHRLRQLRDKKKPVPLLLDQDYVNLKNQIIKAERRVLKELGFCVHVKHPHKIIVMYLQVLECERNQHLVQTSWVASEGK

SEQ ID NO: 2207 - protein, 180 aa, Homo sapiens
MAAAAAAAGAAGSAAPAAAAGAPGSGGAPSGSQGVLIGDRLYSGVLITLENCLLPDDKLRFTPSMSSGLDTDTETDLRVVGCELIQAAGILLRLPQVRARPRASGPGGHGYRAGVVPAVLLYQVLREALHGACVNGLCPPGFQDRRGPKTHTGRHQCVSPPSTAERQKEARASTTGSRLC

SEQ ID NO: 2208 - protein, 86 aa, Homo sapiens
MATGQVLFQRFFYTKSFVKHSMEHVSMACVHLASKIEEAPRRIRDVINVFHRLRQLRDKKKPVPLLLDQDYVNLKNQIIKAERRVL

SEQ ID NO: 2209 - protein, 347 aa, Homo sapiens [sequence omitted]

SEQ ID NO: 2210 - protein, 46 aa, Homo sapiens
  SITE 1: note = misc_feature - Xaa can be any naturally occurring amino acid
XEEAPRRIRDVINVFHRLRQLRDKKPCALSLAGSPCLYYWIKIMLI

SEQ ID NO: 2211 - protein, 55 aa, Homo sapiens
MERASCLLLLLLPLVHVSATTPEPCELDDEDFRCVCNFSEPQPDWSEAFQCVSAV

SEQ ID NO: 2212 - protein, 81 aa, Homo sapiens
MERASCLLLLLLPLVHVSATTPEPCELDDEDFRCVCNFSEPQPDWSEAFQCVSAVEVEIHAGGLNLEPFLKRVDADADPRQ

SEQ ID NO: 2213 - protein, 213 aa, Homo sapiens
MERASCLLLLLLPLVHVSATTPEPCELDDEDFRCVCNFSEPQPDWSEAFQCVSAVEVEIHAGGLNLEPFLKRVDADADPRQYADTVKALRVRRLTVGAAQVPAQLLVGALRVLAYSRLKELTLEDLKITGTMPPLPLEATGLALSSLRLRNVSWATGRSWLAELQQWLKPGLKVLSIAQAHSPAFSCEQVRAFPALTSLDLSDNPGLGERGLM

SEQ ID NO: 2214 - protein, 375 aa, Homo sapiens
MERASCLLLLLLPLVHVSATTPEPCELDDEDFRCVCNFSEPQPDWSEAFQCVSAVEVEIHAGGLNLEPFLKRVDADADPRQYADTVKALRVRRLTVGAAQVPAQLLVGALRVLAYSRLKELTLEDLKITGTMPPLPLEATGLALSSLRLRNVSWATGRSWLAELQQWLKPGLKVLSIAQAHSPAFSCEQVRAFPALTSLDLSDNPGLGERGLMAALCPHKFPAIQNLALRNTGMETPTGVCAALAAAGVQPHSLDLSHNSLRATVNPSAPRCMWSSALNSLNLSFAGLEQVPKGLPAKLRVLDLSCNRLNRAPQPDELPEVDNLTLDGNPFLVPGTALPHEGSMNSGVVPACARSTLSVGVSGTLVLLQGARGFA

SEQ ID NO: 2215 - protein, 375 aa, Homo sapiens; identical to SEQ ID NO: 2214

SEQ ID NO: 2216 - protein, 72 aa, Homo sapiens
MLLEPGRGCCALAILLAIVDIQSGETGNYTVTGLKQRQHLEFSHNEGTLSSGFLQEKVWVMLVTSLVALQAL

SEQ ID NO: 2217 - protein, 125 aa, Homo sapiens
MLLEPGRGCCALAILLAIVDIQSGETGNYTVTGLKQRQHLEFSHNEGTLSSGFLQEKVWVMLVTSLVALQGMSKRAVSTPSNEGAIIFLPPWLFSRRRRLERMSRGREKCYSSPGYPQESSNQFH

SEQ ID NO: 2218 - protein, 181 aa, Homo sapiens
MLLEPGRGCCALAILLAIVDIQSGGCINITSSASQEGTRLNLICTVWHKKEEAEGFVVFLCKDRSGDCSPETSLKQLRLKRDPGIDGVGEISSQLMFTISQVTPLHSGTYQCCARSQKSGIRLQGHFFSILFTETGNYTVTGLKQRQHLEFSHNEGTLSSGFLQEKVWVMLVTSLVALQAL

SEQ ID NO: 2219 - protein, 181 aa, Homo sapiens; identical to SEQ ID NO: 2218

SEQ ID NO: 2220 - protein, 234 aa, Homo sapiens
MLLEPGRGCCALAILLAIVDIQSGGCINITSSASQEGTRLNLICTVWHKKEEAEGFVVFLCKDRSGDCSPETSLKQLRLKRDPGIDGVGEISSQLMFTISQVTPLHSGTYQCCARSQKSGIRLQGHFFSILFTETGNYTVTGLKQRQHLEFSHNEGTLSSGFLQEKVWVMLVTSLVALQGMSKRAVSTPSNEGAIIFLPPWLFSRRRRLERMSRGREKCYSSPGYPQESSNQFH

SEQ ID NO: 2221 - protein, 163 aa, Homo sapiens
MRKGRKVPMYVPGVLRTYPKAKLEETCEGRNSCVSCFNVSVVNTTCFWIECKDESYCSHNSTVSDCQVGNTTDFCSVSTATPVPTANSTAKPTVQPSPSTTSKTVTTSGTTNNTVTPTSQPVRKSTFDAASFIGGIVLVLGVQAVIFFLYKFCKSKERNYHTL

SEQ ID NO: 2222 - protein, 184 aa, Homo sapiens
MSRLSRSLLWAATCLGVLCVLSADKNTTQHPNVTTLAPISNVTSAPVTSLPLVTTPAPETCEGRNSCVSCFNVSVVNTTCFWIECKDESYCSHNSTVSDCQVGNTTDFCSAKPTVQPSPSTTSKTVTTSGTTNNTVTPTSQPVRKSTFDAASFIGGIVLVLGVQAVIFFLYKFCKSKERNYHTL

SEQ ID NO: 2223 - protein, 157 aa, Homo sapiens
MSRLSRSLLWAATCLGVLCVLSADKNTTQHPNVTTLAPISNVTSAPVTSLPLVTTPAPETCEGRNSCVSCFNVSVVNTTCFWIECKDESYCSHNSTVSDCQVGNTTDFCSVSTATPVPTANSTAKPTVQPSPSTTSKTVTTSEIRCHTRNYIPDLKK

SEQ ID NO: 2224 - protein, 189 aa, Homo sapiens
MSRLSRSLLWAATCLGVLCVLSADKNTTQHPNVTTLAPISNVTSAPVTSLPLVTTPAPETCEGRNSCVSCFNVSVVNTTCFWIECKDESYCSHNSTVSDCQVGNTTDFCSVSTATPVPTANSTAKPTVQPSPSTTSKTVTTSGTTNNTVTPTSQPVRKSTFDAASFIGGIVLVLEIRCHTRNYIPDLKK

SEQ ID NO: 2225 - protein, 197 aa, Homo sapiens
MSRLSRSLLWAATCLGVLCVLSADKNTTQHPNVTTLAPISNVTSAPVTSLPLVTTPAPETCEGRNSCVSCFNVSVVNTTCFWIECKDESYCSHNSTVSDCQVGNTTDFCSVSTATPVPTANSTAKPTVQPSPSTTSKTVTTSGTTNNTVTPTSQPVRKSTFDAASFIGGIVLVLGVQAVIFFLYKFCKSKERNYHTL

SEQ ID NO: 2226 - protein, 178 aa, Homo sapiens
MSRLSRSLLWAATCLGVLCVLSADKNTTQHPNVTTLAPISNVTSAPVTSLPLVTTPAPETCEGRNSCVSCFNVSVVNTTCFWIECKDESYCSHNSTVSDCQVGNTTDFCSVSTATPVPTANSTGTTNNTVTPTSQPVRKSTFDAASFIGGIVLVLGVQAVIFFLYKFCKSKERNYHTL

SEQ ID NO: 2227 - protein, 437 aa, Homo sapiens
MSAVLLLALLGFILPLPGVQALLCQFGTVQHVWKVSDLPRQWTPKNTSCDSGLGCQDTLMLIESGPQVSLVLSKGCTEAKDQEPRVTEHRMGPGLSLISYTFVCRQEDFCNNLVNSLPLWAPQPPADPGSLRCPVCLSMEGCLEGTTEEICPKGTTHCYDGLLRLRGGGIFSNLRVQGCMPQPVCNLLNGTQEIGPVGMTENCDMKDFLTCHRGTTIMTHGNLAQEPTDWTTSNTEMCEVGQVCQETLLLLDVGLTSTLVGTKGCSTVGAQNSQKTTIHSAPPGVLVASYTHFCSSDLCNSASSSSVLLNSLPPQAAPVPGDRQCPTCVQPLGTCSSGSPRMTCPRGATHCYDGYIHLSGGGLSTKMSIQGCVAQPSSFLLNHTRQIGIFSAREKRDVQPPASQHEGGGAEGLESLTWGVGLALAPALWWGVVCPSC

SEQ ID NO: 2228 - protein, 145 aa, Homo sapiens
MSAVLLLALLGFILPLPGVQALLCQFGTVQHVWKVSDLPRQWTPKNTSCDSGLGCQDTLMLIESGPQVSLVLSKGCTEAKDQEPRVTEHRMGPGLSLISYTFVCRQEDFCNNLVNSLPLWAPQPPADPMMGAAEGPFGKAEQVDS

SEQ ID NO: 2229 - protein, 139 aa, Homo sapiens
MSAVLLLALLGFILPLPGVQALLCQFGTVQHVWKVSDLPRQWTPKNTSCDSGLGCQDTLMLIESGPQVSLVLSKGCTEAKDQEPRVTEHRMGPGLSLISYTFVCRQEDFCNNLVNSLPLWAPQPPAGACGRVGRRGRGC

SEQ ID NO: 2230 - protein, 286 aa, Homo sapiens
MLLLFLLFEGLCCPGENTAAPQALQSYHLAAEEQLSFRMLQTSSFANHSWAHSEGSGWLGDLQTHGWDTVLGTIRFLKPWSHGNFSKQELKNLQSLFQLYFHSFIQIVQASAGQFQLELKPEAWLSCGPSPGPGRLQLVCHVSGFYPKPVWVMWMRGEQEQRGTQRGDVLPNADETWYLRATLDVAAGEAAGLSCRVKHSSLGGHDLIIHWGGYSIFLILICLTVIVTLVILVVVDSRLKKQSPVFLMGANTQDTKNSRHQFCLAQVSWIKNRVLKKWKTRLNQLW

SEQ ID NO: 2231 - protein, 298 aa, Homo sapiens
MLLLFLLFEGLCCPGENTAAPQALQSYHLAAEEQLSFRMLQTSSFANHSWAHSEGSGWLGDLQTHGWDTVLGTIRFLKPWSHGNFSKQELKNLQSLFQLYFHSFIQIVQASAGQFQLELKPEAWLSCGPSPGPGRLQLVCHVSGFYPKPVWVMWMRGEQEQRGTQRGDVLPNADETWYLRATLDVAAGEAAGLSCRVKHSSLGGHDLIIHWGGYSIFLILICLTVIVTLVILVVVDSRLKKQSSNKNILSPHTPSPVFLMGANTQDTKNSRHQFCLAQVSWIKNRVLKKWKTRLNQLW

SEQ ID NO: 2232 - protein, 231 aa, Homo sapiens
MLLLFLLFEGLCCPGENTAAPQALQSYHLAAEEQLSFRMLQTSSFANHSWAHSEGSGWLGDLQTHGWDTVLGTIRFLKPWSHGNFSKQELKNLQSLFQLYFHSFIQIVQASAGQFQLELKPEAWLSCGPSPGPGRLQLVCHVSGFYPKPVWVMWMRGGYSIFLILICLTVIVTLVILVVVDSRLKKQSPVFLMGANTQDTKNSRHQFCLAQVSWIKNRVLKKWKTRLNQLW

SEQ ID NO: 2233 - protein, 290 aa, Homo sapiens
MLLLFLLFEGLCCPGENTAAPQALQSYHLAAEEQLSFRMLQTSSFANHSWAHSEGSGWLGDLQTHGWDTVLGTIRFLKPWSHGNFSKQELKNLQSLFQLYFHSFIQIVQASAGQFQLEYPFEIQILAGCRMNAPQIFLNMAYQGSDFLSFQGISWEPSPGAGIRAQNICKVLNRYLDIKEILQSLLGHTCPRFLAGLMEAGESELKRKVKPEAWLSCGPSPGPGRLQLVCHVSGFYPKPVWVMWMRGEQEQRGTQRGDVLPNADETWWIFHLSHPDLFDCDSYPGHIGCS

SEQ ID NO: 2234 - protein, 388 aa, Homo sapiens
MLLLFLLFEGLCCPGENTAAPQALQSYHLAAEEQLSFRMLQTSSFANHSWAHSEGSGWLGDLQTHGWDTVLGTIRFLKPWSHGNFSKQELKNLQSLFQLYFHSFIQIVQASAGQFQLEYPFEIQILAGCRMNAPQIFLNMAYQGSDFLSFQGISWEPSPGAGIRAQNICKVLNRYLDIKEILQSLLGHTCPRFLAGLMEAGESELKRKVKPEAWLSCGPSPGPGRLQLVCHVSGFYPKPVWVMWMRGEQEQRGTQRGDVLPNADETWYLRATLDVAAGEAAGLSCRVKHSSLGGHDLIIHWGGYSIFLILICLTVIVTLVILVVVDSRLKKQSSNKNILSPHTPSPVFLMGANTQDTKNSRHQFCLAQVSWIKNRVLKKWKTRLNQLW

SEQ ID NO: 2235 - protein, 376 aa, Homo sapiens
MLLLFLLFEGLCCPGENTAAPQALQSYHLAAEEQLSFRMLQTSSFANHSWAHSEGSGWLGDLQTHGWDTVLGTIRFLKPWSHGNFSKQELKNLQSLFQLYFHSFIQIVQASAGQFQLEYPFEIQILAGCRMNAPQIFLNMAYQGSDFLSFQGISWEPSPGAGIRAQNICKVLNRYLDIKEILQSLLGHTCPRFLAGLMEAGESELKRKVKPEAWLSCGPSPGPGRLQLVCHVSGFYPKPVWVMWMRGEQEQRGTQRGDVLPNADETWYLRATLDVAAGEAAGLSCRVKHSSLGGHDLIIHWGGYSIFLILICLTVIVTLVILVVVDSRLKKQSPVFLMGANTQDTKNSRHQFCLAQVSWIKNRVLKKWKTRLNQLW

SEQ ID NO: 2236 - protein, 321 aa, Homo sapiens
MLLLFLLFEGLCCPGENTAAPQALQSYHLAAEEQLSFRMLQTSSFANHSWAHSEGSGWLGDLQTHGWDTVLGTIRFLKPWSHGNFSKQELKNLQSLFQLYFHSFIQIVQASAGQFQLEYPFEIQILAGCRMNAPQIFLNMAYQGSDFLSFQGISWEPSPGAGIRAQNICKVLNRYLDIKEILQSLLGHTCPRFLAGLMEAGESELKRKVKPEAWLSCGPSPGPGRLQLVCHVSGFYPKPVWVMWMRGGYSIFLILICLTVIVTLVILVVVDSRLKKQSPVFLMGANTQDTKNSRHQFCLAQVSWIKNRVLKKWKTRLNQLW

SEQ ID NO: 2237 - protein, 289 aa, Homo sapiens
MLLLFLLFEGLCCPGENTADPFEIQILAGCRMNAPQIFLNMAYQGSDFLSFQGISWEPSPGAGIRAQNICKVLNRYLDIKEILQSLLGHTCPRFLAGLMEAGESELKRKVKPEAWLSCGPSPGPGRLQLVCHVSGFYPKPVWVMWMRGEQEQRGTQRGDVLPNADETWYLRATLDVAAGEAAGLSCRVKHSSLGGHDLIIHWGGYSIFLILICLTVIVTLVILVVVDSRLKKQSSNKNILSPHTPSPVFLMGANTQDTKNSRHQFCLAQVSWIKNRVLKKWKTRLNQLW

SEQ ID NO: 2238 - protein, 101 aa, Homo sapiens
MLLLFLLFEGLCCPGENTAVKPEAWLSCGPSPGPGRLQLVCHVSGFYPKPVWVMWMRGEQEQRGTQRGDVLPNADETWWIFHLSHPDLFDCDSYPGHIGCS

SEQ ID NO: 2239 - protein, 187 aa, Homo sapiens
MLLLFLLFEGLCCPGENTAVKPEAWLSCGPSPGPGRLQLVCHVSGFYPKPVWVMWMRGEQEQRGTQRGDVLPNADETWYLRATLDVAAGEAAGLSCRVKHSSLGGHDLIIHWGGYSIFLILICLTVIVTLVILVVVDSRLKKQSPVFLMGANTQDTKNSRHQFCLAQVSWIKNRVLKKWKTRLNQLW

SEQ ID NO: 2240 - protein, 199 aa, Homo sapiens
MLLLFLLFEGLCCPGENTAVKPEAWLSCGPSPGPGRLQLVCHVSGFYPKPVWVMWMRGEQEQRGTQRGDVLPNADETWYLRATLDVAAGEAAGLSCRVKHSSLGGHDLIIHWGGYSIFLILICLTVIVTLVILVVVDSRLKKQSSNKNILSPHTPSPVFLMGANTQDTKNSRHQFCLAQVSWIKNRVLKKWKTRLNQLW

SEQ ID NO: 2241 - protein, 132 aa, Homo sapiens
MLLLFLLFEGLCCPGENTAVKPEAWLSCGPSPGPGRLQLVCHVSGFYPKPVWVMWMRGGYSIFLILICLTVIVTLVILVVVDSRLKKQSPVFLMGANTQDTKNSRHQFCLAQVSWIKNRVLKKWKTRLNQLW

SEQ ID NO: 2242 - protein, 144 aa, Homo sapiens
MLLLFLLFEGLCCPGENTAVKPEAWLSCGPSPGPGRLQLVCHVSGFYPKPVWVMWMRGGYSIFLILICLTVIVTLVILVVVDSRLKKQSSNKNILSPHTPSPVFLMGANTQDTKNSRHQFCLAQVSWIKNRVLKKWKTRLNQLW

SEQ ID NO: 2243 - protein, 60 aa, Homo sapiens
  SITE 1: note = misc_feature - Xaa can be any naturally occurring amino acid
XVSGFYPKPVWVMWMRGEQEQRGTQRGDVLPNADETWWIFHLSHPDLFDCDSYPGHIGCS

SEQ ID NO: 2244 - protein, 351 aa, Homo sapiens
MSFPCKFVASFLLIFNVSSKGAVSKEITNALETWGALGQDINLDIPSFQMSDDIDDIKWEKTSDKKKIAQFRKEKETFKEKDTYKLFKNGTLKIKHLKTDDQDIYKVSIYDTKGKNVLEKIFDLKIQERVSKPKISWTCINTTLTCEVMNGTDPELNLYQDGKHLKLSQRVITHKWTTSLSAKFKCTAGNKVSKESSVEPVSCPEKGLDIYLIIGICGGGSLLMVFVALLVFYITKRKKQRSRRNDEELETRAHRVATEERGRKPHQIPASTPQNPATSQHPPPPPGHRSQAPSHRPPPPGHRVQHQPQKRPPAPSGTQVHQQKGPPLPRPRVQPKPPHGAAENSLSPSSN

SEQ ID NO: 2245 - protein, 133 aa, Homo sapiens
MSFPCKFVASFLLIFNVSSKGAVSKEITNALETWGALGQDINLDIPSFQMSDDIDDIKWEKTSDKKKIAQFRKEKETFKEKDTYKLFKNGTLKIKHLKTDDQDIYKVSIYDTKGKNVLEKIFDLKIQGKCSFP

SEQ ID NO: 2246 - protein, 294 aa, Homo sapiens
MERLTLTRTIGGPLLTATLLGKTTINDYQVIRMPFSHLSTYSLVWVMAAVVLCTAQVQVVTQDEREQLYTPASLKCSLQNAQEALIVTWQKKKAVSPENMVTFSENHGVVIQPAYKDKINITQLGLQNSTITFWNITLEDEGCYMCLFNTFGFGKISGTACLTVYVQPIVSLHYKFSEDHLNITCSATARPAPMVFWKVPRSGIENSTVTLSHPNGTTSVTSILHIKDPKNQVGKEVICQVLHLGTVTDFKQTVNKGYWFSVPLLLSIVSLVILLVLISILLYWKRHRNQDREP

SEQ ID NO: 2247 - protein, 150 aa, Homo sapiens
MERLVIRMPFSHLSTYSLVWVMAAVVLCTAQVQVVTQDEREQLYTPASLKCSLQNAQEALIVTWQKKKAVSPENMVTFSENHGVVIQPAYKDKINITQLGLQNSTITFWNITLEDEGCYMCLFNTFGFGKISGTACLTVYAHSIPSLQIL

SEQ ID NO: 2248 - protein, 269 aa, Homo sapiens
MERLVIRMPFSHLSTYSLVWVMAAVVLCTAQVQVVTQDEREQLYTPASLKCSLQNAQEALIVTWQKKKAVSPENMVTFSENHGVVIQPAYKDKINITQLGLQNSTITFWNITLEDEGCYMCLFNTFGFGKISGTACLTVYVQPIVSLHYKFSEDHLNITCSATARPAPMVFWKVPRSGIENSTVTLSHPNGTTSVTSILHIKDPKNQVGKEVICQVLHLGTVTDFKQTVNKGYWFSVPLLLSIVSLVILLVLISILLYWKRHRNQDREP

SEQ ID NO: 2249 - protein, 202 aa, Homo sapiens
MKVQVVTQDEREQLYTPASLKCSLQNAQEALIVTWQKKKAVSPENMVTFSENHGVVIQPAYKDKINITQLGLQNSTITFWNITLEDEGCYMCLFNTFGFGKISGTACLTVYVQPIVSLHYKFSEDHLNITCSATARPAPMVFWKVPRSGIENSTVTLSHPNGTTSVTSILHIKDPKNQVGKEVICQVLHLGTVTDFKQTVNK

SEQ ID NO: 2250 - protein, 62 aa, Homo sapiens
MPFSHLSTYSLVWVMAAVVLCTAQVQVVTQDEREQLYTPASLKCSLQNAQEALIVTWQKKKA

SEQ ID NO: 2251 - protein, 76 aa, Homo sapiens
MVTFSENHGVVIQPAYKDKINITQLGLQNSTITFWNITLEDEGCYMCLFNTFGFGKISGTACLTVYAHSIPSLQIL

SEQ ID NO: 2252 - protein, 195 aa, Homo sapiens
MVTFSENHGVVIQPAYKDKINITQLGLQNSTITFWNITLEDEGCYMCLFNTFGFGKISGTACLTVYVQPIVSLHYKFSEDHLNITCSATARPAPMVFWKVPRSGIENSTVTLSHPNGTTSVTSILHIKDPKNQVGKEVICQVLHLGTVTDFKQTVNKGYWFSVPLLLSIVSLVILLVLISILLYWKRHRNQDREP

SEQ ID NO: 2253 - protein, 165 aa, Homo sapiens
MLCPWRTANLGLLLILTIFLVAASSSLCMDEKQITQNYSKVLAEVNTSWPVKMATNAVLCCPPIALRNLIIITWEIILRGQPSCTKAYKKETNETKETNCTDERITWVSRPDQNSDLQIRTVAITHDGYYRCIMVTPDGNFHRGYHLQVLGKEHHILRYFTSPDL

SEQ ID NO: 2254 - protein, 325 aa, Homo sapiens
MLCPWRTANLGLLLILTIFLVAASSSLCMDEKQITQNYSKVLAEVNTSWPVKMATNAVLCCPPIALRNLIIITWEIILRGQPSCTKAYKKETNETKETNCTDERITWVSRPDQNSDLQIRTVAITHDGYYRCIMVTPDGNFHRGYHLQVLVTPEVTLFQNRNRTAVCKAVAGKPAAHISWIPEGDCATKQEYWSNGTVTVKSTCHWEVHNVSTVTCHVSHLTGNKSLYIELLPVPGAKKSAKLYIPYIILTIIILTIVGFIWLLKVNGCRKYKLNKTESTPVVEEDEMQPYASYTEKNNPLYDTTNKVKASEALQSEVDTDLHTL

SEQ ID NO: 2255 - protein, 188 aa, Homo sapiens
MLCPWRTANLGLLLILTIFLVAEAEGAAQPNNSLMLQTSKENHALASSSLCMDEKQITQNYSKVLAEVNTSWPVKMATNAVLCCPPIALRNLIIITWEIILRGQPSCTKAYKKETNETKETNCTDERITWVSRPDQNSDLQIRTVAITHDGYYRCIMVTPDGNFHRGYHLQVLGKEHHILRYFTSPDL

SEQ ID NO: 2256 - protein, 348 aa, Homo sapiens
MLCPWRTANLGLLLILTIFLVAEAEGAAQPNNSLMLQTSKENHALASSSLCMDEKQITQNYSKVLAEVNTSWPVKMATNAVLCCPPIALRNLIIITWEIILRGQPSCTKAYKKETNETKETNCTDERITWVSRPDQNSDLQIRTVAITHDGYYRCIMVTPDGNFHRGYHLQVLVTPEVTLFQNRNRTAVCKAVAGKPAAHISWIPEGDCATKQEYWSNGTVTVKSTCHWEVHNVSTVTCHVSHLTGNKSLYIELLPVPGAKKSAKLYIPYIILTIIILTIVGFIWLLKVNGCRKYKLNKTESTPVVEEDEMQPYASYTEKNNPLYDTTNKVKASEALQSEVDTDLHTL

SEQ ID NO: 2257 - protein, 212 aa, Homo sapiens
MLCPWRTANLGLLLILTIFLVAVNTSWPVKMATNAVLCCPPIALRNLIIITWEIILRGQPSCTKAYKKETNETKETNCTDERITWVSRPDQNSDLQIRTVAITHDGYYRCIMVTPDGNFHRGYHLQVLVTPEVTLFQNRNRTAVCKAVAGKPAAHISWIPEGDCATKQEYWSNGTVTVKSTCHWEVHNVSTVTCHVSHLTGNKSLYIELLPG

SEQ ID NO: 2258 - protein, 153 aa, Homo sapiens
HIQLPPEIQESQEVTLTCLLNFSCYGYPIQLQWLLEGVPMRQAAVTSTSLTIKSVFTRSELKFSPQWSHHGKIVTCQLQDADGKFLSNDTVQLNVKRESPRHACGKGKVCVTFSPAPQGACTQGRGKPAQTAASSSPGHAALSALVFREKDLL

SEQ ID NO: 2259 - protein, 159 aa, Homo sapiens [sequence omitted]

SEQ ID NO: 2260 - protein, 138 aa, Homo sapiens
MHLLGPWLLLLEYLAFSDSSKWVFEHPETLYAWEGACVWIPCTYRALDGDLESFILFHNPEYNKNTSKFDGTRLYESTKDGKVPSEQKRVQFLGDKNKNCTLSIHPVHLNDSGQLGLRMESKTEKWMERIHLNVSERP

SEQ ID NO: 2261 - protein, 145 aa, Homo sapiens
MHLLGPWLLLLEYLAFSDSSKWVFEHPETLYAWEGACVWIPCTYRALDGDLESFILFHNPEYNKNTSKFDGTRLYESTKDGKVPSEQKRVQFLGDKNKNCTLSIHPVHLNDSGQLGLRMESKTEKWMERIHLNVSERPFPPHIQL

SEQ ID NO: 2262 - protein, 191 aa, Homo sapiens
MHLLGPWLLLLEYLAFSDSSKWVFEHPETLYAWEGACVWIPCTYRALDGDLESFILFHNPEYNKNTSKFDGTRLYESTKDGKVPSEQKRVQFLGDKNKNCTLSIHPVHLNDSGQLGLRMESKTEKWMERIHLNVSVAPRGGSNEAGCCHLDLLDHQVCLHPERAQVLPTVESPWEDCDLPASGCRWEVPLQ

SEQ ID NO: 2263 - protein, 106 aa, Homo sapiens
MHLLGPWLLLLVLEYLAFSDSSKWVFEHPETLYAWEGACVWIPCTYRALDGDLESFILFHNPEYNKNTSKFDGTRLYESTKDGKVPSEQKRVQFLGDKNKNCTLSI

SEQ ID NO: 2264 - protein, 133 aa, Homo sapiens
MHLLGPWLLLLVLEYLAFSDSSKWVFEHPETLYAWEGACVWIPCTYRALDGDLESFILFHNPEYNKNTSKFDGTRLYESTKDGKVPSEQKRVQFLGDKNKNCTLSIHPVHLNDSGQLGLRMESKTEKWMERIH

SEQ ID NO: 2265 - protein, 164 aa, Homo sapiens
MHLLGPWLLLLVLEYLAFSDSSKWVFEHPETLYAWEGACVWIPCTYRALDGDLESFILFHNPEYNKNTSKFDGTRLYESTKDGKVPSEQKRVQFLGDKNKNCTLSIHPVHLNDSGQLGLRMESKTEKWMERIHLNVSDPPKKVTTVIQNPMPIREGDTVTLSCN

SEQ ID NO: 2266 - protein, 226 aa, Homo sapiens
MHLLGPWLLLLVLEYLAFSDSSKWVFEHPETLYAWEGACVWIPCTYRALDGDLESFILFHNPEYNKNTSKFDGTRLYESTKDGKVPSEQKRVQFLGDKNKNCTLSIHPVHLNDSGQLGLRMESKTEKWMERIHLNVSERPFPPHIQLPPEIQESQEVTLTCLLNFSCYGYPIQLQWLLEGVPMRQAAVTSTSLTIKSVFTRSELKFSPQWSHHGKIVTCQLQDADG

SEQ ID NO: 2267 - protein, 670 aa, Homo sapiens
MHLLGPWLLLLVLEYLAFSDSSKWVFEHPETLYAWEGACVWIPCTYRALDGDLESFILFHNPEYNKNTSKFDGTRLYESTKDGKVPSEQKRVQFLGDKNKNCTLSIHPVHLNDSGQLGLRMESKTEKWMERIHLNVSERPFPPHIQLPPEIQESQEVTLTCLLNFSCYGYPIQLQWLLEGVPMRQAAVTSTSLTIKSVFTRSELKFSPQWSHHGKIVTCQLQDADGKFLSNDTVQLNVKHPPKKVTTVIQNPMPIREGDTVTLSCNYNSSNPSVTRYEWKPHGAWEEPSLGVLKIQNVGWDNTTIACAACNSWCSWASPVALNVQYAPRDVRVRKIKPLSEIHSGNSVSLQCDFSSSHPKEVQFFWEKNGRLLGKESQLNFDSISPEDAGSYSCWVNNSIGQTASKAWTLEVLYAPRRLRVSMSPGDQVMEGKSATLTCESDANPPVSHYTWFDWNNQSLPYHSQKLRLEPVKVQHSGAYWCQGTNSVGKGRSPLSTLTVYYSPETIGRRVAVGLGSCLAILILAICGLKLQRRWKRTQSQQGLQENSSGQSFFVRNKKVRRAPLSEGPHSLGCYNPMMEDGISYTTLRFPEMNIPRTGDAESSEMQRPPPDCDDTVTYSALHKRQVGDYENVIPDFPEDEGIHYSELIQFGVGERPQAQENVDYVILKH

SEQ ID NO: 2268 - protein, 670 aa, Homo sapiens; identical to SEQ ID NO: 2267

SEQ ID NO: 2269 - protein, 847 aa, Homo sapiens
MHLLGPWLLLLVLEYLAFSDSSKWVFEHPETLYAWEGACVWIPCTYRALDGDLESFILFHNPEYNKNTSKFDGTRLYESTKDGKVPSEQKRVQFLGDKNKNCTLSIHPVHLNDSGQLGLRMESKTEKWMERIHLNVSERPFPPHIQLPPEIQESQEVTLTCLLNFSCYGYPIQLQWLLEGVPMRQAAVTSTSLTIKSVFTRSELKFSPQWSHHGKIVTCQLQDADGKFLSNDTVQLNVKHTPKLEIKVTPSDAIVREGDSVTMTCEVSSSNPEYTTVSWLKDGTSLKKQNTFTLNLREVTKDQSGKYCCQVSNDVGPGRSEEVFLQVQYAPEPSTVQILHSPAVEGSQVEFLCMSLANPLPTNYTWYHNGKEMQGRTEEKVHIPKILPWHAGTYSCVAENILGTGQRGPGAELDVQYPPKKVTTVIQNPMPIREGDTVTLSCNYNSSNPSVTRYEWKPHGAWEEPSLGVLKIQNVGWDNTTIACAACNSWCSWASPVALNVQYAPRDVRVRKIKPLSEIHSGNSVSLQCDFSSSHPKEVQFFWEKNGRLLGKESQLNFDSISPEDAGSYSCWVNNSIGQTASKAWTLEVLYAPRRLRVSMSPGDQVMEGKSATLTCESDANPPVSHYTWFDWNNQSLPYHSQKLRLEPVKVQHSGAYWCQGTNSVGKGRSPLSTLTVYYSPETIGRRVAVGLGSCLAILILAICGLKLQRRWKRTQSQQGLQENSSGQSFFVRNKKVRRAPLSEGPHSLGCYNPMMEDGISYTTLRFPEMNIPRTGDAESSEMQRPPPDCDDTVTYSALHKRQVGDYENVIPDFPEDEGIHYSELIQFGVGERPQAQENVDYVILKH

SEQ ID NO: 2270 - protein, 759 aa, Homo sapiens
MHLLGPWLLLLVLEYLAFSDSSKWVFEHPETLYAWEGACVWIPCTYRALDGDLESFILFHNPEYNKNTSKFDGTRLYESTKDGKVPSEQKRVQFLGDKNKNCTLSIHPVHLNDSGQLGLRMESKTEKWMERIHLNVSERPFPPHIQLPPEIQESQEVTLTCLLNFSCYGYPIQLQWLLEGVPMRQAAVTSTSLTIKSVFTRSELKFSPQWSHHGKIVTCQLQDADGKFLSNDTVQLNVKHTPKLEIKVTPSDAIVREGDSVTMTCEVSSSNPEYTTVSWLKDGTSLKKQNTFTLNLREVTKDQSGKYCCQVSNDVGPGRSEEVFLQVQYPPKKVTTVIQNPMPIREGDTVTLSCNYNSSNPSVTRYEWKPHGAWEEPSLGVLKIQNVGWDNTTIACAACNSWCSWASPVALNVQYAPRDVRVRKIKPLSEIHSGNSVSLQCDFSSSHPKEVQFFWEKNGRLLGKESQLNFDSISPEDAGSYSCWVNNSIGQTASKAWTLEVLYAPRRLRVSMSPGDQVMEGKSATLTCESDANPPVSHYTWFDWNNQSLPYHSQKLRLEPVKVQHSGAYWCQGTNSVGKGRSPLSTLTVYYSPETIGRRVAVGLGSCLAILILAICGLKLQRRWKRTQSQQGLQENSSGQSFFVRNKKVRRAPLSEGPHSLGCYNPMMEDGISYTTLRFPEMNIPRTGDAESSEMQRPPPDCDDTVTYSALHKRQVGDYENVIPDFPEDEGIHYSELIQFGVGERPQAQENVDYVILKH

SEQ ID NO: 2271 - protein, 751 aa, Homo sapiens
MHLLGPWLLLLVLEYLAFSDSSKWVFEHPETLYAWEGACVWIPCTYRALDGDLESFILFHNPEYNKNTSKFDGTRLYESTKDGKVPSEQKRVQFLGDKNKNCTLSIHPVHLNDSGQLGLRMESKTEKWMERIHLNVSERPFPPHIQLPPEIQESQEVTLTCLLNFSCYGYPIQLQWLLEGVPMRQAAVTSTSLTIKSVFTRSELKFSPQWSHHGKIVTCQLQDADGKFLSNDTVQLNVKHTPKLEIKVTPSDAIVREGDSVTMTCEVSSSNPEYTTVSWLKDGTSLKKQNTFTLNLREVTKDQSGKYCCQVSNDVGPGRSEEVFLQVQYAPEPSTVQILHSPAVEGSQVEFLCMSLANPLPTNYTWYHNGKEMQGRTEEKVHIPKILPWHAGTYSCVAENILGTGQRGPGAELDVQYPPKKVTTVIQNPMPIREGDTVTLSCNYNSSNPSVTRYEWKPHGAWEEPSLGVLKIQNVGWDNTTIACAACNSWCSWASPVALNVQYAPRDVRVRKIKPLSEIHSGNSVSLQCDFSSSHPKEVQFFWEKNGRLLGKESQLNFDSISPEDAGSYSCWVNNSIGQTASKAWTLEVLYAPRRLRVSMSPGDQVMEGKSATLTCESDANPPVSHYTWFDWNNQSLPYHSQKLRLEPVKVQHSGAYWCQGTNSVGKGRSPLSTLTVYYSPETIGRRVAVGLGSCLAILILAICGLKLQRRWKRTQSQQGLQENSSGQSFFVRNKKRCRVLRDAETSPGLR

SEQ ID NO: 2272 - protein, 38 aa, Homo sapiens
MHLLGPWLLLLVNGFLSTLKPSTPGRGPASGSPAPTEP

SEQ ID NO: 2273 - protein, 675 aa, Homo sapiens
MSLWLLEGVPMRQAAVTSTSLTIKSVFTRSELKFSPQWSHHGKIVTCQLQDADGKFLSNDTVQLNVKHTPKLEIKVTPSDAIVREGDSVTMTCEVSSSNPEYTTVSWLKDGTSLKKQNTFTLNLREVTKDQSGKYCCQVSNDVGPGRSEEVFLQVQYAPEPSTVQILHSPAVEGSQVEFLCMSLANPLPTNYTWYHNGKEMQGRTEEKVHIPKILPWHAGTYSCVAENILGTGQRGPGAELDVQYPPKKVTTVIQNPMPIREGDTVTLSCNYNSSNPSVTRYEWKPHGAWEEPSLGVLKIQNVGWDNTTIACAACNSWCSWASPVALNVQYAPRDVRVRKIKPLSEIHSGNSVSLQCDFSSSHPKEVQFFWEKNGRLLGKESQLNFDSISPEDAGSYSCWVNNSIGQTASKAWTLEVLYAPRRLRVSMSPGDQVMEGKSATLTCESDANPPVSHYTWFDWNNQSLPYHSQKLRLEPVKVQHSGAYWCQGTNSVGKGRSPLSTLTVYYSPETIGRRVAVGLGSCLAILILAICGLKLQRRWKRTQSQQGLQENSSGQSFFVRNKKVRRAPLSEGPHSLGCYNPMMEDGISYTTLRFPEMNIPRTGDAESSEMQRPPPDCDDTVTYSALHKRQVGDYENVIPDFPEDEGIHYSELIQFGVGERPQAQENVDYVILKH

SEQ ID NO: 2274 - protein, 145 aa, Homo sapiens
NPLPTNYTWYHNGKEMQGRTEEKVHIPKILPWHAGTYSCVAENILGTGQRGPGAELDVQYPPKKVTTVIQNPMPIREGDTVTLSCNYNSSNPSVTRYEWKPHGAWEEPSLGVLKIQNVGWDNTTIACAACNSWCSWASPVALNVQ

SEQ ID NO: 2275 - protein, 148 aa, Homo sapiens
VLEYLAFSDSSKWVFEHPETLYAWEGACVWIPCTYRALDGDLESFILFHNPEYNKNTSKFDGTRLYESTKDGKVPSEQKRVQFLGDKNKNCTLSIHPVHLNDSGQLGLRMESKTEKWMERIHLNVSVESPWEDCDLPASGCRWEVPLQ

SEQ ID NO: 2276 - protein, 37 aa, Homo sapiens
IVIPDVTVSDSGLYRCYLQASAGENETFVMRLTVAEG

SEQ ID NO: 2277 - protein, 127 aa, Homo sapiens
MDYPTLLLALLHVYRALCEEVLWHTSVPFAENMSLECVYPSMGILTQVEWFKIGTQQDSIAIFSPTHGMVIRKPYAERVYFLNSTMASNNMTLFFRNASEDDVGYYSCSLYTYPQGTWQKVIQVVQS

SEQ ID NO: 2278 - protein, 132 aa, Homo sapiens
MDYPTLLLALLHVYRALCEEVLWHTSVPFAENMSLECVYPSMGILTQVEWFKIGTQQDSIAIFSPTHGMVIRKPYAERVYFLNSTMASNNMTLFFRNASEDDVGYYSCSLYTYPQGTWQKVIQVVQSDSFEA

SEQ ID NO: 2279 - protein, 336 aa, Homo sapiens
MDYPTLLLALLHVYRALCEEVLWHTSVPFAENMSLECVYPSMGILTQVEWFKIGTQQDSIAIFSPTHGMVIRKPYAERVYFLNSTMASNNMTLFFRNASEDDVGYYSCSLYTYPQGTWQKVIQVVQSDSFEAAVPSNSHIVSEPGKNVTLTCQPQMTWPVQAVRWEKIQPRQIDLLTYCNLVHGRNFTSKFPRQIVSNCSHGRWSVIVIPDVTVSDSGLYRCYLQASAGENETFVMRLTVAEGKTDNQYTLFVAGGTVLLLLFVISITTIIVIFLNRRRRRERRDLFTESWDTQKAPNNYRSPISTSQPTNQSMDDTREDIYVNYPTFSRRPKTRV

SEQ ID NO: 2280 - protein, 276 aa, Homo sapiens
MDYPTLLLALLHVYRALCEEVLWHTSVPFAENMSLECVYPSMGILTQVEWFKIGTQQDSIAIFSPTHGMVIRKPYAERVYFLNSTMASNNMTLFFRNASEDDVGYYSCSLYTYPQGTWQKVIQVVQSDSFEAAVPSNSHIVSEPGKNVTLTCQPQMTWPVQAVRWEKIQPRQIDLLTYCNLVHGRNFTSKFPRQIVSNCSHGRWSVIVIPDVTVSDSGLYRCYLQASAGENETFVMRLTVAEGKTDNQYTLFVAGGTVLLLLFVISITTIIVIFLN

SEQ ID NO: 2281 - protein, 336 aa, Homo sapiens; identical to SEQ ID NO: 2279

SEQ ID NO: 2282 - protein, 181 aa, Homo sapiens
MTWPVQAVRWEKIQPRQIDLLTYCNLVHGRNFTSKFPRQIVSNCSHGRWSVIVIPDVTVSDSGLYRCYLQASAGENETFVMRLTVAEGKTDNQYTLFVAGGTVLLLLFVISITTIIVIFLNRRRRRERRDLFTESWDTQKAPNNYRSPISTSQPTNQSMDDTREDIYVNYPTFSRRPKTRV

SEQ ID NO: 2283 - protein, 181 aa, Homo sapiens; identical to SEQ ID NO: 2282

SEQ ID NO: 2284 - protein, 80 aa, Homo sapiens
MGRAMVARLGLGLLLLALLLPTQIYSSETTTGTSSNSSQSTSNSGLAPNPTNATTKAAGGALQSTASLFVVSLSLLHLYS

SEQ ID NO: 2285 - protein, 80 aa, Homo sapiens; identical to SEQ ID NO: 2284

SEQ ID NO: 2286 - protein, 80 aa, Homo sapiens; identical to SEQ ID NO: 2284

SEQ ID NO: 2287 - protein, 37 aa, Homo sapiens
MGRAMVARLGLGLLLLALLLPTQKMLRIPNLIDLKNM

SEQ ID NO: 2288 - protein, 129 aa, Homo sapiens
MVGRFCPESPPGFVRVAATSAVSLDPPSGEPRPGCGYPGPRSAASRVYGCTAPARETGGWAWETLAGAGAKKIYSSETTTGTSSNSSQSTSNSGLAPNPTNATTKAAGGALQSTASLFVVSLSLLHLYS

SEQ ID NO: 2289 - protein, 88 aa, Homo sapiens
  SITE 1: note = misc_feature - Xaa can be any naturally occurring amino acid
XDRSGPGHRLRGAPTSREGFALGGARVPSARIYSSETTTGTSSNSSQSTSNSGLAPNPTNATTKAAGGALQSTASLFVVSLSLLHLYS

SEQ ID NO: 2290 - protein, 122 aa, Homo sapiens
  SITE 1: note = misc_feature - Xaa can be any naturally occurring amino acid
XLSSAAGREITLPEGSRRPPPTRSHWNSQPLSGPRGAFCSLSGNALAPGQAATPPQRRRGLFFWGIYSSETTTGTSSNSSQSTSNSGLAPNPTNATTKAAGGALQSTASLFVVSLSLLHLYS

SEQ ID NO: 2291 - protein, 38 aa, Homo sapiens
MLRRRGSPGMGVHVGAALGALWFCLTADRYQTAGAQLC

SEQ ID NO: 2292 - protein, 38 aa, Homo sapiens; identical to SEQ ID NO: 2291

SEQ ID NO: 2293 - protein, 51 aa, Homo sapiens
MLRRRGSPGMGVHVGAALGALWFCLTGALEVQVPEDPVVALVGTDATLCCS

SEQ ID NO: 2294 - protein, 133 aa, Homo sapiens
MLRRRGSPGMGVHVGAALGALWFCLTGALEVQVPEDPVVALVGTDATLCCSFSPEPGFSLAQLNLIWQLTDTKQLVHSFAEGQDQGSAYANRTALFPDLLAQGNASLRLQRVRVADEGSFTCFVSIRDFGSAA

SEQ ID NO: 2295 - protein, 133 aa, Homo sapiens; identical to SEQ ID NO: 2294

SEQ ID NO: 2296 - protein, 136 aa, Homo sapiens
MLRRRGSPGMGVHVGAALGALWFCLTGALEVQVPEDPVVALVGTDATLCCSFSPEPGFSLAQLNLIWQLTDTKQLVHSFAEGQDQGSAYANRTALFPDLLAQGNASLRLQRVRVADEGSFTCFVSIRDFGSAAVSL

SEQ ID NO: 2297 - protein, 156 aa, Homo sapiens
MLRRRGSPGMGVHVGAALGALWFCLTGALEVQVPEDPVVALVGTDATLCCSFSPEPGFSLAQLNLIWQLTDTKQLVHSFAEGQDQGSAYANRTALFPDLLAQGNASLRLQRVRVADEGSFTCFVSIRDFGSAAVSLQVAAPYSKPSMTLEPNKDLR

SEQ ID NO: 2298 - protein, 165 aa, Homo sapiens
MLRRRGSPGMGVHVGAALGALWFCLTGALEVQVPEDPVVALVGTDATLCCSFSPEPGFSLAQLNLIWQLTDTKQLVHSFAEGQDQGSAYANRTALFPDLLAQGNASLRLQRVRVADEGSFTCFVSIRDFGSAAVSLQVAAPYSKPSMTLEPNKDLRPGDTVTITC

SEQ ID NO: 2299 - protein, 534 aa, Homo sapiens
MLRRRGSPGMGVHVGAALGALWFCLTGALEVQVPEDPVVALVGTDATLCCSFSPEPGFSLAQLNLIWQLTDTKQLVHSFAEGQDQGSAYANRTALFPDLLAQGNASLRLQRVRVADEGSFTCFVSIRDFGSAAVSLQVAAPYSKPSMTLEPNKDLRPGDTVTITCSSYQGYPEAEVFWQDGQGVPLTGNVTTSQMANEQGLFDVHSILRVVLGANGTYSCLVRNPVLQQDAHSSVTITPQRSPTGAVEVQVPEDPVVALVGTDATLRCSFSPEPGFSLAQLNLIWQLTDTKQLVHSFTEGRDQGSAYANRTALFPDLLAQGNASLRLQRVRVADEGSFTCFVSIRDFGSAAVSLQVAAPYSKPSMTLEPNKDLRPGDTVTITCSSYRGYPEAEVFWQDGQGVPLTGNVTTSQMANEQGLFDVHSVLRVVLGANGTYSCLVRNPVLQQDAHGSVTITGQPMTFPPEALWVTVGLSVCLIALLVALAFVCWRKIKQSCEEENAGAEDQDGEGEGSKTALQPLKHSDSKEDDGQEIA

SEQ ID NO: 2300 - protein, 533 aa, Homo sapiens
MLRRRGSPGMGVHVGAALGALWFCLTGALEVQVPEDPVVALVGTDATLCCSFSPEPGFSLAQLNLIWQLTDTKQLVHSFAEGQDQGSAYANRTALFPDLLAQGNASLRLQRVRVADEGSFTCFVSIRDFGSAAVSLQVAAPYSKPSMTLEPNKDLRPGDTVTITCSSYQGYPEAEVFWQDGQGVPLTGNVTTSQMANEQGLFDVHSILRVVLGANGTYSCLVRNPVLQQDAHSSVTITPQRSPTGAVEVQVPEDPVVALVGTDATLRCSFSPEPGFSLAQLNLIWQLTDTKQLVHSFTEGRDQGSAYANRTALFPDLLAQGNASLRLQRVRVADEGSFTCFVSIRDFGSAAVSLQVAAPYSKPSMTLEPNKDLRPGDTVTITCSSYRGYPEAEVFWQDGQGVPLTGNVTTSQMANEQGLFDVHSVLRVVLGANGTYSCLVRNPVLQQDAHGSVTITGQPMTFPPEALWVTVGLSVCLIALLVALAFVCWRKIKQSCEEENAGAEDQDGEGEGSKTALQPLKHSDSKEGKDTWA

SEQ ID NO: 2301 - protein, 316 aa, Homo sapiens
MLRRRGSPGMGVHVGAALGALWFCLTGALEVQVPEDPVVALVGTDATLCCSFSPEPGFSLAQLNLIWQLTDTKQLVHSFAEGQDQGSAYANRTALFPDLLAQGNASLRLQRVRVADEGSFTCFVSIRDFGSAAVSLQVAAPYSKPSMTLEPNKDLRPGDTVTITCSSYRGYPEAEVFWQDGQGVPLTGNVTTSQMANEQGLFDVHSVLRVVLGANGTYSCLVRNPVLQQDAHGSVTITGQPMTFPPEALWVTVGLSVCLIALLVALAFVCWRKIKQSCEEENAGAEDQDGEGEGSKTALQPLKHSDSKEDDGQEIA

SEQ ID NO: 2302 - protein, 316 aa, Homo sapiens; identical to SEQ ID NO: 2301

SEQ ID NO: 2303 - protein, 146 aa, Homo sapiens
MSLKAPMSSRKKKLYLQQHCEAGAAFHHGEPSCQPPHRKMLRRRGSPGMGVHVGAALGALWFCLTGALEVQVPEDPVVALVGTDATLCCSFSPEPGFSLAQLNLIWQLTDTKQLVHSFAEGQDQGSAYANRTALFPDLLAQGNASL

SEQ ID NO: 2304 - protein, 388 aa, Homo sapiens
MTLEPNKDLRPGDTVTITCSSYQGYPEAEVFWQDGQGVPLTGNVTTSQMANEQGLFDVHSILRVVLGANGTYSCLVRNPVLQQDAHSSVTITPQRSPTGAVEVQVPEDPVVALVGTDATLRCSFSPEPGFSLAQLNLIWQLTDTKQLVHSFTEGRDQGSAYANRTALFPDLLAQGNASLRLQRVRVADEGSFTCFVSIRDFGSAAVSLQVAAPYSKPSMTLEPNKDLRPGDTVTITCSSYRGYPEAEVFWQDGQGVPLTGNVTTSQMANEQGLFDVHSVLRVVLGANGTYSCLVRNPVLQQDAHGSVTITGQPMTFPPEALWVTVGLSVCLIALLVALAFVCWRKIKQSCEEENAGAEDQDGEGEGSKTALQPLKHSDSKEDDGQEIA

SEQ ID NO: 2305 - protein, 199 aa, Homo sapiens
  SITE 1: note = misc_feature - Xaa can be any naturally occurring amino acid
XRVRVADEGSFTCFVSIRDFGSAAVSLQVAAPYSKPSMTLEPNKDLRPGDTVTITCSSYRGYPEAEVFWQDGQGVPLTGNVTTSQMANEQGLFDVHSVLRVVLGANGTYSCLVRNPVLQQDAHGSVTITEALWVTVGLSVCLIALLVALAFVCWRKIKQSCEEENAGAEDQDGEGEGSKTALQPLKHSDSKEDDGQEIA

SEQ ID NO: 2306 - protein, 170 aa, Homo sapiens
  SITE 1: note = misc_feature - Xaa can be any naturally occurring amino acid
XTLEPNKDLRPGDTVTITCSSYRGYPEAEVFWQDGQGVPLTGNVTTSQMANEQGLFDVHSVLRVVLGANGTYSCLVRNPVLQQDAHGSVTITGQPMTFPPEALWVTVGLSVCLIALLVALAFVCWRKIKQSCEEENAGAEDQDGEGEGSKTALQPLKHSDSKEDDGQEIA

SEQ ID NO: 2307 - protein, 169 aa, Homo sapiens
MTPASITAAKTSTITTAFPPVSSTTLFAVGATHSASIQEETEEVVNSQLPLLLSLLALLLLLLVGASLLAWRMFQKWIKAGDHSELSQNPKQAATQSELHYANLELLMWPLQEKPAPPREVEVEYSTVASPREELHYASVVFDSNTNRIAAQRPREEEPDSDYSVIRKT

SEQ ID NO: 2308 - protein, 103 aa, Homo sapiens
MWLPWALLLLWVPAGDHSELSQNPKQAATQSELHYANLELLMWPLQEKPAPPREVEVEYSTVASPREELHYASVVFDSNTNRIAAQRPREEEPDSDYSVIRKT

SEQ ID NO: 2309 - protein, 186 aa, Homo sapiens
MWLPWALLLLWVPASTSMTPASITAAKTSTITTAFPPVSSTTLFAVGATHSASIQEETEEVVNSQLPLLLSLLALLLLLLVGASLLAWRMFQKWIKAGDHSELSQNPKQAATQSELHYANLELLMWPLQEKPAPPREVEVEYSTVASPREELHYASVVFDSNTNRIAAQRPREEEPDSDYSVIRKT

SEQ ID NO: 2310 - protein, 150 aa, Homo sapiens
MWLPWALLLLWVPASTSMTPASITAAKTSTITTAFPPVSSTTLFAVGATHSASIQEETEEVVNSQLPLLLSLLALLLLLLVGASLLAWRMFQKWIKAGDHSELSQNPKQASPREELHYASVVFDSNTNRIAAQRPREEEPDSDYSVIRKT

SEQ ID NO: 2311 - protein, 299 aa, Homo sapiens
MWLPWALLLLWVPGCFALSKCRTVAGPVGGSLSVQCPYEKEHRTLNKYWCRPPQIFLCDKIVETKGSAGKRNGRVSIRDSPANLSFTVTLENLTEEDAGTYWCGVDTPWLRDFHDPVVEVEVSVFPASTSMTPASITAAKTSTITTAFPPVSSTTLFAVGATHSASIQEETEEVVNSQLPLLLSLLALLLLLLVGASLLAWRMFQKWIKAGDHSELSQNPKQAATQSELHYANLELLMWPLQEKPAPPREVEVEYSTVASPREELHYASVVFDSNTNRIAAQRPREEEPDSDYSVIRKT

SEQ ID NO: 2312 - protein, 148 aa, Homo sapiens
MWLPPALLLLSLSGCFSIQGPESVRAPEQGSLTVQCHYKQGWETYIKWWCRGVRWDTCKILIETRGSEQGEKSDRVSIKDNQKDRTFTVTMEGLRRDDADVYWCGIERRGPDLGTQVKVIVDPEGAASTTASSPTNSNMAVFIGSHKR

SEQ ID NO: 2313 - protein, 201 aa, Homo sapiens
MWLPPALLLLSLSGCFSIQGPESVRAPEQGSLTVQCHYKQGWETYIKWWCRGVRWDTCKILIETRGSEQGEKSDRVSIKDNQKDRTFTVTMEGLRRDDADVYWCGIERRGPDLGTQVKVIVDPEGAASTTASSPTNSNMAVFIGSHKRNHYMLLVFVKVPILLILVTAILWLKGSQRVPEEPGEQPIYMNFSEPLTKDMAT

SEQ ID NO: 2314 - protein, 290 aa, Homo sapiens
MPLLTLYLLLFWLSGYSIVTQITGPTTVNGLERGSLTVQCVYRSGWETYLKWWCRGAIWRDCKILVKTSGSEQEVKRDRVSIKDNQKNRTFTVTMEDLMKTDADTYWCGIEKTGNDLGVTVQVTIDPAPVTQEETSSSPTLTGHHLDNRHKLLKLSVLLPLIFTILLLLLVAASLLAWRMMKYQQKAAGMSPEQVLQPLEGDLCYADLTLQLAGTSPQKATTKLSSAQVDQVEVEYVTMASLPKEDISYASLTLGAEDQEPTYCNMGHLSSHLPGRGPEEPTEYSTISRP

SEQ ID NO: 2315 - protein, 244 aa, Homo sapiens
MPLLTLYLLLFWLSGYSIVTQITGPTTVNGLERGSLTVQCVYRSGWETYLKWWCRGAIWRDCKILVKTSGSEQEVKRDRVSIKDNQKNRTFTVTMEDLMKTDADTYWCGIEKTGNDLGVTVQVTIDPAPVTQEETSSSPTLTGHHLDNRSEGSQAANYRPAAHQAQAPEAQCPPAPHLHHIAAAFGGRLTLGLEDDEVPAESSRDVPRAGTAAPGGRPLLCRPDPAAGRNLPAKGYHEAFLCPG

SEQ ID NO: 2316 - protein, 305 aa, Homo sapiens
MPLLTLYLLLFWLSGYSIVTQITGPTTVNGLERGSLTVQCVYRSGWETYLKWWCRGAIWRDCKILVKTSGSEQEVKRDRVSIKDNQKNRTFTVTMEDLMKTDADTYWCGIEKTGNDLGVTVQVTIDPASTPAPTTPTSTTFTAPVTQEETSSSPTLTGHHLDNRHKLLKLSVLLPLIFTILLLLLVAASLLAWRMMKYQQKAAGMSPEQVLQPLEGDLCYADLTLQLAGTSPQKATTKLSSAQVDQVEVEYVTMASLPKEDISYASLTLGAEDQEPTYCNMGHLSSHLPGRGPEEPTEYSTISRP

SEQ ID NO: 2317 - protein, 293 aa, Homo sapiens
MWLPQLDLMRVISAKSQGYSIVTQITGPTTVNGLERGSLTVQCVYRSGWETYLKWWCRGAIWRDCKILVKTSGSEQEVKRDRVSIKDNQKNRTFTVTMEDLMKTDADTYWCGIEKTGNDLGVTVQVTIDPAPVTQEETSSSPTLTGHHLDNRHKLLKLSVLLPLIFTILLLLLVAASLLAWRMMKYQQKAAGMSPEQVLQPLEGDLCYADLTLQLAGTSPQKATTKLSSAQVDQVEVEYVTMASLPKEDISYASLTLGAEDQEPTYCNMGHLSSHLPGRGPEEPTEYSTISRP

SEQ ID NO: 2318 - protein, 165 aa, Homo sapiens
MWLPQLDLMRVISAKSQGYSIVTQITGPTTVNGLERGSLTVQCVYRSGWETYLKWWCRGAIWRDCKILVKTSGSEQEVKRDRVSIKDNQKNRTFTVTMEDLMKTDADTYWCGIEKTGNDLGVTVQVTIDPAPVTQEETSSSPTLTGHHLDNRYCSPWRATSAMQT

SEQ ID NO: 2319 - protein, 194 aa, Homo sapiens
MWLPQLDLMRVISAKSQGYSIVTQITGPTTVNGLERGSLTVQCVYRSGWETYLKWWCRGAIWRDCKILVKTSGSEQEVKRDRVSIKDNQKNRTFTVTMEDLMKTDADTYWCGIEKTGNDLGVTVQVTIDPAPVTQEETSSSPTLTGHHLDNSSRDVPRAGTAAPGGRPLLCRPDPAAGRNLPAKGYHEAFLCPG

SEQ ID NO: 2320 - protein, 194 aa, Homo sapiens; identical to SEQ ID NO: 2319

SEQ ID NO: 2321 - protein, 239 aa, Homo sapiens
MWLPQLDLMRVISAKSQGYSIVTQITGPTTVNGLERGSLTVQCVYRSGWETYLKWWCRGAIWRDCKILVKTSGSEQEVKRDRVSIKDNQKNRTFTVTMEDLMKTDADTYWCGIEKTGNDLGVTVQVTIDPASTPAPTTPTSTTFTAPVTQEETSSSPTLTGHHLDNRHKLLKLSVLLPLIFTILLLLLVAASLLAWRMMKYQQKGTAAPGGRPLLCRPDPAAGRNLPAKGYHEAFLCPG

SEQ ID NO: 2322 - protein, 239 aa, Homo sapiens; identical to SEQ ID NO: 2321

SEQ ID NO: 2323 - protein, 273 aa, Homo sapiens
MRLLVLLWGCLLLPGYEALEGPEEISGFEGDTVSLQCTYREELRDHRKYWCRKGGILFSRCSGTIYAEEEGQETMKGRVSIRDSRQELSLIVTLWNLTLQDAGEYWCGVEKRGPDESLLISLFVFPASPGLYPAATTAKQGKTGAEAPPLPGTSQYGHERTSQYTGTSPHPATSPPAGSSRPPMQLDSTSAEDTSPALSSGSSKPRVSIPMVRILAPVLVLLSLLSAAGLIAFCSHLLLWRKEAQQATETQRNEKFCLSRLNSLMFSLSLPWL

SEQ ID NO: 2324 - protein, 150 aa, Homo sapiens
MRLLVLLWGCLLLPGYEALEGPEEISGFEGDTVSLQCTYREELRDHRKYWCRKGGILFSRCSGTIYAEEEGQETMKGRVSIRDSRQELSLIVTLWNLTLQDAGEYWCGVEKRGPDESLLISLFVFPGNRYLSFPRLGTGAAEGRGRGGGA

SEQ ID NO: 2325 - protein, 332 aa, Homo sapiens
MRLLVLLWGCLLLPGYEALEGPEEISGFEGDTVSLQCTYREELRDHRKYWCRKGGILFSRCSGTIYAEEEGQETMKGRVSIRDSRQELSLIVTLWNLTLQDAGEYWCGVEKRGPDESLLISLFVFPGPCCPPSPSPTFQPLATTRLQPKAKAQQTQPPGLTSPGLYPAATTAKQGKTGAEAPPLPGTSQYGHERTSQYTGTSPHPATSPPAGSSRPPMQLDSTSAEDTSPALSSGSSKPRVSIPMVRILAPVLVLLSLLSAAGLIAFCSHLLLWRKEAQQATETQRNEKFCLSRLTAEEKEAPSQAPEGDVISMPPLHTSEEELGFSKFVSA

SEQ ID NO: 2326 - protein, 307 aa, Homo sapiens
MRLLVLLWGCLLLPGYEALEGPEEISGFEGDTVSLQCTYREELRDHRKYWCRKGGILFSRCSGTIYAEEEGQETMKGRVSIRDSRQELSLIVTLWNLTLQDAGEYWCGVEKRGPDESLLISLFVFPGPCCPPSPSPTFQPLATTRLQPKAKAQQTQPPGLTSPGLYPAATTAKQGKTGAEAPPLPGTSQYGHERTSQYTGTSPHPATSPPAGSSRPPMQLDSTSAEDTSPALSSGSSKPRVSIPMVRILAPVLVLLSLLSAAGLIAFCSHLLLWRKEAQQATETQRNEKFCLSRLNSLMFSLSLPWL

SEQ ID NO: 2327 - protein, 233 aa, Homo sapiens
MRLLVLLWGCLLLPGYEALEGPEEISGFEGDTVSLQCTYREELRDHRKYWCRKGGILFSRCSGTIYAEEEGQETMKGRVSIRDSRQELSLIVTLWNLTLQDAGEYWCGVEKRGPDESLLISLFVFPGSSRPPMQLDSTSAEDTSPALSSGSSKPRVSIPMVRILAPVLVLLSLLSAAGLIAFCSHLLLWRKEAQQATETQRNEKFCLSRLNHRTSELDPDEAFEISSLTFLSV

SEQ ID NO: 2328 - protein, 222 aa, Homo sapiens
MRLLVLLWGCLLLPGYEALEGPEEISGFEGDTVSLQCTYREELRDHRKYWCRKGGILFSRCSGTIYAEEEGQETMKGRVSIRDSRQELSLIVTLWNLTLQDAGEYWCGVEKRGPDESLLISLFVFPGSSRPPMQLDSTSAEDTSPALSSGSSKPRVSIPMVRILAPVLVLLSLLSAAGLIAFCSHLLLWRKEAQQATETQRNEKFCLSRLNSLMFSLSLPWL

SEQ ID NO: 2329 - protein, 98 aa, Homo sapiens
MEHSTFLSGLVLATLLSQVCQSCVELDPATVAGIIVTDVIATLLLALGVFCFAGHETGRLSGAADTQALLRNDQVYQPLRDRDDAQYSHLGGNWARNK

SEQ ID NO: 2330 - protein, 171 aa, Homo sapiens
MEHSTFLSGLVLATLLSQVSPFKIPIEELEDRVFVNCNTSITWVEGTVGTLLSDITRLDLGKRILDPRGIYRCNGTDIYKDKESTVQVHYRMCQSCVELDPATVAGIIVTDVIATLLLALGVFCFAGHETGRLSGAADTQALLRNDQVYQPLRDRDDAQYSHLGGNWARNK

SEQ ID NO: 2331 - protein, 127 aa, Homo sapiens
MEHSTFLSGLVLATLLSQVSPFKIPIEELEDRVFVNCNTSITWVEGTVGTLLSDITRLDLGKRILDPRGIYRCNGTDIYKDKESTVQVHYRTADTQALLRNDQVYQPLRDRDDAQYSHLGGNWARNK

SEQ ID NO: 2332 - protein, 132 aa, Homo sapiens
  SITE 1: note = misc_feature - Xaa can be any naturally occurring amino acid
XSRCFSGPCSPYSSSVVWIHFQEVSPFKIPIEELEDRVFVNCNTSITWVEGTVGTLLSDITRLDLGKRILDPRGIYRCNGTDIYKDKESTVQVHYRTADTQALLRNDQVYQPLRDRDDAQYSHLGGNWARNK

SEQ ID NO: 2333 - protein, 45 aa, Homo sapiens
MNRGVPFRHLLLVLQLALLPAATQGKKVVLGKKGDTVELTCTASQ

SEQ ID NO: 2334 - protein, 458 aa, Homo sapiens
MNRGVPFRHLLLVLQLALLPAATQGKKVVLGKKGDTVELTCTASQKKSIQFHWKNSNQIKILGNQGSFLTKGPSKLNDRADSRRSLWDQGNFPLIIKNLKIEDSDTYICEVEDQKEEVQLLVFGLTANSDTHLLQGQSLTLTLESPPGSSPSVQCRSPRGKNIQGGKTLSVSQLELQDSGTWTCTVLQNQKKVEFKIDIVVLAFQKASSIVYKKEGEQVEFSFPLAFTVEKLTGSGELWWQAERASSSKSWITFDLKNKEVSVKRVTQDPKLQMGKKLPLHLTLPQALPQYAGSGNLTLALEAKTGKLHQEVNLVVMRATQLQKNLTCEVWGPTSPKLMLSLKLENKEAKVSKREKAVWVLNPEAGMWQCLLSDSGQVLLESNIKVLPTWSTPVQPMALIVLGGVAGLLLFIGLGIFFCVRCRHRRRQAERMSQIKRLLSEKKTCQCPHRFQKTCSPI

SEQ ID NO: 2335 - protein, 148 aa, Homo sapiens
MNRGVPFRHLLLVLQLGPSKLNDRADSRRSLWDQGNFPLIIKNLKIEDSDTYICEVEDQKEEVQLLVFGLTANSDTHLLQGQSLTLTLESPPGSSPSVQCRSPRGKNIQGGKTLSVSQLELQDSGTWTCTVLQNQKKVEFKIDIVVLG

SEQ ID NO: 2336 - protein, 203 aa, Homo sapiens
MVRLPLQCVLWGCLLTAVHPEPPTACREKQYLINSQCCSLCQPGQKLVSDCTEFTETECLPCGESEFLDTWNRETHCHQHKYCDPNLGLRVQQKGTSETDTICTCEEGWHCTSEACESCVLHRSCSPGFGVKQIATGVSDTICEPCPVGFFSNVSSAFEKCHPWTRSPGSAESPGGDPHHLRDPVCHPLGAGLYQKGGQEANQ

SEQ ID NO: 2337 - protein, 277 aa, Homo sapiens
MVRLPLQCVLWGCLLTAVHPEPPTACREKQYLINSQCCSLCQPGQKLVSDCTEFTETECLPCGESEFLDTWNRETHCHQHKYCDPNLGLRVQQKGTSETDTICTCEEGWHCTSEACESCVLHRSCSPGFGVKQIATGVSDTICEPCPVGFFSNVSSAFEKCHPWTSCETKDLVVQQAGTNKTDVVCGPQDRLRALVVIPIIFGILFAILLVLVFIKKVAKKPTNKAPHPKQEPQEINFPDDLPGSNTAAPVQETLHGCQPVTQEDGKESRISVQERQ

SEQ ID NO: 2338 - protein, 151 aa, Homo sapiens
MVRLPLQCVLWGCLLTAVHPEPPTACREKQYLINSQCCSLCQPGQKLVSDCTEFTETECLPCGESEFLDTWNRETHCHQHKYCDPNLGLRVQQKGTSETDTICTCEEGWHCTSEACESCVLHRSCSPGFGVKQIDICQPHFPKDRGLNLLM

SEQ ID NO: 2339 - protein, 159 aa, Homo sapiens
  SITE 1: note = misc_feature - Xaa can be any naturally occurring amino acid
XRLPLQCVLWGCLLTAVHPEPPTACREKQYLINSQCCSLCQPGQKLVSDCTEFTETECLPCGESEFLDTWNRETHCHQHKYCDPNLGLRVQQKGTSETDTICTCEEGWHCTSEACESCVLHRSCSPGFGVKQIAVRPKTWLCNRQAQTRLMLSVVPRIG

SEQ ID NO: 2340 - protein, 176 aa, Homo sapiens
DTYCFNASAPPEEDCTSVTGPLSMTTQQSNSQSFSTSHEGLEEDKDHPTTSTLTSSNRNDVTGGRRDPNHSEGSTTLLEGYTSHYPHTKESRTFIPVTSAKTGSFGVTAVTVGDSNSNVNRSLSGDQDTFHPSGGSHTTHGSESDGHSHGSQEGGANTTSGPIRTPQIPEWLIILA

SEQ ID NO: 2341 - protein, 269 aa, Homo sapiens
EDCTSVTDLPNAFDGPITITIVNRDGTRYVQKGEYRTNPEDIYPSNPTDDDVSSGSSSERSSTSGGYIFYTFSTVHPIPDEDSPWITDSTDRIPATIQATPSSTTEETATQKEQWFGNRWHEGYRQTPKEDSHSTTGTAAASAHTSHPMQGRTTPSPEDSSWTDFFNPISHPMGRGHQAGRRMDMDSSHSITLQPTANPNTGLVEDLDRTGPLSMTTQQSNSQSFSTSHEGLEEDKDHPTTSTLTSSNRNDVTGGRRDPNHSEGSTTLL

SEQ ID NO: 2342 - protein, 193 aa, Homo sapiens
IYPSNPTDDDVSSGSSSERSSTSGGYIFYTFSTVHPIPDEDSPWITDSTDRIPATSTSSNTISAGWEPNEENEDERDRHLSFSGSGIDDDEDFISSTNMDSSHSITLQPTANPNTGLVEDLDRTGPLSMTTQQSNSQSFSTSHEGLEEDKDHPTTSTLTSSNRNDVTGGRRDPNHSEGSTTLLEGYTSHYPHT

SEQ ID NO: 2343 - protein, 78 aa, Homo sapiens
MDKFWWHAAWGLCLVPLSLAQIDLNITCRFAGVFHVEKNGRYSISRTEAADLCKAFNSTLPTMAQMEKALSIGFETCR

SEQ ID NO: 2344 - protein, 493 aa, Homo sapiens
MDKFWWHAAWGLCLVPLSLAQIDLNITCRFAGVFHVEKNGRYSISRTEAADLCKAFNSTLPTMAQMEKALSIGFETCRYGFIEGHVVIPRIHPNSICAANNTGVYILTSNTSQYDTYCFNASAPPEEDCTSVTDLPNAFDGPITITIVNRDGTRYVQKGEYRTNPEDIYPSNPTDDDVSSGSSSERSSTSGGYIFYTFSTVHPIPDEDSPWITDSTDRIPATNMDSSHSITLQPTANPNTGLVEDLDRTGPLSMTTQQSNSQSFSTSHEGLEEDKDHPTTSTLTSSNRNDVTGGRRDPNHSEGSTTLLEGYTSHYPHTKESRTFIPVTSAKTGSFGVTAVTVGDSNSNVNRSLSGDQDTFHPSGGSHTTHGSESDGHSHGSQEGGANTTSGPIRTPQIPEWLIILASLLALALILAVCIAVNSRRRCGQKKKLVINSGNGAVEDRKPSGLNGEASKSQEMVHLVNKESSETPDQFMTADETRNLQNVDMKIGV

SEQ ID NO: 2345 - protein, 429 aa, Homo sapiens
MDKFWWHAAWGLCLVPLSLAQIDLNITCRFAGVFHVEKNGRYSISRTEAADLCKAFNSTLPTMAQMEKALSIGFETCRYGFIEGHVVIPRIHPNSICAANNTGVYILTSNTSQYDTYCFNASAPPEEDCTSVTDLPNAFDGPITITIVNRDGTRYVQKGEYRTNPEDIYPSNPTDDDVSSGSSSERSSTSGGYIFYTFSTVHPIPDEDSPWITDSTDRIPATNRNDVTGGRRDPNHSEGSTTLLEGYTSHYPHTKESRTFIPVTSAKTGSFGVTAVTVGDSNSNVNRSLSGDQDTFHPSGGSHTTHGSESDGHSHGSQEGGANTTSGPIRTPQIPEWLIILASLLALALILAVCIAVNSRRRCGQKKKLVINSGNGAVEDRKPSGLNGEASKSQEMVHLVNKESSETPDQFMTADETRNLQNVDMKIGV

SEQ ID NO: 2346 - protein, 361 aa, Homo sapiens
MDKFWWHAAWGLCLVPLSLAQIDLNITCRFAGVFHVEKNGRYSISRTEAADLCKAFNSTLPTMAQMEKALSIGFETCRYGFIEGHVVIPRIHPNSICAANNTGVYILTSNTSQYDTYCFNASAPPEEDCTSVTDLPNAFDGPITITIVNRDGTRYVQKGEYRTNPEDIYPSNPTDDDVSSGSSSERSSTSGGYIFYTFSTVHPIPDEDSPWITDSTDRIPATRDQDTFHPSGGSHTTHGSESDGHSHGSQEGGANTTSGPIRTPQIPEWLIILASLLALALILAVCIAVNSRRRCGQKKKLVINSGNGAVEDRKPSGLNGEASKSQEMVHLVNKESSETPDQFMTADETRNLQNVDMKIGV

SEQ ID NO: 2347 - protein, 340 aa, Homo sapiens
MDKFWWHAAWGLCLVPLSLAQIDLNITCRFAGVFHVEKNGRYSISRTEAADLCKAFNSTLPTMAQMEKALSIGFETCRYGFIEGHVVIPRIHPNSICAANNTGVYILTSNTSQYDTYCFNASAPPEEDCTSVTDLPNAFDGPITITIVNRDGTRYVQKGEYRTNPEDIYPSNPTDDDVSSGSSSERSSTSGGYIFYTFSTVHPIPDEDSPWITDSTDRIPATRHSHGSQEGGANTTSGPIRTPQIPEWLIILASLLALALILAVCIAVNSRRRCGQKKKLVINSGNGAVEDRKPSGLNGEASKSQEMVHLVNKESSETPDQFMTADETRNLQNVDMKIGV

SEQ ID NO: 2348 - protein, 699 aa, Homo sapiens
MDKFWWHAAWGLCLVPLSLAQIDLNITCRFAGVFHVEKNGRYSISRTEAADLCKAFNSTLPTMAQMEKALSIGFETCRYGFIEGHVVIPRIHPNSICAANNTGVYILTSNTSQYDTYCFNASAPPEEDCTSVTDLPNAFDGPITITIVNRDGTRYVQKGEYRTNPEDIYPSNPTDDDVSSGSSSERSSTSGGYIFYTFSTVHPIPDEDSPWITDSTDRIPATSTSSNTISAGWEPNEENEDERDRHLSFSGSGIDDDEDFISSTISTTPRAFDHTKQNQDWTQWNPSHSNPEVLLQTTTRMTDVDRNGTTAYEGNWNPEAHPPLIHHEHHEEEETPHSTSTIQATPSSTTEETATQKEQWFGNRWHEGYRQTPKEDSHSTTGTAAASAHTSHPMQGRTTPSPEDSSWTDFFNPISHPMGRGHQAGRRMDMDSSHSITLQPTANPNTGLVEDLDRTGPLSMTTQQSNSQSFSTSHEGLEEDKDHPTTSTLTSSNRNDVTGGRRDPNHSEGSTTLLEGYTSHYPHTKESRTFIPVTSAKTGSFGVTAVTVGDSNSNVNRSLSGDQDTFHPSGGSHTTHGSESDGHSHGSQEGGANTTSGPIRTPQIPEWLIILASLLALALILAVCIAVNSRRRCGQKKKLVINSGNGAVEDRKPSGLNGEASKSQEMVHLVNKESSETPDQFMTADETRNLQNVDMKIGV

SEQ ID NO: 2349 - protein, 277 aa, Homo sapiens
MDKFWWHAAWGLCLVPLSLAQIDLNITCRFAGVFHVEKNGRYSISRTEAADLCKAFNSTLPTMAQMEKALSIGFETCRYGFIEGHVVIPRIHPNSICAANNTGVYILTSNTSQYDTYCFNASAPPEEDCTSVTDLPNAFDGPITITIVNRDGTRYVQKGEYRTNPEDIYPSNPTDDDVSSGSSSERSSTSGGYIFYTFSTVHPIPDEDSPWITDSTDRIPATTASAHTSHPMQGRTTPSPEDSSWTDFFNPISHPMGRGHQAGRRMDMDSSHSITLQ

SEQ ID NO: 2350 - protein, 742 aa, Homo sapiens
MDKFWWHAAWGLCLVPLSLAQIDLNITCRFAGVFHVEKNGRYSISRTEAADLCKAFNSTLPTMAQMEKALSIGFETCRYGFIEGHVVIPRIHPNSICAANNTGVYILTSNTSQYDTYCFNASAPPEEDCTSVTDLPNAFDGPITITIVNRDGTRYVQKGEYRTNPEDIYPSNPTDDDVSSGSSSERSSTSGGYIFYTFSTVHPIPDEDSPWITDSTDRIPATTLMSTSATATETATKRQETWDWFSWLFLPSESKNHLHTTTQMAGTSSNTISAGWEPNEENEDERDRHLSFSGSGIDDDEDFISSTISTTPRAFDHTKQNQDWTQWNPSHSNPEVLLQTTTRMTDVDRNGTTAYEGNWNPEAHPPLIHHEHHEEEETPHSTSTIQATPSSTTEETATQKEQWFGNRWHEGYRQTPKEDSHSTTGTAAASAHTSHPMQGRTTPSPEDSSWTDFFNPISHPMGRGHQAGRRMDMDSSHSITLQPTANPNTGLVEDLDRTGPLSMTTQQSNSQSFSTSHEGLEEDKDHPTTSTLTSSNRNDVTGGRRDPNHSEGSTTLLEGYTSHYPHTKESRTFIPVTSAKTGSFGVTAVTVGDSNSNVNRSLSGDQDTFHPSGGSHTTHGSESDGHSHGSQEGGANTTSGPIRTPQIPEWLIILASLLALALILAVCIAVNSRRRCGQKKKLVINSGNGAVEDRKPSGLNGEASKSQEMVHLVNKESSETPDQFMTADETRNLQNVDMKIGV

SEQ ID NO: 2351 - protein, 206 aa, Homo sapiens
MDKFWWHAAWGLCLVPLSLAQIDLNITCRFAGVFHVEKNGRYSISRTEAADLCKAFNSTLPTMAQMEKALSIGFETCRYGFIEGHVVIPRIHPNSICGANTTSGPIRTPQIPEWLIILASLLALALILAVCIAVNSRRRCGQKKKLVINSGNGAVEDRKPSGLNGEASKSQEMVHLVNKESSETPDQFMTADETRNLQNVDMKIGV

SEQ ID NO: 2352 - protein, 139 aa, Homo sapiens
MDKFWWHAAWGLCLVPLSLAQIDLNITCRFAGVFHVEKNGRYSISRTEAADLCKAFNSTLPTMAQMEKALSIGFETCSLHCSQQSKKVWAEEKASDQQWQWSCGGQKAKWTQRRGQQVSGNGAFGEQGVVRNSRPVYDS

SEQ ID NO: 2353 - protein, 80 aa, Homo sapiens
MDKFWWHAAWGLCLVPLSLAQIDLNITCRFAGVFHVEKNGRYSISRTEAADLCKAFNSTLPTMAQMEKALSIGFETCSST

SEQ ID NO: 2354 - protein, 232 aa, Homo sapiens
PEDIYPSNPTDDDVSSGSSSERSSTSGGYIFYTFSTVHPIPDEDSPWITDSTDRIPATNMDSSHSITLQPTANPNTGLVEDLDRTGPLSMTTQQSNSQSFSTSHEGLEEDKDHPTTSTLTSSRDQDTFHPSGGSHTTHGSESDGHSHGSQEGGANTTSGPIRTPQIPEWLIILASLLALALILAVCIAVNSRRRCGQKKKLVINSGNGAVEDRKPSGLNGEASKSQEMVHLV

SEQ ID NO: 2355 - protein, 195 aa, Homo sapiens
RNGTTAYEGNWNPEAHPPLIHHEHHEEEETPHSTSTIQATPSSTTEETATQKEQWFGNRWHEGYRQTPKEDSHSTTGTADMDSSHSITLQPTANPNTGLVEDLDRTGPLSMTTQQSNSQSFSTSHEGLEEDKDHPTTSTLTSSNRNDVTGGRRDPNHSEGSTTLLEGYTSHYPHTKESRTFIPVTSAKTGSFGVT

SEQ ID NO: 2356 - protein, 187 aa, Homo sapiens [sequence omitted]

SEQ ID NO: 2357 - protein, 287 aa, Homo sapiens
RYSISRTEAADLCKAFNSTLPTMAQMEKALSIGFETCRYGFIEGHVVIPRIHPNSICAANNTGVYILTSNTSQYDTYCFNASAPPEEDCTSVTDLPNAFDGPITITIVNRDGTRYVQKGEYRTNPEDIYPSNPTDDDVSSGSSSERSSTSGGDQDTFHPSGGSHTTHGSESDGHSHGSQEGGANTTSGPIRTPQIPEWLIILASLLALALILAVCIAVNSRRRCGQKKKLVINSGNGAVEDRKPSGLNGEASKSQEMVHLVNKESSETPDQFMTADETRNLQNVDMK

SEQ ID NO: 2358 - protein, 82 aa, Homo sapiens
SKHNLWSYKDTPNSRCGQKKKLVINSGNGAVEDRKPSGLNGEASKSQEMVHLVNKESSETPDQFMTADETRNLQNVDMKIGV

SEQ ID NO: 2359 - protein, 294 aa, Homo sapiens
  SITE 1: note = misc_feature - Xaa can be any naturally occurring amino acid
XDKFWWHAAWGLCLVPLSLAQIDLNITCRFAGVFHVEKNGRYSISRTEAADLCKAFNSTLPTMAQMEKALSIGFETCRYGFIEGHVVIPRIHPNSICAANNTGVYILTSNTSQYDTYCFNASAPPEEDCTSVTDLPNAFDGPITITIVNRDGTRYVQKGEYRTNPEDIYPSNPTDDDVSSGSSSERSSTSGGYIFYTFSTVHPIPDEDSPWITDSTDRIPATRDQDTFHPSGGSHTTHGSESDGHSHGSQEGGANTTSGPIRTPQIPEWLIILASLLALALILAVCIAVNSRRS

SEQ ID NO: 2360 - protein, 243 aa, Homo sapiens
  SITE 1: note = misc_feature - Xaa can be any naturally occurring amino acid
XDLPNAFDGPITITIVNRDGTRYVQKGEYRTNPEDIYPSNPTDDDVSSGSSSERSSTSGGYIFYTFSTVHPIPDEDSPWITDSTDRIPATTLMSTSATATETATKRQETWDWFSWLFLPSESKNHLHTTTQMAGTSSNTISAGWEPNEENEDERDRHLSFSGSGIDDDEDFISSTNMDSSHSITLQPTANPNTGLVEDLDRTGPLSMTTQQSNSQSFSTSHEGLEEDKDHPTTSTLTSSNRND

SEQ ID NO: 2361 - protein, 195 aa, Homo sapiens
  SITE 1: note = misc_feature - Xaa can be any naturally occurring amino acid
XFIEGHVVIPRIHPNSICAANNTGVYILTSNTSQYDTYCFNASAPPEEDCTSVTDLPNAFDGPITITIVNRDGTRYVQKGEYRTNPEDIYPSNPTDDDVSSGSSSERSSTSGGYIFYTFSTVHPIPDEDSPWITDSTDRIPATKQSNSQSFSTSHEGLEEDKDHPTTSTLTSSNRNDVTGGRRDPNHSEGSTTLL

SEQ ID NO: 2362 - protein, 240 aa, Homo sapiens
  SITE 1: note = misc_feature - Xaa can be any naturally occurring amino acid
XLNITCRFAGVFHVEKNGRYSISRTEAADLCKAFNSTLPTMAQMEKALSIGFETCRYGFIEGHVVIPRIHPNSICAANNTGVYILTSNTSQYDTYCFNASAPPEEDCTSVTDLPNAFDGPITITIVNRDGTRYVQKGEYRTNPEDIYPSNPTDDDVSSGSSSERSSTSGDRNDVTGGRRDPNHSEGSTTLLEGYTSHYPHTKESRTFIPVTSAKTGSFGVTAVTVGDSNSNVNRSLSGDQ

SEQ ID NO: 2363 - protein, 118 aa, Homo sapiens
  SITE 1: note = misc_feature - Xaa can be any naturally occurring amino acid
XPDEDSPWITDSTDRIPATSWEPNEENEDERDRHLSFSGSGIDDDEDFISSTISTTPRAFDHTKQNQDWTQWNPSHSNPEVLLQTTTRMTDVDRNGTTAYEGNWNPEAHPPLIHHEHH

SEQ ID NO: 2364 - protein, 230 aa, Homo sapiens
  SITE 1: note = misc_feature - Xaa can be any naturally occurring amino acid
XQMEKALSIGFETCRYGFIEGHVVIPRIHPNSICAANNTGVYILTSNTSQYDTYCFNASAPPEEDCTSVTDLPNAFDGPITITIVNRDGTRYVQKGEYRTNPEDIYPSNPTDDDVSSGSSSERSSTSGGYIFYTFSTVHPIPDEDSPWITDSTDRIPATISTTPRAFDHTKQNQDWTQWNPSHSNPEVLLQTTTRMTDVDRNGTTAYEGNWNPEAHPPLIHHEHHEEEET

SEQ ID NO: 2365 - protein, 183 aa, Homo sapiens
  SITE 1: note = misc_feature - Xaa can be any naturally occurring amino acid
XRTEAADLCKAFNSTLPTMAQMEKALSIGFETCRYGFIEGHVVIPRIHPNSICAANNTGVYILTSNTSQYDTYCFNASAPPEEDCTSVTDLPNAFDGPITITIVNRDGTRYVQKGEYRTNPEDIYPSNPTDDDVSSGSSSERSSTSGDMDSSHSITLQPTANPNTGLVEDLDRTGPLSMTTQQ

SEQ ID NO: 2366 - protein, 191 aa, Homo sapiens
  SITE 1: note = misc_feature - Xaa can be any naturally occurring amino acid
XSTTPRAFDHTKQNQDWTQWNPSHSNPEVLLQTTTRMTVQATPSSTTEETATQKEQWFGNRWHEGYRQTPKEDSHSTTGTAASAHTSHPMQGRTTPSPEDSSWTDFFNPISHPMGRGHQAGRRMDMDSSHSITLQPTANPNTGLVEDLDRTGPLSMTTQQSNSQSFSTSHEGLEEDKDHPTTSTLTSSNRN

SEQ ID NO: 2367 - protein, 243 aa, Homo sapiens
MCSRGWDSCLALELLLLPLSLLVTSIQGHLVHMTVVSGSNVTLNISESLPENYKQLTWFYTFDQKIVEWDSRKSKYFESKFKGRVRLDPQSGALYISKVQKEDNSTYIMRVLKKTGNEQEWKIKLQVLDPVPKPVIKIEKIEDMDDNCYLKLSCVIPGESVNYTWYGDKRPFPKELQNSVLETTLMPHNYSRCYTCQVSNSVSSKNGTVCLSPPCTLARSFGVEWIASWLVVTVPTILGLLLT

SEQ ID NO: 2368 - protein, 252 aa, Homo sapiens
MCSRGWDSCLALELLLLPLSLLVTSIQGHLVHMTVVSGSNVTLNISESLPENYKQLTWFYTFDQKIVEWDSRKSKYFESKFKGRVRLDPQSGALYISKVQKEDNSTYIMRVLKKTGNEQEWKIKLQVLDPVPKPVIKIEKIEDMDDNCYLKLSCVIPGESVNYTWYGDKRPFPKELQNSVLETTLMPHNYSRCYTCQVSNSVSSKNGTVCLSPPCTLGKKDPWELRGAQGNWSCFEQRKAGGPIQPPCTVWW

SEQ ID NO: 2369 - protein, 169 aa, Homo sapiens
MCSRGWDSCLALELLLLPLSLLVTSIQGHLVHMTVVSGSNVTLNISESLPENYKQLTWFYTFDQKIVEWDSRKSKYFESKFKGRVRLDPQSGALYISKVQKEDNSTYIMRVLKKTGNEQEWKIKLQVLGESGEPKSKSPLQWPQMDHCRASWEAWGTLGEEERKTSGQV

SEQ ID NO: 2370 - protein, 165 aa, Homo sapiens
MPMGSLQPLATLYLLGMLVASCLGRLSWYDPDFQARLTRSNSKCQGQLEVYLKDGWHMVCSQSWGRSSKQWEDPSQASKVCQRLNCGVPLSLGPFLVTYTPQSSIICYGQLGSFSNCSHSRNDMCHSLGLTCLEPQKTTPPTTRPPPTTTPEPTAMRPRTRPRTW

SEQ ID NO: 2371 - protein, 495 aa, Homo sapiens
MPMGSLQPLATLYLLGMLVASCLGRLSWYDPDFQARLTRSNSKCQGQLEVYLKDGWHMVCSQSWGRSSKQWEDPSQASKVCQRLNCGVPLSLGPFLVTYTPQSSIICYGQLGSFSNCSHSRNDMCHSLGLTCLEPQKTTPPTTRPPPTTTPEPTAPPRLQLVAQSGGQHCAGVVEFYSGSLGGTISYEAQDKTQDLENFLCNNLQCGSFLKHLPETEAGRAQDPGEPREHQPLPIQWKIQNSSCTSLEHCFRKIKPQKSGRVLALLCSGFQPKVQSRLVGGSSICEGTVEVRQGAQWAALCDSSSARSSLRWEEVCREQQCGSVNSYRVLDAGDPTSRGLFCPHQKLSQCHELWERNSYCKKVFVTCQDPNPAGLAAGTVASIILALVLLVVLLVVCGPLAYKKLVKKFRQKKQRQWIGPTGMNQNMSFHRNHTATVRSHAENPTASHVDNEYSQPPRNSHLSAYPALEGALHRSSMQPDNSSDSDYDLHGAQRL

SEQ ID NO: 2372 - protein, 317 aa, Homo sapiens
MTVARPSVPAALPLLGELPRLLLLVLLCLPAVWGDCGLPPDVPNAQPALEGRTSFPEDTVITYKCEESFVKIPGEKDSVICLKGSQWSDIEEFCNQKSCPNPGEIRNGQIDVPGGILFGATISFSCNTGYKLFGSTSSFCLISGSSVQWSDPLPECREIYCPAPPQIDNGIIQGERDHYGYRQSVTYACNKGFTMIGEHSIYCTVNNDEGEWSGPPPECRGKSLTSKVPPTVQKPTTVNVPTTEVSPTSQKTTTKTTTPNAQATRSTPVSRTTKHFHETTPNKGSGTTSGTTRLLSGHTCFTLTGLLGTLVTMGLLT

SEQ ID NO: 2373 - protein, 440 aa, Homo sapiens
MTVARPSVPAALPLLGELPRLLLLVLLCLPAVWGDCGLPPDVPNAQPALEGRTSFPEDTVITYKCEESFVKIPGEKDSVICLKGSQWSDIEEFCNRSCEVPTRLNSASLKQPYITQNYFPVGTVVEYECRPGYRREPSLSPKLTCLQNLKWSTAVEFCKKKSCPNPGEIRNGQIDVPGGILFGATISFSCNTGYKLFGSTSSFCLISGSSVQWSDPLPECREIYCPAPPQIDNGIIQGERDHYGYRQSVTYACNKGFTMIGEHSIYCTVNNDEGEWSGPPPECRGKSLTSKVPPTVQKPTTVNVPTTEVSPTSQKTTTKTTTPNAQATRSTPVSRTTKHFHETTPNKGSGTTSGTTRLLSGSRPVTQAGMRWCDRSSLQSRTPGFKRSFHFSLPSSWYYRAHVFHVDRFAWDASNHGLADLAKEELRRKYTQVYRLFLVS

SEQ ID NO: 2374 - protein, 381 aa, Homo sapiens
MTVARPSVPAALPLLGELPRLLLLVLLCLPAVWGDCGLPPDVPNAQPALEGRTSFPEDTVITYKCEESFVKIPGEKDSVICLKGSQWSDIEEFCNRSCEVPTRLNSASLKQPYITQNYFPVGTVVEYECRPGYRREPSLSPKLTCLQNLKWSTAVEFCKKKSCPNPGEIRNGQIDVPGGILFGATISFSCNTGYKLFGSTSSFCLISGSSVQWSDPLPECREIYCPAPPQIDNGIIQGERDHYGYRQSVTYACNKGFTMIGEHSIYCTVNNDEGEWSGPPPECRGKSLTSKVPPTVQKPTTVNVPTTEVSPTSQKTTTKTTTPNAQATRSTPVSRTTKHFHETTPNKGSGTTSGTTRLLSGHTCFTLTGLLGTLVTMGLLT

SEQ ID NO: 2375 - protein, 444 aa, Homo sapiens
MTVARPSVPAALPLLGELPRLLLLVLLCLPAVWGDCGLPPDVPNAQPALEGRTSFPEDTVITYKCEESFVKIPGEKDSVICLKGSQWSDIEEFCNRSCEVPTRLNSASLKQPYITQNYFPVGTVVEYECRPGYRREPSLSPKLTCLQNLKWSTAVEFCKKKSCPNPGEIRNGQIDVPGGILFGATISFSCNTGYKLFGSTSSFCLISGSSVQWSDPLPECREIYCPAPPQIDNGIIQGERDHYGYRQSVTYACNKGFTMIGEHSIYCTVNNDEGEWSGPPPECRGKSLTSKVPPTVQKPTTVNVPTTEVSPTSQKTTTKTTTPNAQATRSTPVSRTTKHFHETTPNKGSGTTSGTTRLLSGSRPVTQAGMRWCDRSSLQSRTPGFKRSFHFSLPSSWYYRCVPRHPAKFLKFIFCRDRIFLCCPGWFQTPGRKRFFRPPKTLRL

SEQ ID NO: 2376 - protein, 550 aa, Homo sapiens
MTVARPSVPAALPLLGELPRLLLLVLLCLPAVWGDCGLPPDVPNAQPALEGRTSFPEDTVITYKCEESFVKIPGEKDSVICLKGSQWSDIEEFCNRSCEVPTRLNSASLKQPYITQNYFPVGTVVEYECRPGYRREPSLSPKLTCLQNLKWSTAVEFCKKKSCPNPGEIRNGQIDVPGGILFGATISFSCNTGYKLFGSTSSFCLISGSSVQWSDPLPECREIYCPAPPQIDNGIIQGERDHYGYRQSVTYACNKGFTMIGEHSIYCTVNNDEGEWSGPPPECRGKSLTSKVPPTVQKPTTVNVPTTEVSPTSQKTTTKTTTPNAQGTETPSVLQKHTTENVSATRTPPTPQKPTTVNVPATIVTPTPKPTTINVPATGVSSTPQRHTIVNVSATGTLPTLQKPTRANDSATKSPAAAQTSFISKTLSTKTPSAAQNPMMTNASATQATLTAQKFTTAKVAFTQSPSAARKSTNVHSPVTNGLKSTQRFPSAHITATRSTPVSRTTKHFHETTPNKGSGTTSGTTRLLSGHTCFTLTGLLGTLVTMGLLT

SEQ ID NO: 2377 - protein, 439 aa, Homo sapiens
MTVARPSVPAALPLLGELPRLLLLVLLCLPAVWGDCGLPPDVPNAQPALEGRTSFPEDTVITYKCEESFVKIPGEKDSVICLKGSQWSDIEEFCNRSCEVPTRLNSASLKQPYITQNYFPVGTVVEYECRPGYRREPSLSPKLTCLQNLKWSTAVEFCKKKSCPNPGEIRNGQIDVPGGILFGATISFSCNTGYKLFGSTSSFCLISGSSVQWSDPLPECREIYCPAPPQIDNGIIQGERDHYGYRQSVTYACNKGFTMIGEHSIYCTVNNDEGEWSGPPPECRGKSLTSKVPPTVQKPTTVNVPTTEVSPTSQKTTTKTTTPNAQATRSTPVSRTTKHFHETTPNKGSGTTSGTTRLLSETVFHRVIQDGLDLLASRSACLGLPKCWDYRREPPHLARAHVFHVDRFAWDASNHGLADLAKEELRRKYTQVYRLFLVS

SEQ ID NO: 2378 - protein, 384 aa, Homo sapiens
MTVARPSVPAALPLLGELPRLLLLVLLCLPAVWGDCGLPPDVPNAQPALEGRTSFPEDTVITYKCEESFVKIPGEKDSVICLKGSQWSDIEEFCNRSCEVPTRLNSASLKQPYITQNYFPVGTVVEYECRPGYRREPSLSPKLTCLQNLKWSTAVEFCKKKSCPNPGEIRNGQIDVPGGILFGATISFSCNTGYKLFGSTSSFCLISGSSVQWSDPLPECREIYCPAPPQIDNGIIQGERDHYGYRQSVTYACNKGFTMIGEHSIYCTVNNDEGEWSGPPPECRGKSLTSKVPPTVQKPTTVNVPTTEVSPTSQKTTTKTTTPNAQATRSTPVSRTTKHFHETTPNKGSGTTSGTTRLLSALQVRPFEVSGSSHISSKKMMCIL

SEQ ID NO: 2379 - protein, 326 aa, Homo sapiens
  SITE 1: note = misc_feature - Xaa can be any naturally occurring amino acid
XAALPLLGELPRLLLLVLLCLPAVWESSRVEHTMLQTCMSSLSGDCGLPPDVPNAQPALEGRTSFPEDTVITYKCEESFVKIPGEKDSVICLKGSQWSDIEEFCNRSCEVPTRLNSASLKQPYITQNYFPVGTVVEYECRPGYRREPSLSPKLTCLQNLKWSTAVEFCKKKSCPNPGEIRNGQIDVPGGILFGATISFSCNTGYKLFGSTSSFCLISGSSVQWSDPLPECREIYCPAPPQIDNGIIQGERDHYGYRQSVTYACNKGFTMIGEHSIYCTVNNDEGEWSGPPPECRGKSLTSKVPPTVQKPTTVNVPTTEVSPTSQKT

SEQ ID NO: 2380 - protein, 268 aa, Homo sapiens
  SITE 1: note = misc_feature - Xaa can be any naturally occurring amino acid
XGEIRNGQIDVPGGILFGATISFSCNTGYKLFGSTSSFCLISGSSVQWSDPLPECREIYCPAPPQIDNGIIQGERDHYGYRQSVTYACNKGFTMIGEHSIYCTVNNDEGEWSGPPPECRGKSLTSKVPPTVQKPTTVNVPTTEVSPTSQKTTTKTTTPNAQATRSTPVSRTTKHFHETTPNKGSGTTSGTTRLLSESYSVTQAGVWWCDLRSLQPLPPEFKQFSCLSLRSSWDYRIITGHLLPGDFSVPSTIVDGIYFPTPLSPFFVG

SEQ ID NO: 2381 - protein, 194 aa, Homo sapiens
  SITE 1: note = misc_feature - Xaa can be any naturally occurring amino acid
XREIYCPAPPQIDNGIIQGERDHYGYRQSVTYACNKGFTMIGEHSIYCTVNNDEGEWSGPPPECRGKSLTSKVPPTVQKPTTVNVPTTEVSPTSQKTTTKTTTPNAQATRSTPVSRTTKHFHETTPNKGSGTTSGTTRLLSESYSVTQAGVWWCDLRSLQPLPPEFKQFSCLSLRSSWDYRIEAADLHSECYSS

SEQ ID NO: 2382 - protein, 61 aa, Homo sapiens
  SITE 1: note = misc_feature - Xaa can be any naturally occurring amino acid
XTTEVSPTSQKTTTKTTTPNAQATRSTPVSRTTKHFHETTPNKGSGTTSGTTRLLSAIFSC

SEQ ID NO: 2383 - protein, 119 aa, Homo sapiens
MGIQGGSVLFGLLLVLAVFCHSGHSLQCYNCPNPTADCKTAVNCSSDFDACLITKAELGYHYVAQAGRRQSSHFSLLKCWDYRCEPSHWPHCPYFNWGYKCITSVGSLSIAISTTSQPA

SEQ ID NO: 2384 - protein, 119 aa, Homo sapiens; identical to SEQ ID NO: 2383

SEQ ID NO: 2385 - protein, 120 aa, Homo sapiens
MGIQGGSVLFGLLLVLAVFCHSGHSLQCYNCPNPTADCKTAVNCSSDFDACLITKAGLQVYNKCWKFEHCNFNDVTTRLRENELTYYCCKKDLCNFNEQLENGGTSLSEKTVLLLVTPFL

SEQ ID NO: 2386 - protein, 128 aa, Homo sapiens
MGIQGGSVLFGLLLVLAVFCHSGHSLQCYNCPNPTADCKTAVNCSSDFDACLITKAGLQVYNKCWKFEHCNFNDVTTRLRENELTYYCCKKDLCNFNEQLENGGTSLSEKTVLLLVTPFLAAAWSLHP

SEQ ID NO: 2387 - protein, 128 aa, Homo sapiens; identical to SEQ ID NO: 2386

SEQ ID NO: 2388 - protein, 128 aa, Homo sapiens; identical to SEQ ID NO: 2386

SEQ ID NO: 2389 - protein, 128 aa, Homo sapiens; identical to SEQ ID NO: 2386

SEQ ID NO: 2390 - protein, 128 aa, Homo sapiens; identical to SEQ ID NO: 2386

SEQ ID NO: 2391 - protein, 128 aa, Homo sapiens; identical to SEQ ID NO: 2386

SEQ ID NO: 2392 - protein, 128 aa, Homo sapiens; identical to SEQ ID NO: 2386

SEQ ID NO: 2393 - protein, 128 aa, Homo sapiens; identical to SEQ ID NO: 2386

SEQ ID NO: 2394 - protein, 347 aa, Homo sapiens
MALLFSLILAICTRPGFLASPSGVRLVGGLHRCEGRVEVEQKGQWGTVCDDGWDIKDVAVLCRELGCGAASGTPSGILYEPPAEKEQKVLIQSVSCTGTEDTLAQCEQEEVYDCSHDEDAGASCENPESSFSPVPEGVRLADGPGHCKGRVEVKHQNQWYTVCQTGWSLRAAKVVCRQLGCGRAVLTQKRCNKHAYGRKPIWLSQMSCSGREATLQDCPSGPWGKNTCNHDEDTWVECEDPFDLRLVGGDNLCSGRLEVLHKGVWGSVCDDNWGEKEDQVVCKQLGCGKSLSPSFRDRKCYGPGVGRIWLDNVRCSGEEQSLEQCQHRFWGFHDCTHQEDVAVICSG

SEQ ID NO: 2395 - protein, 38 aa, Homo sapiens
MWLFFGITGLLTAALSGCTVAKWIQLLGEICCFAGMGF

SEQ ID NO: 2396 - protein, 468 aa, Homo sapiens
MWLFFGITGLLTAALSGHPSPAPPDQLNTSSAESELWEPGERLPVRLTNGSSSCSGTVEVRLEASWEPACGALWDSRAAEAVCRALGCGGAEAASQLAPPTPELPPPPAAGNTSVAANATLAGAPALLCSGAEWRLCEVVEHACRSDGRRARVTCAENRALRLVDGGGACAGRVEMLEHGEWGSVCDDTWDLEDAHVVCRQLGCGWAVQALPGLHFTPGRGPIHRDQVNCSGAEAYLWDCPGLPGQHYCGHKEDAGAVCSEHQSWRLTGGADRCEGQVEVHFRGVWNTVCDSEWYPSEAKVLCQSLGCGTAVERPKGLPHSLSGRMYYSCNGEELTLSNCSWRFNNSNLCSQSLAARVLCSASRSLHNLSTPEVPASVQTVTIESSVTVKIENKESRELMLLIPSIVLGILLLGSLIFIAFILLRIKGKYALPVMVNHQHLPTTIPAGSNSYQPVPITIPKEGPGPAP

SEQ ID NO: 2397 - protein, 668 aa, Homo sapiens
MWLFFGITGLLTAALSGHPSPAPPDQLNTSSAESELWEPGERLPVRLTNGSSSCSGTVEVRLEASWEPACGALWDSRAAEAVCRALGCGGAEAASQLAPPTPELPPPPAAGNTSVAANATLAGAPALLCSGAEWRLCEVVEHACRSDGRRARVTCAENRALRLVDGGGACAGRVEMLEHGEWGSVCDDTWDLEDAHVVCRQLGCGWAVQALPGLHFTPGRGPIHRDQVNCSGAEAYLWDCPGLPGQHYCGHKEDAGAVCSEHQSWRLTGGADRCEGQVEVHFRGVWNTVCDSEWYPSEAKVLCQSLGCGTAVERPKGLPHSLSGRMYYSCNGEELTLSNCSWRFNNSNLCSQSLAARVLCSASRSLHNLSTPEVPASVQTVTIESSVTVKIENKESRELMLLIPSIVLGILLLGSLIFIAFILLRIKGKYALPVMVNHQHLPTTIPAGSNSYQPVPITIPKEVFMLPIQVQAPPPEDSDSGSDSDYEHYDFSAQPPVALTTFYNSQRHRVTDEEVQQSRFQMPPLEEGLEELHASHIPTANPGHCITDPPSLGPQYHPRSNSESSTSSGEDYCNSPKSKLPPWNPQVFSSERSSFLEQPPNLELAGTQPAFSAGPPADDSSSTSSGEWYQNFQPPPQPPSEEQFGCPGSPSPQPDSTDNDDYDDISAA

SEQ ID NO: 2398 - protein, 601 aa, Homo sapiens
MWLFFGITGLLTAALSGHPSPAPPDQLNTSSAESELWEPGERLPVRLTNGSSSCSGTVEVRLEASWEPACGALWDSRAAEAVCRALGCGGAEAASQLAPPTPELPPPPAAGNTSVAANATLAGAPALLCSGAEWRLCEVVEHACRSDGRRARVTCAENRALRLVDGGGACAGRVEMLEHGEWGSVCDDTWDLEDAHVVCRQLGCGWAVQALPGLHFTPGRGPIHRDQVNCSGAEAYLWDCPGLPGQHYCGHKEDAGAVCSEHQSWRLTGGADRCEGQVEVHFRGVWNTVCDSEWYPSEAKVLCQSLGCGTAVERPKGLPHSLSGRMYYSCNGEELTLSNCSWRFNNSNLCSQSLAARVLCSASRSLHNLSTPEVPASVQTVTIESSVTVKIENKESRELMLLIPSIVLGILLLGSLIFIAFILLRIKGKYVFMLPIQVQAPPPEDSDSGSDSDYEHYDFSAQPPVALTTFYNSQRHRVTDEEVQQSRFQMPPLEEGLEELHASHIPTANPGHCITDPPSLGPQYHPRSNSESSTSSGEDYCNSPKSKLPPWNPQVFSSERSSFLEQPPNLELAGTQPAFSGSPSPQPDSTDNDDYDDISAA

SEQ ID NO: 2399 - protein, 592 aa, Homo sapiens
MWLFFGITGLLTAALSGHPSPAPPDQLNTSSAESELWEPGERLPVRLTNGSSSCSGTVEVRLEASWEPACGALWDSRAAEAVCRALGCGGAEAASQLAPPTPELPPPPAAGNTSVAANATLAGAPALLCSGAEWRLCEVVEHACRSDGRRARVTCAENRALRLVDGGGACAGRVEMLEHGEWGSVCDDTWDLEDAHVVCRQLGCGWAVQALPGLHFTPGRGPIHRDQVNCSGAEAYLWDCPGLPGQHYCGHKEDAGAVCSEHQSWRLTGGADRCEGQVEVHFRGVWNTVCDSEWYPSEAKVLCQSLGCGTAVERPKGLPHSLSGRMYYSCNGEELTLSNCSWRFNNSNLCSQSLAARVLCSASRSLHNLSTPEVPASVQTVTIESSVTVKIENKESRELMLLIPSIVLGILLLGSLIFIAFILLRIKGKYALPVMVNHQHLPTTIPAGSNSYQPVPITIPKEDSQRHRVTDEEVQQSRFQMPPLEEGLEELHASHIPTANPGHCITDPPSLGPQYHPRSNSESSTSSGEDYCNSPKSKLPPWNPQVFSSERSSFLEQPPNLELAGTQPAFSGSPSPQPDSTDNDDYDDISAA

SEQ ID NO: 2400 - protein, 422 aa, Homo sapiens
MWLFFGITGLLTAALSGHPSPAPPDQLNTSSAESELWEPGERLPVRLTNGSSSCSGTVEVRLEASWEPACGALWDSRAAEAVCRALGCGGAEAASQLAPPTPELPPPPAAGNTSVAANATLAGAPALLCSGAEWRLCEVVEHACRSDGRRARVTCAENRALRLVDGGGACAGRVEMLEHGEWGSVCDDTWDLEDAHVVCRQLGCGWAVQALPGLHFTPGRGPIHRDQVNCSGAEAYLWDCPGLPGQHYCGHKEDAGAVCSASRSLHNLSTPEVPASVQTVTIESSVTVKIENKESRELMLLIPSIVLGILLLGSLIFIAFILLRIKGKYVFMLPIQVQAPPPEDSDSGSDSDYEHYDFSAQPPVALTTFYNSQRHRVTDEEVQQSRFQMPPLEEGLEELHASHIPTANPGHCITDPPSLGPQ

SEQ ID NO: 2401 - protein, 278 aa, Homo sapiens
MWLFFGITGLLTAALSGHPSPAPPDQLNTSSAESELWEPGERLPVRLTNGSSSCSGTVEVRLEASWEPACGALWDSRAAEAVCRALGCGGAEAASQLAPPTPELPPPPAAGNTSVAANATLAGAPALLCSGAEWRLCEVVEHACRSDGRRARVTCAENRALRLVDGGGACAGRVEMLEHGEWGSVCDDTWDLEDAHVVCRQLGCGWAVQALPGLHFTPGRGPIHRDQVNCSGAEAYLWDCPGLPGQHYCGHKEDAGAVCSESSVTVKIENKESRELML

SEQ ID NO: 2402 - protein, 186 aa, Homo sapiens
  SITE 1: note = misc_feature - Xaa can be any naturally occurring amino acid
XNRALRLVDGGGACAGRVEMLEHGEWGSVCDDTWDLEDAHVVCRQLGCGWAVQALPGLHFTPGRGPIHRDQVNCSGAEAYLWDCPGLPGQHYCGHKEDAGAVCSASRSLHNLSTPEVPASVQTVTIESSVTVKIENKESRELMLLIPSIVLGILLLGSLIFIAFILLRIKGKYALPVMVNHQHLPT

SEQ ID NO: 2403 - protein, 354 aa, Homo sapiens
MRLAVLFSGALLGLLAAQGTGNDCPHKKSATLLPSFTVTPTVTESTGTTSHRTTKSHKTTTHRTTTTGTTSHGPTTATHNPTTTSHGNVTVHPTSNSTATSQGPSTATHSPATTSHGNATVHPTSNSTATSPGFTSSAHPEPPPPSPSPSPTSKETIGDYTWTNGSQPCVHLQAQIQIRVMYTTQGGGEAWGISVLNPNKTKVQGSCEGAHPHLLLSFPYGHLSFGFMQDLQQKVVYLSYMAVEYNVSFPHAAQWTFSAQNASLRDLQAPLGQSFSCSNSSIILSPAVHLDLLSLRLQAAQLPHTGVFGQSFSCPSDRSILLPLIIGLILLGLLALVLIAFCIIRRRPSAYQAL

SEQ ID NO: 2404 - protein, 181 aa, Homo sapiens [sequence omitted]

SEQ ID NO: 2405 - protein, 327 aa, Homo sapiens
MRLAVLFSGALLGLLAESTGTTSHRTTKSHKTTTHRTTTTGTTSHGPTTATHNPTTTSHGNVTVHPTSNSTATSQGPSTATHSPATTSHGNATVHPTSNSTATSPGFTSSAHPEPPPPSPSPSPTSKETIGDYTWTNGSQPCVHLQAQIQIRVMYTTQGGGEAWGISVLNPNKTKVQGSCEGAHPHLLLSFPYGHLSFGFMQDLQQKVVYLSYMAVEYNVSFPHAAQWTFSAQNASLRDLQAPLGQSFSCSNSSIILSPAVHLDLLSLRLQAAQLPHTGVFGQSFSCPSDRSILLPLIIGLILLGLLALVLIAFCIIRRRPSAYQAL

SEQ ID NO: 2406 - protein, 121 aa, Homo sapiens
  SITE 1: note = misc_feature - Xaa can be any naturally occurring amino acid
XKTKVQGSCEGAHPHLLLSFPYGHLSFGFMQDLQQKVVYLSYMAVEYNVSFPHAAQWTFSAQNASLRDLQAPLGQSFSCSNSSIILSPAVHLDLLSLRLQAAQLPHTGVFGQSKTYLLLPS

SEQ ID NO: 2407 - protein, 35 aa, Homo sapiens
MAGPPRLLLLPLLLALARGLPGALAAQAGACVGST

SEQ ID NO: 2408 - protein, 240 aa, Homo sapiens
MAGPPRLLLLPLLLALARGLPGALAAQEVQQSPHCTTVPVGASVNITCSTSGGLRGIYLRQLGPQPQDIIYYEDGVVPTTDRRFRGRIDFSGSQDNLTITMHRLQLSDTGTYTCQAITEVNVYGSGTLVLVTEEQSQGWHRCSDAPPRASALPAPPTGSALPDPQTASALPDPPAASALPAALAVISFLLGLGLGVACVLARTQIKKLCSWRDKNSAACVVYEDMSHSRCNTLSSPNQYQ

SEQ ID NO: 2409 - protein, 221 aa, Homo sapiens
MAGPPRLLLLPLLLALARGLPGALAAQEVQQSPHCTTVPVGASVNITCSTSGGLRGIYLRQLGPQPQDIIYYEDGVVPTTDRRFRGRIDFSGSQDNLTITMHRLQLSDTGTYTCQAITEVNVYGSGTLVLVTEEQSQGWHRCSDAPPRASALPAPPTGSALPDPQTASALPDPPAASALPAALAVISFLLGLGLGVACVLARTQVSVSPSCHLHPKDCSLS

SEQ ID NO: 2410 - protein, 160 aa, Homo sapiens
MAGPPRLLLLPLLLALARGLPGALAAQGRTFSVLLARLMVTAQVLPRGAAVSPLHDCPRGSLRQHHLLHQRGPAWDLPEAARATAPRHHLLRGRGGAHYGQTVPGPHRLLRVPGQPDYHHAPPAAVGHWHLHLPGHHGGQCLRLRHPGPGDRGTVPRMAQ

SEQ ID NO: 2411 - protein, 140 aa, Homo sapiens
MHRLQLSDTGTYTCQAITEVNVYGSGTLVLVTEEQSQGWHRCSDAPPRASALPAPPTGSALPDPQTASALPDPPAASALPAALAVISFLLGLGLGVACVLARTQIKKLCSWRDKNSAACVVYEDMSHSRCNTLSSPNQYQ

SEQ ID NO: 2412 - protein, 121 aa, Homo sapiens
MHRLQLSDTGTYTCQAITEVNVYGSGTLVLVTEEQSQGWHRCSDAPPRASALPAPPTGSALPDPQTASALPDPPAASALPAALAVISFLLGLGLGVACVLARTQVSVSPSCHLHPKDCSLS

SEQ ID NO: 2413 - protein, 188 aa, Homo sapiens
MPGGPGVLQALPATIFLLFLLSAVYLGPGCQALWMHKVPASLMVSLGEDAHFQCPHNSSNNANVTWWRVLHGNYTWPPEFLGPGEDPNEPPPRPFLDMGEGTKNRIITAEGIILLFCAVVPGTLLLFRKRWQNEKLGLDAGDEYEDENLYEGLNLDDCSMYEDISRGLQGTYQDVGSLNIGDVQLEKP

SEQ ID NO: 2414 - protein, 226 aa, Homo sapiens
MPGGPGVLQALPATIFLLFLLSAVYLGPGCQALWMHKVPASLMVSLGEDAHFQCPHNSSNNANVTWWRVLHGNYTWPPEFLGPGEDPNGTLIIQNVNKSHGGIYVCRVQEGNESYQQSCGTYLRVRQPPPRPFLDMGEGTKNRIITAEGIILLFCAVVPGTLLLFRKRWQNEKLGLDAGDEYEDENLYEGLNLDDCSMYEDISRGLQGTYQDVGSLNIGDVQLEKP

SEQ ID NO: 2415 - protein, 258 aa, Homo sapiens
MPGGPGVLQALPATIFLLFLLSAVYLGPGCQALWMHKVPASLMVSLGEDAHFQCPHNSSNNANVTWWRVLHGNYTWPPEFLGPGEDPNGTLIIQNVNKSHGGIYVCRVQEGNESYQQSCGTYLRVRREWPSPGPYSHCPAGDTRFIFEVGIEPVPSMWVSNRLGQRDGHSPLQSGVSGGSGALQEVGGARRLGRARGARALSHTTSLQSRPPGPSWTWGRAPRTESSQPRGSSSCSARWCLGRCCCSGNDGRTRSSGW

SEQ ID NO: 2416 - protein, 256 aa, Homo sapiens
MGHTRRQGTSPSKCPYLNFFQLLVLAGLSHFCSGVIHVTKEVKEVATLSCGHNVSVEELAQTRIYWQKEKKMVLTMMSGDMNIWPEYKNRTIFDITNNLSIVILALRPSDEGTYECVVLKYEKDAFKREHLAEVTLSVKADFPTPSISDFEIPTSNIRRIICSTSGGFPEPHLSWLENGEELNAINTTVSQDPETELYAVSSKLDFNMTTNHSFMCLIKYGHLRVNQTFNWNTSFAPRCRERRRNERLRRESVRPV

SEQ ID NO: 2417 - protein, 288 aa, Homo sapiens
MGHTRRQGTSPSKCPYLNFFQLLVLAGLSHFCSGVIHVTKEVKEVATLSCGHNVSVEELAQTRIYWQKEKKMVLTMMSGDMNIWPEYKNRTIFDITNNLSIVILALRPSDEGTYECVVLKYEKDAFKREHLAEVTLSVKADFPTPSISDFEIPTSNIRRIICSTSGGFPEPHLSWLENGEELNAINTTVSQDPETELYAVSSKLDFNMTTNHSFMCLIKYGHLRVNQTFNWNTTKQEHFPDNLLPSWAITLISVNGIFVICCLTYCFAPRCRERRRNERLRRESVRPV

SEQ ID NO: 2418 - protein, 288 aa, Homo sapiens; identical to SEQ ID NO: 2417

SEQ ID NO: 2419 - protein, 217 aa, Homo sapiens
MDPQCTMGLSNILFVMAFLLSANFSQPEIVPISNITENVYINLTCSSIHGYPEPKKMSVLLRTKNSTIEYDGVMQKSQDNVTELYDVSISLSVSFPDVTSNMTIFCILETDKTRLLSSPFSIELEDPQPPPDHIPWITAVLPTVIICVMVFCLILWKWKKKKRPRNSYKCGTNTMEREESEQTKKREKIHIPERSDEAQRVFKSSKTSSCDKSDTCF

SEQ ID NO: 2420 - protein, 329 aa, Homo sapiens
MDPQCTMGLSNILFVMAFLLSGAAPLKIQAYFNETADLPCQFANSQNQSLSELVVFWQDQENLVLNEVYLGKEKFDSVHSKYMGRTSFDSDSWTLRLHNLQIKDKGLYQCIIHHKKPTGMIRIHQMNSELSVLANFSQPEIVPISNITENVYINLTCSSIHGYPEPKKMSVLLRTKNSTIEYDGVMQKSQDNVTELYDVSISLSVSFPDVTSNMTIFCILETDKTRLLSSPFSIELEDPQPPPDHIPWITAVLPTVIICVMVFCLILWKWKKKKRPRNSYKCGTNTMEREESEQTKKREKIHIPERSDEAQRVFKSSKTSSCDKSDTCF

SEQ ID NO: 2421 - protein, 167 aa, Homo sapiens
MGLSNILFVMAFLLSGAAPLKIQAYFNETADLPCQFANSQNQSLSELVVFWQDQENLVLNEVYLGKEKFDSVHSKYMGRTSFDSDSWTLRLHNLQIKDKGLYQCIIHHKKPTGMIRIHQMNSELSVLANFSQPEIVPISNITENVYINLTCSSIHGYPEPKKMSVLL

SEQ ID NO: 2422 - protein, 323 aa, Homo sapiens
MGLSNILFVMAFLLSGAAPLKIQAYFNETADLPCQFANSQNQSLSELVVFWQDQENLVLNEVYLGKEKFDSVHSKYMGRTSFDSDSWTLRLHNLQIKDKGLYQCIIHHKKPTGMIRIHQMNSELSVLANFSQPEIVPISNITENVYINLTCSSIHGYPEPKKMSVLLRTKNSTIEYDGVMQKSQDNVTELYDVSISLSVSFPDVTSNMTIFCILETDKTRLLSSPFSIELEDPQPPPDHIPWITAVLPTVIICVMVFCLILWKWKKKKRPRNSYKCGTNTMEREESEQTKKREKIHIPERSDEAQRVFKSSKTSSCDKSDTCF

SEQ ID NO: 2423 - protein, 275 aa, Homo sapiens
MGLSNILFVMAFLLSGAAPLKIQAYFNETADLPCQFANSQNQSLSELVVFWQDQENLVLNEVYLGKEKFDSVHSKYMGRTSFDSDSWTLRLHNLQIKDKGLYQCIIHHKKPTGMIRIHQMNSELSVLANFSQPEIVPISNITENVYINLTCSSIHGYPEPKKMSVLLRTKNSTIEYDGVMQKSQDNVTELYDVSISLSVSFPDVTSNMTIFCILETDKTRLLSSPFSIGTNTMEREESEQTKKREKIHIPERSDEAQRVFKSSKTSSCDKSDTCF

SEQ ID NO: 2424 - protein, 247 aa, Homo sapiens
MGRTSFDSDSWTLRLHNLQIKDKGLYQCIIHHKKPTGMIRIHQMNSELSVLANFSQPEIVPISNITENVYINLTCSSIHGYPEPKKMSVLLRTKNSTIEYDGVMQKSQDNVTELYDVSISLSVSFPDVTSNMTIFCILETDKTRLLSSPFSIELEDPQPPPDHIPWITAVLPTVIICVMVFCLILWKWKKKKRPRNSYKCGTNTMEREESEQTKKREKIHIPERSDEAQRVFKSSKTSSCDKSDTCF

SEQ ID NO: 2425 - protein, 277 aa, Homo sapiens
  SITE 1: note = misc_feature - Xaa can be any naturally occurring amino acid
XTMGLSNILFVMAFLLSGAAPLKIQAYFNETADLPCQFANSQNQSLSELVVFWQDQENLVLNEVYLGKEKFDSVHSKYMGRTSFDSDSWTLRLHNLQIKDKGLYQCIIHHKKPTGMIRIHQMNSELSVLANFSQPEIVPISNITENVYINLTCSSIHGYPEPKKMSVLLRTKNSTIEYDGVMQKSQDNVTELYDVSISLSVSFPDVTSNMTIFCILETDKTRLLSSPFSIGTNTMEREESEQTKKREKIHIPERSDEAQRVFKSSKTSSCDKSDTCF

SEQ ID NO: 2426 - protein, 198 aa, Homo sapiens
MALPVTALLLPLALLLHAARPSQFRVSPLDRTWNLGETVELKCQVLLSNPTSGCSWLFQPRGAAASPTFLLYLSQNKPKAAEGLDTQRFSGKRLGDTFVLTLSDFRRENEGYYFCSALSNSIMYFSHFVPVFLPAKPTTTPAPRPPTPAPTIASQPLSLRPEACRPAAGGAGNRRRVCKCPRPVVKSGDKPSLSARYV

SEQ ID NO: 2427 - protein, 235 aa, Homo sapiens
MALPVTALLLPLALLLHAARPSQFRVSPLDRTWNLGETVELKCQVLLSNPTSGCSWLFQPRGAAASPTFLLYLSQNKPKAAEGLDTQRFSGKRLGDTFVLTLSDFRRENEGYYFCSALSNSIMYFSHFVPVFLPAKPTTTPAPRPPTPAPTIASQPLSLRPEACRPAAGGAVHTRGLDFACDIYIWAPLAGTCGVLLLSLVITLYCNHRNRRRVCKCPRPVVKSGDKPSLSARYV

SEQ ID NO: 2428 - protein, 235 aa, Homo sapiens; identical to SEQ ID NO: 2427

SEQ ID NO: 2429 - protein, 198 aa, Homo sapiens
MALPVTALLLPLALLLHAARPSQFRVSPLDRTWNLGETVELKCQVLLSNPTSGCSWLFQPRGAAASPTFLLYLSQNKPKAAEGLDTQRFSGKRLGDTFVLTLSDFRRENEGYYFCSALSNSIMYFSHFVPVFLPVHTRGLDFACDIYIWAPLAGTCGVLLLSLVITLYCNHRNRRRVCKCPRPVVKSGDKPSLSARYV

SEQ ID NO: 2430 - protein, 198 aa, Homo sapiens
MRPRLWLLLAAQLTVLHGNSVLQQTPAYIKVQTNKMVMLSCEAKISLSNMRIYWLRQRQAPSSDSHHEFLALWDSAKGTIHGEEVEQEKIAVFRDASRFILNLTSVKPEDSGIYFCMIVGSPELTFGKGTQLSVVDFLPTTAQPTKKSTLKKRVCRLPRPETQKGLKGKVYQEPLSPNACMDTTAILQPHRSCLTHGS

SEQ ID NO: 2431 - protein, 210 aa, Homo sapiens
MRPRLWLLLAAQLTVLHGNSVLQQTPAYIKVQTNKMVMLSCEAKISLSNMRIYWLRQRQAPSSDSHHEFLALWDSAKGTIHGEEVEQEKIAVFRDASRFILNLTSVKPEDSGIYFCMIVGSPELTFGKGTQLSVVDFLPTTAQPTKKSTLKKRVCRLPRPETQKGPLCSPITLGLLVAGVLVLLVSLGVAIHLCCRRRRARLRFMKQFYK

SEQ ID NO: 2432 - protein, 221 aa, Homo sapiens
MRPRLWLLLAAQLTVLHGNSVLQQTPAYIKVQTNKMVMLSCEAKISLSNMRIYWLRQRQAPSSDSHHEFLALWDSAKGTIHGEEVEQEKIAVFRDASRFILNLTSVKPEDSGIYFCMIVGSPELTFGKGTQLSVVDFLPTTAQPTKKSTLKKRVCRLPRPETQKGPLCSPITLGLLVAGVLVLLVSLGVAIHLCCRRRRARLRFMKQLRLHPLEKCSRMDY

SEQ ID NO: 2433 - protein, 210 aa, Homo sapiens
MRPRLWLLLAAQLTVLHGNSVLQQTPAYIKVQTNKMVMLSCEAKISLSNMRIYWLRQRQAPSSDSHHEFLALWDSAKGTIHGEEVEQEKIAVFRDASRFILNLTSVKPEDSGIYFCMIVGSPELTFGKGTQLSVVDFLPTTAQPTKKSTLKKRVCRLPRPETQKGPLCSPITLGLLVAGVLVLLVSLGVAIHLCCRRRRARLRFMKQLYK

SEQ ID NO: 2434 - protein, 243 aa, Homo sapiens
MRPRLWLLLAAQLTVLHGNSVLQQTPAYIKVQTNKMVMLSCEAKISLSNMRIYWLRQRQAPSSDSHHEFLALWDSAKGTIHGEEVEQEKIAVFRDASRFILNLTSVKPEDSGIYFCMIVGSPELTFGKGTQLSVVDFLPTTAQPTKKSTLKKRVCRLPRPETQKGPLCSPITLGLLVAGVLVLLVSLGVAIHLCCRRRRARLRFMKQPQGEGISGTFVPQCLHGYYSNTTTSQKLLNPWILKT

SEQ ID NO: 2435 - protein, 213 aa, Homo sapiens
MRPRLWLLLAAQLTVLHGNSVLQQTPAYIKVQTNKMVMLSCEAKISLSNMRIYWLRQRQAPSSDSHHEFLALWDSAKGTIHGEEVEQEKIAVFRDASRFILNLTSVKPEDSGIYFCMIVGSPELTFGKGTQLSVVDFLPTTAQPTKKSTLKKRVCRLPRPETQKGRRRRARLRFMKQPQGEGISGTFVPQCLHGYYSNTTTSQKLLNPWILKT

SEQ ID NO: 2436 - protein, 185 aa, Homo sapiens
MARGAALALLLFGLLGVLVAAPDGGFDLSDALPDNENKKPTAIPKKPSAGDDFDLGDAVVDGENDDPRPPNPPKPMPNPNPNHPSSSGSFSDADLADGVSGGEGKGGSDGGGSHRKEGEEADAPGVIPGIVGAVVVAVAGAISSFIAYQKKKLCFKENAEQGEVDMESHRNANAEPAVQRTLLEK

SEQ ID NO: 2437 - protein, 160 aa, Homo sapiens
MARGAALALLLFGLLGVLVAAPDGGFDLSDALPDNENKKPTAIPKKPSAGDDFDLGDAVVDGENDDPRPPNPPKPMPNPNPNHPSSSGSFSDADLADGVSGGEGKGGSDGGGSHRKEGEEADAPGVIPGIVGAVVVAVAGAISSFIAYQKKKLCFKENDG

SEQ ID NO: 2438 - protein, 160 aa, Homo sapiens; identical to SEQ ID NO: 2437

SEQ ID NO: 2439 - protein, 160 aa, Homo sapiens; identical to SEQ ID NO: 2437

SEQ ID NO: 2440 - protein, 184 aa, Homo sapiens
MARGAALALLLFGLLGVLVAAPDGGFDLSDALPDNENKKPTAIPKKPSAGDDFDLGDAVVDGENDDPRPPNPPKPMPNPNPNHPSSSGSFSDADLADGVSGGEGKGGSDGGGSHRKEGEEADAPGVIPGIVGAVVVAVAGAISSFIAYQKKKLCFKENEQGEVDMESHRNANAEPAVQRTLLEK

SEQ ID NO: 2441 - protein, 177 aa, Homo sapiens
MARGAALALLLFGLLGVLVAAPDGGFDLSDALPDNENKKPTAIPKKPSAGDDFDLGDAVVDGENDDPRPPNPPKPMPNPNPNHPSSSGSFSDADLADGVSGGEGKGGSDGGGSHRKEGEEADAPGVIPGIVGAVVVAVAGAISSFIAYQKKKLCFKENGQLAGSLGPCIGIRREADG

SEQ ID NO: 2442 - protein, 169 aa, Homo sapiens
MARGAALALLLFGLLGVLVAAPDGGFDLSDALPGDDFDLGDAVVDGENDDPRPPNPPKPMPNPNPNHPSSSGSFSDADLADGVSGGEGKGGSDGGGSHRKEGEEADAPGVIPGIVGAVVVAVAGAISSFIAYQKKKLCFKENAEQGEVDMESHRNANAEPAVQRTLLEK

SEQ ID NO: 2443 - protein, 76 aa, Homo sapiens
MARGAALALLLFGLLGVLVAAPGFGDLRLQAARGGRPGVACHSHALRPGPKFGIARSLRPGWWGEGKEKLEKNFEP

SEQ ID NO: 2444 - protein, 22 aa, Homo sapiens
  SITE 1: note = misc_feature - Xaa can be any naturally occurring amino acid
XQKKKLCFKENERASMCVFLSV

SEQ ID NO: 2445 - protein, 109 aa, Homo sapiens
MAASTSMVPVAVTAAVAPVLSINSDFSDLREIKKQLLLIAGLTRERGLLHSSKWKMPRIWMPIPWPRPTLTLKSMIGQHISCMAAIARKPIFCICIPDIWPPGKRTSEK

SEQ ID NO: 2446 - protein, 597 aa, Homo sapiens
MAASTSMVPVAVTAAVAPVLSINSDFSDLREIKKQLLLIAGLTRERGLLHSSKWSAELAFSLPALPLAELQPPPPITEEDAQDMDAYTLAKAYFDVKEYDRAAHFLHGCNSKKAYFLYMYSRYLSGEKKKDDETVDSLGPLEKGQVKNEALRELRVELSKKHQARELDGFGLYLYGVVLRKLDLVKEAIDVFVEATHVLPLHWGAWLELCNLITDKEMLKFLSLPDTWMKEFFLAHIYTELQLIEEALQKYQNLIDVGFSKSSYIVSQIAVAYHNIRDIDKALSIFNELRKQDPYRIENMDTFSNLLYVRSMKSELSYLAHNLCEIDKYRVETCCVIGNYYSLRSQHEKAALYFQRALKLNPRYLGAWTLMGHEYMEMKNTSAAIQAYRHAIEVNKRDYRAWYGLGQTYEILKMPFYCLYYYRRAHQLRPNDSRMLVALGECYEKLNQLVEAKKCYWRAYAVGDVEKMALVKLAKLHEQLTESEQAAQCYIKYIQDIYSCGEIVEHLEESTAFRYLAQYYFKCKLWDEASTCAQKCCAFNDTREEGKALLRQILQLRNQGETPTTEVPAPFFLPASLSANNTPTRRVSPLNLSSVTP

SEQ ID NO: 2447 - protein, 151 aa, Homo sapiens
MAASTSMVPVAVTAAVAPVLSINSDFSDLREIKKQLLLIAGLTRERGLLHSSKWSAELAFSLPALPLAELQPPPPITEEDAQDMDAYTLAKAYFDVKEYDRAAHFLHGCNSKKAYFLYMYSRYLVRAILKCHSAFSETSIFRTNGKVKSFK

SEQ ID NO: 2448 - protein, 123 aa, Homo sapiens
MAASTSMVPVAVTAAVAPVLSINSDFSDLREIKKQLLLIAGLTRERGLLHSSKWSAELAFSLPALPLAELQPPPPITEMPRIWMPIPWPRPTLTLKSMIGQHISCMAAIARKPIFCICIPDIW

SEQ ID NO: 2449 - protein, 134 aa, Homo sapiens
  SITE 1: note = misc_feature - Xaa can be any naturally occurring amino acid
XSTSMVPVAVTAAVAPVLSINSDFSDLREIKKQLLLIAGLTRERGLLHSSKWSAELAFSLPALPLAELQPPPPITEMPRIWMPIPWPRPTLTLKSMIGQHISCMAAIARKPIFCICIPDICLEKKRRTMKQLIA

SEQ ID NO: 2450 - protein, 579 aa, Homo sapiens
MSAAIAALAASYGSGSGSESDSDSESSRCPLPAADSLMHLTKSPSSKPSLAVAVDSAPEVAVKEDLETGVHLDPAVKEVQYNPTYETMFAPEFGPENPFRTQQMAAPRNMLSGYAEPAHINDFMFEQQRRTFATYGYALDPSLDNHQVSAKYIGSVEEAEKNQGLTVFETGQKKTEKRKKFKENDASNIDGFLGPWAKYVDEKDVAKPSEEEQKELDEITAKRQKKGKQEEEKPGEEKTILHVKEMYDYQGRSYLHIPQDVGVNLRSTMPPEKCYLPKKQIHVWSGHTKGVSAVRLFPLSGHLLLSCSMDCKIKLWEVYGERRCLRTFIGHSKAVRDICFNTAGTQFLSAAYDRYLKLWDTETGQCISRFTNRKVPYCVKFNPDEDKQNLFVAGMSDKKIVQWDIRSGEIVQEYDRHLGAVNTIVFVDENRRFVSTSDDKSLRVWEWDIPVDFKYIAEPSMHSMPAVTLSPNGKWLACQSMDNQILIFGAQNRFRLNKKKIFKGHMVAGYACQVDFSPDMSYVISGDGNGKLNIWDWKTTKLYSRFKAHDKVCIGAVWHPHETSKVITCGWDGLIKLWD

SEQ ID NO: 2451 - protein, 539 aa, Homo sapiens
MSAAIAALAASYGSGSGSESDSDSESSRCPLPAADSLMHLTKSPSSKPSLAVAVDSAPEVAVKEDLETGVHLDPAVKEVQYNPTYETMFAPEFGPENPFRTQQMAAPRNMLSGYAEPAHINDFMFEQQRRTFATYGYALDPSLDNHQVSAKYIGSVEEAEKNQGLTVFETGQKKTEKRKKFKENDASNIDGFLGPWAKYVDEKDVAKPSEEEQKELDEITAKRQKKGKQEEEKPGEEKTILHVKEMYDYQGRSYLHIPQDVGVNLRSTMPPEKCYLPKKQIHVWSGHTKGVSAVRLFPLSGHLLLSCSMDCKIKLWEVYGERRCLRTFIGHSKAVRDICFNTAGTQFLSAAYDRYLKLWDTETGQCISRFTNRKVPYCVKFNPDEDKQNLFVAGMSDKKIVQWDIRSGEIVQEYDRHLGAVNTIVFVDENRRFVSTSDDKSLRVWEWDIPVDFKYIAEPSMHSMPAVTLSPNGKWLACQSMDNQILIFGAQNRFRLNKKKIFKGHMVAGYACQVDFSPDMRVPQSFQNLKEVTAGPQEG

SEQ ID NO: 2452 - protein, 579 aa, Homo sapiens; identical to SEQ ID NO: 2450

SEQ ID NO: 2453 - protein, 112 aa, Homo sapiens
MFVSDFRKEFYEVVQSQRVLLFVASDVDALCACKILQALFQCDHVQYTLVPVSGWQELETAFLEHKEQFHYFILINCGANVDLLDILQPDEDTIFFVCDTHRPVNVVNVYND

SEQ ID NO: 2454 - protein, 566 aa, Homo sapiens
MFVSDFRKEFYEVVQSQRVLLFVASDVDALCACKILQALFQCDHVQYTLVPVSGWQELETAFLEHKEQFHYFILINCGANVDLLDILQPDEDTIFFVCDTHRPVNVVNVYNDTQIKLLIKQDDDLEVPAYEDIFRDEEEDEEHSGNDSDGSEPSEKRTRLEEEIVEQTMRRRQRREWEARRRDILFDYEQYEYHGTSSAMVMFELAWMLSKDLNDMLWWAIVGLTDQWVQDKITQMKYVTDVGVLQRHVSRHNHRNEDEENTLSVDCTRISFEYDLRLVLYQHWSLHDSLCNTSYTAARFKLWSVHGQKRLQEFLADMGLPLKQVKQKFQAMDISLKENLREMIEESANKFGMKDMRVQTFSIHFGFKHKFLASDVVFATMSLMESPEKDGSGTDHFIQALDSLSRSNLDKLYHGLELAKKQLRATQQTIASCLCTNLVISQGPFLYCSLMEGTPDVMLFSRPASLSLLSKHLLKSFVCSTKNRRCKLLPLVMAAPLSMEHGTVTVVGIPPETDSSDRKNFFGRAFEKAAESTSSRMLHNHFDLSVIELKAEDRSKFLDALISLLS

SEQ ID NO: 2455 - protein, 566 aa, Homo sapiens; identical to SEQ ID NO: 2454

SEQ ID NO: 2456 - protein, 598 aa, Homo sapiens
MFVSDFRKEFYEVVQSQRVLLFVASDVDALCACKILQALFQCDHVQYTLVPVSGWQELETAFLEHKEQFHYFILINCGANVDLLDILQPDEDTIFFVCDTHRPVNVVNVYNDTQIKLLIKQDDDLEVPAYEDIFRDEEEDEEHSGNDSDGSEPSEKRTRLEEEIVEQTMRRRQRREWEARSGSGSEPVAAALEKSSRLFAGPMSDRTAPRSPRRDILFDYEQYEYHGTSSAMVMFELAWMLSKDLNDMLWWAIVGLTDQWVQDKITQMKYVTDVGVLQRHVSRHNHRNEDEENTLSVDCTRISFEYDLRLVLYQHWSLHDSLCNTSYTAARFKLWSVHGQKRLQEFLADMGLPLKQVKQKFQAMDISLKENLREMIEESANKFGMKDMRVQTFSIHFGFKHKFLASDVVFATMSLMESPEKDGSGTDHFIQALDSLSRSNLDKLYHGLELAKKQLRATQQTIASCLCTNLVISQGPFLYCSLMEGTPDVMLFSRPASLSLLSKHLLKSFVCSTKNRRCKLLPLVMAAPLSMEHGTVTVVGIPPETDSSDRKNFFGRAFEKAAESTSSRMLHNHFDLSVIELKAEDRSKFLDALISLLS

SEQ ID NO: 2457 - protein, 520 aa, Homo sapiens
MFVSDFRKEFYEVVQSQRVLLFVASDVDALCACKILQALFQCDHVQYTLVPVSGWQELETAFLEHKEQIKLLIKQDDDLEVPAYEDIFRDEEEDEEHSGNDSDGSEPSEKRTRLEEEIVEQTMRRRQRREWEARRRDILFDYEQYEYHGTSSAMVMFELAWMLSKDLNDMLWWAIVGLTDQWVQDKITQMKYVTDVGVLQRHVSRHNHRNEDEENTLSVDCTRISFEYDLRLVLYQHWSLHDSLCNTSYTAARFKLWSVHGQKRLQEFLADMGLPLKQVKQKFQAMDISLKENLREMIEESANKFGMKDMRVQTFSIHFGFKHKFLASDVVFATMSLMESPEKDGSGTDHFIQALDSLSRSNLDKLYHGLELAKKQLRATQQTIASCLCTNLVISQGPFLYCSLMEGTPDVMLFSRPASLSLLSKHLLKSFVCSTKNRRCKLLPLVMAAPLSMEHGTVTVVGIPPETDSSDRKNFFGRAFEKAAESTSSRMLHNHFDLSVIELKAEDRSKFLDALISLLS

SEQ ID NO: 2458 - protein, 159 aa, Homo sapiens
MLPHWRVLLFVASDVDALCACKILQALFQCDHVQYTLVPVSGWQELETAFLEHKEQFHYFILINCGANVDLLDILQPDEDTIFFVCDTHRPVNVVNVYNDTQIKLLIKQDDDLEVPAYEDIFRDEEEDEEHSGNDSDGSEPSEKRTRLEEEIVEQTMRR

SEQ ID NO: 2459 - protein, 96 aa, Homo sapiens
  SITE 1: note = misc_feature - Xaa can be any naturally occurring amino acid
XDEDTIFFVCDTHRPVNVVNVYNDTQIKLLIKQDDDLEVPAYEDIFRDEEEDEEHSGNDSDGSEPSEKRTRLEEEIVEQTMRRRQRREWEARRIIY

SEQ ID NO: 2460 - protein, 836 aa, Homo sapiens
MAGLNCGVSIALLGVLLLGAARLPRGAEAFEIALPRESNITVLIKLGTPTLLAKPCYIVISKRHITMLSIKSGERIVFTFSCQSPENHFVIEIQKNIDCMSGPCPFGEVQLQPSTSLLPTLNRTFIWDVKAHKSIGLELQFSIPRLRQIGPGESCPDGVTHSISGRIDATVVRIGTFCSNGTVSRIKMQEGVKMALHLPWFHPRNVSGFSIANRSSIKRLCIIESVFEGEGSATLMSANYPEGFPEDELMTWQFVVPAHLRASVSFLNFNLSNCERKEERVEYYIPGSTTNPEVFKLEDKQPGNMAGNFNLSLQGCDQDAQSPGILRLQFQVLVQHPQNESNKIYVVDLSNERAMSLTIEPRPVKQSRKFVPGCFVCLESRTCSSNLTLTSGSKHKISFLCDDLTRLWMNVEKTISCTDHRYCQRKSYSLQVPSDILHLPVELHDFSWKLLVPKDRLSLVLVPAQKLQQHTHEKPCNTSFSYLVASAIPSQDLYFGSFCPGGSIKQIQVKQNISVTLRTFAPSFQQEASRQGLTVSFIPYFKEEGVFTVTPDTKSKVYLRTPNWDRGLPSLTSVSWNISVPRDQVACLTFFKERSGVVCQTGRAFMIIQEQRTRAEEIFSLDEDVLPKPSFHHHSFWVNISNCSPTSGKQLDLLFSVTLTPRTVDLTVILIAAVGGGVLLLSALGLIICCVKKKKKKTNKGPAVGIYNDNINTEMPRQPKKFQKGRKDNDSHVYAVIEDTMVYGHLLQDSSGSFLQPEVDTYRPFQGTMGVCPPSPPTICSRAPTAKLATEEPPPRSPPESESEPYTFSHPNNGDVSSKDTDIPLLNTQEPMEPAE

SEQ ID NO: 2461 - protein, 343 aa, Homo sapiens
MAGLNCGVSIALLGVLLLGAARLPRGAEAFEIALPRESNITVLIKLGTPTLLAKPCYIVISKRHITMLSIKSGERIVFTFSCQSPENHFVIEIQKNIDCMSGPCPFGEVQLQPSTSLLPTLNRTFIWDVKAHKSIGLELQFSIPRLRQIGPGESCPDGVTHSISGRIDATVVRIGTFCSNGTVSRIKMQEGVKMALHLPWFHPRNVSGFSIANRSSIKRLCIIESVFEGEGSATLMSANYPEGFPEDELMTWQFVVPAHLRASVSFLNFNLSNCERKEERVEYYIPGSTTNPEVFKLEDKQPGNMAGNFNLSLQGCDQDAQSPGILRLQFQVLVQHPQNESSE

SEQ ID NO: 2462 - protein, 449 aa, Homo sapiens
MLAEWGACLLLAVALLGPGLQAQAMEGVKCGGVLSAPSGNFSSPNFPRLYPYNTECSWLIVVAEGSSVLLTFHAFDLEYHDTCSFDFLEIYNGASPDKGNLLGRFCGKVPPPPFTSSWHVMSVIFHSDKHVASHGFSAGYQKDVCGGVLTGLSGVLTSPEYPNNYPNSMECHWVIRAAGPAHVKLVFVDFQVEGNEECTYDYVAVLGGPGPTRGHHYCGSTRPPTLVSLGHELQVVFKSDFNIGGRGFKAYYFSGECQEVYMAMRGNFSSPQYPSSYPNNIRCHWTIRLPPGYQVKVFFLDLDLEEPNSLTKTCDFDHLAAFDGASEEAPLLGNWCGHHLPPPVTSSHNQLLLLLHTDRSTTRRGFSVAYIGGQLGCGSGSTEGEGEALQPQSLQSPSSIPPVCPAPPMNGLLQLLLHWLHPCPLSGPLRLDGTAPACFHYCRASFPSF

SEQ ID NO: 2463 - protein, 540 aa, Homo sapiens
MLAEWGACLLLAVALLGPGLQAQAMEGVKCGGVLSAPSGNFSSPNFPRLYPYNTECSWLIVVAEGSSVLLTFHAFDLEYHDTCSFDFLEIYNGASPDKGNLLGRFCGKVPPPPFTSSWHVMSVIFHSDKHVASHGFSAGYQKDVCGGVLTGLSGVLTSPEYPNNYPNSMECHWVIRAAGPAHVKLVFVDFQVEGNEECTYDYVAVLGGPGPTRGHHYCGSTRPPTLVSLGHELQVVFKSDFNIGGRGFKAYYFSGECQEVYMAMRGNFSSPQYPSSYPNNIRCHWTIRLPPGYQVKVFFLDLDLEEPNSLTKTCDFDHLAAFDGASEEAPLLGNWCGHHLPPPVTSSHNQLLLLLHTDRSTTRRGFSVAYIGVVPMNVSCSRTDFQILISTQALAPLERTKVYLGSRSCAAQEVGGNLRIQARFDTCGTESQRRNNTSVIVSVLYIDFSAAGREDIHEYEVRCEPRRKEASVHLLSGSHWLGPYAATAEHLQEAPPMDEAEALEGPVSMVAQDTSDIVFLGLCILAGILMVIAIVVLMLL

SEQ ID NO: 2464 - protein, 882 aa, Homo sapiens
MGPWSRSLSALLLLLQVSSWLCQEPEPCHPGFDAESYTFTVPRRHLERGRVLGRVNFEDCTGRQRTAYFSLDTRFKVGTDGVITVKRPLRFHNPQIHFLVYAWDSTYRKFSTKVTLNTVGHHHRPPPHQASVSGIQAELLTFPNSSPGLRRQKRDWVIPPISCPENEKGPFPKNLVQIKSNKDKEGKVFYSITGQGADTPPVGVFIIERETGWLKVTEPLDRERIATYTLFSHAVSSNGNAVEDPMEILITVTDQNDNKPEFTQEVFKGSVMEGALPGTSVMEVTATDADDDVNTYNAAIAYTILSQDPELPDKNMFTINRNTGVISVVTTGLDRESFPTYTLVVQAADLQGEGLSTTATAVITVTDTNDNPPIFNPTTYKGQVPENEANVVITTLKVTDADAPNTPAWEAVYTILNDDGGQFVVTTNPVNNDGILKTAKGLDFEAKQQYILHVAVTNVVPFEVSLTTSTATVTVDVLDVNEAPIFVPPEKRVEVSEDFGVGQEITSYTAQEPDTFMEQKITYRIWRDTANWLEINPDTGAISTRAELDREDFEHVKNSTYTALIIATDNGSPVATGTGTLLLILSDVNDNAPIPEPRTIFFCERNPKPQVINIIDADLPPNTSPFTAELTHGASANWTIQYNDPTQESIILKPKMALEVGDYKINLKLMDNQNKDQVTTLEVSVCDCEGAAGVCRKAQPVEAGLQIPAILGILGGILALLILILLLLLFLRRRAVVKEPLLPPEDDTRDNVYYYDEEGGGEEDQDFDLSQLHRGLDARPEVTRNDVAPTLMSVPRYLPRPANPDEIGNFIDENLKAADTDPTAPPYDSLLVFDYEGSGSEAASLSSLNSSESDKDQDYDYLNEWGNRFKKLADMYGGGEDD

SEQ ID NO: 2465 - protein, 821 aa, Homo sapiens
MGPWSRSLSALLLLLQVSSWLCQEPEPCHPGFDAESYTFTVPRRHLERGRVLGRVNFEDCTGRQRTAYFSLDTRFKVGTDGVITVKRPLRFHNPQIHFLVYAWDSTYRKFSTKVTLNTVGHHHRPPPHQASVSGIQAELLTFPNSSPGLRRQKRDWVIPPISCPENEKGPFPKNLVQIKSNKDKEGKVFYSITGQGADTPPVGVFIIERETGWLKVTEPLDRERIATYTLFSHAVSSNGNAVEDPMEILITVTDQNDNKPEFTQEVFKGSVMEGALPGTSVMEVTATDADDDVNTYNAAIAYTILSQDPELPDKNMFTINRNTGVISVVTTGLDRESFPTYTLVVQAADLQGEGLSTTATAVITVTDTNDNPPIFNPTTGLDFEAKQQYILHVAVTNVVPFEVSLTTSTATVTVDVLDVNEAPIFVPPEKRVEVSEDFGVGQEITSYTAQEPDTFMEQKITYRIWRDTANWLEINPDTGAISTRAELDREDFEHVKNSTYTALIIATDNGSPVATGTGTLLLILSDVNDNAPIPEPRTIFFCERNPKPQVINIIDADLPPNTSPFTAELTHGASANWTIQYNDPTQESIILKPKMALEVGDYKINLKLMDNQNKDQVTTLEVSVCDCEGAAGVCRKAQPVEAGLQIPAILGILGGILALLILILLLLLFLRRRAVVKEPLLPPEDDTRDNVYYYDEEGGGEEDQDFDLSQLHRGLDARPEVTRNDVAPTLMSVPRYLPRPANPDEIGNFIDENLKAADTDPTAPPYDSLLVFDYEGSGSEAASLSSLNSSESDKDQDYDYLNEWGNRFKKLADMYGGGEDD

SEQ ID NO: 2466 - protein, 537 aa, Homo sapiens
MGPWSRSLSALLLLLQVSSWLCQEPEPCHPGFDAESYTFTVPRRHLERGRVLGRVNFEDCTGRQRTAYFSLDTRFKVGTDGVITVKRPLRFHNPQIHFLVYAWDSTYRKFSTKVTLNTVGHHHRPPPHQASVSGIQAELLTFPNSSPGLRRQKRDWVIPPISCPENEKGPFPKNLVQIKSNKDKEGKVFYSITGQGADTPPVGVFIIERETGWLKVTEPLDRERIATYTLFSHAVSSNGNAVEDPMEILITVTDQNDNKPEFTQEVFKGSVMEGALPGTSVMEVTATDADDDVNTYNAAIAYTILSQDPELPDKNMFTINRNTGVISVVTTGLDRESFPTYTLVVQAADLQGEGLSTTATAVITVTDTNDNPPIFNPTTYKGQVPENEANVVITTLKVTDADAPNTPAWEAVYTILNDDGGQFVVTTNPVNNDGILKTAKGLDFEAKQQYILHVAVTNVVPFEVSLTTSTATVTVDVLDVNEAPIFVPPEKRVEVSEDFGVGQEITSYTAQEPDTFMEQKITFSSCYWNRDTSADPV

SEQ ID NO: 2467 - protein, 647 aa, Homo sapiens
MGPWSRSLSALLLLLQVSSWLCQEPEPCHPGFDAESYTFTVPRRHLERGRVLGRVNFEDCTGRQRTAYFSLDTRFKVGTDGVITVKRPLRFHNPQIHFLVYAWDSTYRKFSTKVTLNTVGHHHRPPPHQASVSGIQAELLTFPNSSPGLRRQKRDWVIPPISCPENEKGPFPKNLVQIKSNKDKEGKVFYSITGQGADTPPVGVFIIERETGWLKVTEPLDRERIATYTLFSHAVSSNGNAVEDPMEILITVTDQNDNKPEFTQEVFKGSVMEGALPGTSVMEVTATDADDDVNTYNAAIAYTILSQDPELPDKNMFTINRNTGVISVVTTGLDRESFPTYTLVVQAADLQGEGLSTTATAVITVTDTNDNPPIFNPTTYKGQVPENEANVVITTLKVTDADAPNTPAWEAVYTILNDDGGQFVVTTNPVNNDGILKTAKGLDFEAKQQYILHVAVTNVVPFEVSLTTSTATVTVDVLDVNEAPIFVPPEKRVEVSEDFGVGQEITSYTAQEPDTFMEQKITYRIWRDTANWLEINPDTGAISTRAELDREDFEHVKNSTYTALIIATDNGSPVATGTGTLLLILSDVNDNAPIPEPRTIFFCERNPKPQVINIIDADLPPNLASQSIGITDMSHCTCPAPQLPAIF

SEQ ID NO: 2468 - protein, 903 aa, Homo sapiens
MGPWSRSLSALLLLLQVSSWLCQEPEPCHPGFDAESYTFTVPRRHLERGRVLGRVNFEDCTGRQRTAYFSLDTRFKVGTDGVITVKRPLRFHNPQIHFLVYAWDSTYRKFSTKVTLNTVGHHHRPPPHQASVSGIQAELLTFPNSSPGLRRQKRDWVIPPISCPENEKGPFPKNLVQIKSNKDKEGKVFYSITGQGADTPPVGVFIIERETGWLKVTEPLDRERIATYTLFSHAVSSNGNAVEDPMEILITVTDQNDNKPEFTQEVFKGSVMEGALPGTSVMEVTATDADDDVNTYNAAIAYTILSQDPELPDKNMFTINRNTGVISVVTTGLDRESFPTYTLVVQAADLQGEGLSTTATAVITVTDTNDNPPIFNPTTYKGQVPENEANVVITTLKVTDADAPNTPAWEAVYTILNDDGGQFVVTTNPVNNDGILKTAKVWYLARCRNWHPHSCSYPCPLGLDFEAKQQYILHVAVTNVVPFEVSLTTSTATVTVDVLDVNEAPIFVPPEKRVEVSEDFGVGQEITSYTAQEPDTFMEQKITYRIWRDTANWLEINPDTGAISTRAELDREDFEHVKNSTYTALIIATDNGSPVATGTGTLLLILSDVNDNAPIPEPRTIFFCERNPKPQVINIIDADLPPNTSPFTAELTHGASANWTIQYNDPTQESIILKPKMALEVGDYKINLKLMDNQNKDQVTTLEVSVCDCEGAAGVCRKAQPVEAGLQIPAILGILGGILALLILILLLLLFLRRRAVVKEPLLPPEDDTRDNVYYYDEEGGGEEDQDFDLSQLHRGLDARPEVTRNDVAPTLMSVPRYLPRPANPDEIGNFIDENLKAADTDPTAPPYDSLLVFDYEGSGSEAASLSSLNSSESDKDQDYDYLNEWGNRFKKLADMYGGGEDD

SEQ ID NO: 2469 - protein, 647 aa, Homo sapiens [sequence omitted]

SEQ ID NO: 2470 - protein, 414 aa, Homo sapiens
MGPWSRSLSALLLLLQVSSWLCQEPEPCHPGFDAESYTFTVPRRHLERGRVLGRVNFEDCTGRQRTAYFSLDTRFKVGTDGVITVKRPLRFHNPQIHFLVYAWDSTYRKFSTKVTLNTVGHHHRPPPHQASVSGIQAELLTFPNSSPGLRRQKRDWVIPPISCPENEKGPFPKNLVQLFSHAVSSNGNAVEDPMEILITVTDQNDNKPEFTQEVFKGSVMEGALPGTSVMEVTATDADDDVNTYNAAIAYTILSQDPELPDKNMFTINRNTGVISVVTTGLDRESFPTYTLVVQAADLQGEGLSTTATAVITVTDTNDNPPIFNPTTYKGQVPENEANVVITTLKVTDADAPNTPAWEAVYTILNDDGGQFVVTTNPVNNDGILKTAKVCMVPGKMQKLASSQLFIPLSPGLGF

SEQ ID NO: 2471 - protein, 155 aa, Homo sapiens
  SITE 1: note = misc_feature - Xaa can be any naturally occurring amino acid
XTDGVITVKRPLRFHNPQIHFLVYAWDSTYRKFSTKVTLNTVGHHHRPPPHQASVSGIQAELLTFPNSSPGLRRQKRDWVIPPISCPENEKGPFPKNLVQIKSNKDKEGKVFYSITGQGADTPPVGVFIIERETGWLKVTEPLDRERIATYTEPL

SEQ ID NO: 2472 - protein, 670 aa, Homo sapiens
MAQAVDRDTNRPLEPPSEFIVKVQDINDNPPEFLHETYHANVPERSNVGTSVIQVTASDADDPTYGNSAKLVYSILEGQPYFSVEAQTGIIRTALPNMDREAKEEYHVVIQAKDMGGHMGGLSGTTKVTITLTDVNDNPPKFPQSVYQMSVSEAAVPGEEVGRVKAKDPDIGENGLVTYNIVDGDGMESFEITTDYETQEGVIKLKKPVDFETKRAYSLKVEAANVHIDPKFISNGPFKDTVTVKISVEDADEPPMFLAPSYIHEVQENAAAGTVVGRVHAKDPDAANSPIRYSIDRHTDLDRFFTINPEDGFIKTTKPLDREETAWLNITVFAAEIHNRHQEAKVPVAIRVLDVNDNAPKFAAPYEGFICESDQTKPLSNQPIVTISADDKDDTANGPRFIFSLPPEIIHNPNFTVRDNRDNTAGVYARRGGFSRQKQDLYLLPIVISDGGIPPMSSTNTLTIKVCGCDVNGALLSCNAEAYILNAGLSTGALIAILACIVILLVIVVLFVTLRRQKKEPLIVFEEEDVRENIITYDDEGGGEEDTEAFDIATLQNPDGINGFIPRKDIKPEYQYMPRPGLRPAPNSVDVDDFINTRIQEADNDPTAPPYDSIQIYGYEGRGSVAGSLSSLESATTDSDLDYDYLQNWGPRFKKLADLYGSKDTFDDDS

SEQ ID NO: 2473 - protein, 22 aa, Homo sapiens
MKENYCLQAALVCLGMLCHSHA

SEQ ID NO: 2474 - protein, 34 aa, Homo sapiens
MKENYCLQAALVCLGMLCHSHAFAPERRGHLRPS

SEQ ID NO: 2475 - protein, 54 aa, Homo sapiens
MKENYCLQAALVCLGMLCHSHAFAPERRGHLRPSFHGHHEKGKEGQVLQRSKRG

SEQ ID NO: 2476 - protein, 65 aa, Homo sapiens
MKENYCLQAALVCLGMLCHSHAFAPERRGHLRPSFHGHHEKGKEGQVLQRSKRGWVWNQFFVIEE

SEQ ID NO: 2477 - protein, 70 aa, Homo sapiens
MKENYCLQAALVCLGMLCHSHAFAPERRGHLRPSFHGHHEKGKEGQVLQRSKRGWVWNQFFVIEEYTGPD

SEQ ID NO: 2478 - protein, 222 aa, Homo sapiens
MKENYCLQAALVCLGMLCHSHAFAPERRGHLRPSFHGHHEKGKEGQVLQRSKRGWVWNQFFVIEEYTGPDPVLVGRLHSDIDSGDGNIKYILSGEGAGTIFVIDDKSGNIHATKTLDREERAQYTLMAQAVDRDTNRPLEPPSEFIVKVQDINDNPPEFLHETYHANVPERSNVGTSVIQVTASDADDPTYGNSAKLVYSILEGQPYFSVEAQTGIIRTALP

SEQ ID NO: 2479 - protein, 796 aa, Homo sapiens
MKENYCLQAALVCLGMLCHSHAFAPERRGHLRPSFHGHHEKGKEGQVLQRSKRGWVWNQFFVIEEYTGPDPVLVGRLHSDIDSGDGNIKYILSGEGAGTIFVIDDKSGNIHATKTLDREERAQYTLMAQAVDRDTNRPLEPPSEFIVKVQDINDNPPEFLHETYHANVPERSNVGTSVIQVTASDADDPTYGNSAKLVYSILEGQPYFSVEAQTGIIRTALPNMDREAKEEYHVVIQAKDMGGHMGGLSGTTKVTITLTDVNDNPPKFPQSVYQMSVSEAAVPGEEVGRVKAKDPDIGENGLVTYNIVDGDGMESFEITTDYETQEGVIKLKKPVDFETKRAYSLKVEAANVHIDPKFISNGPFKDTVTVKISVEDADEPPMFLAPSYIHEVQENAAAGTVVGRVHAKDPDAANSPIRYSIDRHTDLDRFFTINPEDGFIKTTKPLDREETAWLNITVFAAEIHNRHQEAKVPVAIRVLDVNDNAPKFAAPYEGFICESDQTKPLSNQPIVTISADDKDDTANGPRFIFSLPPEIIHNPNFTVRDNRDNTAGVYARRGGFSRQKQDLYLLPIVISDGGIPPMSSTNTLTIKVCGCDVNGALLSCNAEAYILNAGLSTGALIAILACIVILLVIVVLFVTLRRQKKEPLIVFEEEDVRENIITYDDEGGGEEDTEAFDIATLQNPDGINGFIPRKDIKPEYQYMPRPGLRPAPNSVDVDDFINTRIQEADNDPTAPPYDSIQIYGYEGRGSVAGSLSSLESATTDSDLDYDYLQNWGPRFKKLADLYGSKDTFDDDS

SEQ ID NO: 2480 - protein, 693 aa, Homo sapiens
MKENYCLQAALVCLGMLCHSHAFAPERRGHLRPSFHGHHEKGKEGQVLQRSKRGWVWNQFFVIEEYTGPDPVLVGRLHSDIDSGDGNIKYILSGEGAGTIFVIDDKSGNIHATKTLDREERAQYTLMAQAVDRDTNRPLEPPSEFIVKVQDINDNPPEFLHETYHANVPERSNVGTSVIQVTASDADDPTYGNSAKLVYSILEGQPYFSVEAQTGIIRTALPNMDREAKEEYHVVIQAKDMGGHMGGLSGTTKVTITLTDVNDNPPKFPQSVYQMSVSEAAVPGEEVGRVKAKDPDIGENGLVTYNIVDGDGMESFEITTDYETQEGVIKLKKPVDFETKRAYSLKVEAANVHIDPKFISNGPFKDTVTVKISVEDADEPPMFLAPSYIHEVQENAAAGTVVGRVHAKDPDAANSPIRYSIDRHTDLDRFFTINPEDGFIKTTKPLDREETAWLNITVFAAEIHNRHQEAKVPVAIRVLDVNDNAPKFAAPYEGFICESDQTKPLSNQPIVTISADDKDDTANGPRFIFSLPPEIIHNPNFTVRDNRDNTAGVYARRGGFSRQKQDLYLLPIVISDGGIPPMSSTNTLTIKVCGCDVNGALLSCNAEAYILNAGLSTGALIAILACIVILLGCPSLMEPPSPREDMRLLYLGFQLMLFSYVKVNRRFCLLGVFIKLPFLYVVATESPTTLTSL

SEQ ID NO: 2481 - protein, 62 aa, Homo sapiens
  SITE 1: note = misc_feature - Xaa can be any naturally occurring amino acid
XMSVSEAAVPGEEVGRVKAKDPDIGENGLVTYNIVDGDGMESFEITTDYETQEGVIKLKKVS

SEQ ID NO: 2482 - protein, 760 aa, Homo sapiens
MKTPPGASSRTKCSRELRSFCAFSCPRAKQPTCTAWFPQQEHPSENGPQMPGRDPPAASTMQVLLLTSAEDLDCTPGFQQKVFHINQPAEFIEDQSILNLTFSDCKGNDKLRYEVSSPYFKVNSDGGLVALRNITAVGKTLFVHARTPHAEDMAELVIVGGKDIQGSLQDIFKFARTSPVPRQKRSIVVSPILIPENQRQPFPRDVGKVVDSDRPERSKFRLTGKGVDQEPKGIFRINENTGSVSVTRTLDREVIAVYQLFVETTDVNGKTLEGPVPLEVIVIDQNDNRPIFREGPYIGHVMEGSPTGTTVMRMTAFDADDPATDNALLRYNIRQQTPDKPSPNMFYIDPEKGDIVTVVSPALLDRETLENPKYELIIEAQDMAGLDVGLTGTATATIMIDDKNDHSPKFTKKEFQATVEEGAVGVIVNLTVEDKDDPTTGAWRAAYTIINGNPGQSFEIHTNPQTNEGMLSVVKPLDYEISAFHTLLIKVENEDPLVPDVSYGPSSTATVHITVLDVNEGPVFYPDPMMVTRQEDLSVGSVLLTVNATDPDSLQHQTIRYSVYKDPAGWLNINPINGTVDTTAVLDRESPFVDNSVYTALFLAIDSGNPPATGTGTLLITLEDVNDNAPFIYPTVAEVCDDAKNLSVVILGASDKDLHPNTDPFKFEIHKQAVPDKVWKISKINNTHALVSLLQNLNKANYNLPIMVTDSGKPPMTNITDLRVQVCSCRNSKVDCNAAGALRFSLPSVLLLSLFSLACL

SEQ ID NO: 2483 - protein, 37 aa, Homo sapiens
MQPRTPLVLCVLLSQSGGPVCKSQFQALPLAVQWLGV

SEQ ID NO: 2484 - protein, 67 aa, Homo sapiens
MQPRTPLVLCVLLSQTPVRPTIYLCQNLQFIKNKARDSNSLADHKGKRIQVNRLLPGLLFHDELSGI

SEQ ID NO: 2485 - protein, 52 aa, Homo sapiens
MQPRTPLVLCVLLSQVLLLTSAEDLDCTPGFQQKVFHINQPAEFIEDQSILN

SEQ ID NO: 2486 - protein, 67 aa, Homo sapiens
MQPRTPLVLCVLLSQVLLLTSAEDLDCTPGFQQKVFHINQPAEFIEDQSILNCKQCHSKMLLDSSHI

SEQ ID NO: 2487 - protein, 175 aa, Homo sapiens
MQPRTPLVLCVLLSQVLLLTSAEDLDCTPGFQQKVFHINQPAEFIEDQSILNLTFSDCKGNDKLRYEVSSPYFKVNSDGGLVALRNITAVGKTLFVHARTPHAEDMAELVIVGGKDIQGSLQDIFKFARTSPVPRQKRSIVVSPILIPENQRQPFPRDVGKMKIWQVLCLARWLT

SEQ ID NO: 2488 - protein, 190 aa, Homo sapiens
MQPRTPLVLCVLLSQVLLLTSAEDLDCTPGFQQKVFHINQPAEFIEDQSILNLTFSDCKGNDKLRYEVSSPYFKVNSDGGLVALRNITAVGKTLFVHARTPHAEDMAELVIVGGKDIQGSLQDIFKFARTSPVPRQKRSIVVSPILIPENQRQPFPRDVGKRTHNPINSELLLNEGITADLNPCITILAI

SEQ ID NO: 2489 - protein, 713 aa, Homo sapiens
MQPRTPLVLCVLLSQVLLLTSAEDLDCTPGFQQKVFHINQPAEFIEDQSILNLTFSDCKGNDKLRYEVSSPYFKVNSDGGLVALRNITAVGKTLFVHARTPHAEDMAELVIVGGKDIQGSLQDIFKFARTSPVPRQKRSIVVSPILIPENQRQPFPRDVGKVVDSDRPERSKFRLTGKGVDQEPKGIFRINENTGSVSVTRTLDREVIAVYQLFVETTDVNGKTLEGPVPLEVIVIDQNDNRPIFREGPYIGHVMEGSPTGTTVMRMTAFDADDPATDNALLRYNIRQQTPDKPSPNMFYIDPEKGDIVTVVSPALLDRETLENPKYELIIEAQDMAGLDVGLTGTATATIMIDDKNDHSPKFTKKEFQATVEEGAVGVIVNLTVEDKDDPTTGAWRAAYTIINGNPGQSFEIHTNPQTNEGMLSVVKPLDYEISAFHTLLIKVENEDPLVPDVSYGPSSTATVHITVLDVNEGPVFYPDPMMVTRQEDLSVGSVLLTVNATDPDSLQHQTIRYSVYKDPAGWLNINPINGTVDTTAVLDRESPFVDNSVYTALFLAIDSGNPPATGTGTLLITLEDVNDNAPFIYPTVAEVCDDAKNLSVVILGASDKDLHPNTDPFKFEIHKQAVPDKVWKISKINNTHALVSLLQNLNKANYNLPIMVTDSGKPPMTNITDLRVQVCSCRNSKVDCNAAGALRFSLPSVLLLSLFSLACL

SEQ ID NO: 2490 - protein, 674 aa, Homo sapiens
MQPRTPLVLCVLLSQVLLLTSAEDLDCTPGFQQKVFHINQPAEFIEDQSILNLTFSDCKGNDKLRYEVSSPYFKVNSDGGLVALRNITAVGKTLFVHARTPHAEDMAELVIVGGKDIQGSLQVVDSDRPERSKFRLTGKGVDQEPKGIFRINENTGSVSVTRTLDREVIAVYQLFVETTDVNGKTLEGPVPLEVIVIDQNDNRPIFREGPYIGHVMEGSPTGTTVMRMTAFDADDPATDNALLRYNIRQQTPDKPSPNMFYIDPEKGDIVTVVSPALLDRETLENPKYELIIEAQDMAGLDVGLTGTATATIMIDDKNDHSPKFTKKEFQATVEEGAVGVIVNLTVEDKDDPTTGAWRAAYTIINGNPGQSFEIHTNPQTNEGMLSVVKPLDYEISAFHTLLIKVENEDPLVPDVSYGPSSTATVHITVLDVNEGPVFYPDPMMVTRQEDLSVGSVLLTVNATDPDSLQHQTIRYSVYKDPAGWLNINPINGTVDTTAVLDRESPFVDNSVYTALFLAIDSGNPPATGTGTLLITLEDVNDNAPFIYPTVAEVCDDAKNLSVVILGASDKDLHPNTDPFKFEIHKQAVPDKVWKISKINNTHALVSLLQNLNKANYNLPIMVTDSGKPPMTNITDLRVQVCSCRNSKVDCNAAGALRFSLPSVLLLSLFSLACL

SEQ ID NO: 2491 - protein, 56 aa, Homo sapiens
MQPRTPLVLCVLLSQVLLLTSAEDLDCTPGFQQKVFHINQPAEFIEDQSILNYVFY

SEQ ID NO: 2492 - protein, 147 aa, Homo sapiens
MILQAHLHSLCLLMLYLATGYGQEGKFSGPLKPMTFSIYEGQEPSQIIFQFKANPPAVTFELTGETDNIFVIEREGLLYYNRALDRETRSTHNLQVAALDANGIIVEGPVPITIKVKDINDNRPTFLQSKYEGSVRQNSRPGKPFLY

SEQ ID NO: 2493 - protein, 832 aa, Homo sapiens
MILQAHLHSLCLLMLYLATGYGQEGKFSGPLKPMTFSIYEGQEPSQIIFQFKANPPAVTFELTGETDNIFVIEREGLLYYNRALDRETRSTHNLQVAALDANGIIVEGPVPITIKVKDINDNRPTFLQSKYEGSVRQNSRPGKPFLYVNATDLDDPATPNGQLYYQIVIQLPMINNVMYFQINNKTGAISLTREGSQELNPAKNPSYNLVISVKDMGGQSENSFSDTTSVDIIVTENIWKAPKPVEMVENSTDPHPIKITQVRWNDPGAQYSLVDKEKLPRFPFSIDQEGDIYVTQPLDREEKDAYVFYAVAKDEYGKPLSYPLEIHVKVKDINDNPPTCPSPVTVFEVQENERLGNSIGTLTAHDRDEENTANSFLNYRIVEQTPKLPMDGLFLIQTYAGMLQLAKQSLKKQDTPQYNLTIEVSDKDFKTLCFVQINVIDINDQIPIFEKSDYGNLTLAEDTNIGSTILTIQATDADEPFTGSSKILYHIIKGDSEGRLGVDTDPHTNTGYVIIKKPLDFETAAVSNIVFKAENPEPLVFGVKYNASSFAKFTLIVTDVNEAPQFSQHVFQAKVSEDVAIGTKVGNVTAKDPEGLDISYSLRGDTRGWLKIDHVTGEIFSVAPLDREAGSPYRVQVVATEVGGSSLSSVSEFHLILMDVNDNPPRLAKDYTGLFFCHPLSAPGSLIFEATDDDQHLFRGPHFTFSLGSGSLQNDWEVSKINGTHARLSTRHTEFEEREYVVLIRINDGGRPPLEGIVSLPVTFCSCVEGSCFRPAGHQTGIPTVGMAVGILLTTLLVIGIILAVVFIRIKKDKGKDNVESAQASEVKPLRS

SEQ ID NO: 2494 - protein, 832 aa, Homo sapiens; identical to SEQ ID NO: 2493

SEQ ID NO: 2495 - protein, 580 aa, Homo sapiens
MILQAHLHSLCLLMLYLATGYGQEGKFSGPLKPMTFSIYEGQEPSQIIFQFKANPPAVTFELTGETDNIFVIEREGLLYYNRALDRETRSTHNLQVAALDANGIIVEGPVPITIKVKDINDNRPTFLQSKYEGSVRQNSRPGNSIGTLTAHDRDEENTANSFLNYRIVEQTPKLPMDGLFLIQTYAGMLQLAKQSLKKQDTPQYNLTIEVSDKDFKTLCFVQINVIDINDQIPIFEKSDYGNLTLAEDTNIGSTILTIQATDADEPFTGSSKILYHIIKGDSEGRLGVDTDPHTNTGYVIIKKPLDFETAAVSNIVFKAENPEPLVFGVKYNASSFAKFTLIVTDVNEAPQFSQHVFQAKVSEDVAIGTKVGNVTAKDPEGLDISYSLRGDTRGWLKIDHVTGEIFSVAPLDREAGSPYRVQVVATEVGGSSLSSVSEFHLILMDVNDNPPRLAKDYTGLFFCHPLSAPGSLIFEATDDDQHLFRGPHFTFSLGSGSLQNDWEVSKINGTHARLSTRHTEFEEREYVVLIRINDGGRPPLEGIVSLPGIILAVVFIRIKKDKGKDNVESAQASEVKPLRS

SEQ ID NO: 2496 - protein, 90 aa, Homo sapiens
  SITE 1: note = misc_feature - Xaa can be any naturally occurring amino acid
XIDINDQIPIFEKSDYGNLTLAEDTNIGSTILTIQATDADEPFTGSSKILYHIIKGDSEGRLGVDTDPHTNTGYVIIKKLFTEGRHKRLA

SEQ ID NO: 2497 - protein, 790 aa, Homo sapiens
MKITSTSCICPVLVCLCFVQRCYGTAHHSSIKVMRNQTKHIEGETEVHHRPKRGWVWNQFFVLEEHMGPDPQYVGKLHSNSDKGDGSVKYILTGEGAGTIFIIDDTTGDIHSTKSLDREQKTHYVLHAQAIDRRTNKPLEPESEFIIKVQDINDNAPKFTDGPYIVTVPEMSDMGTSVLQVTATDADDPTYGNSARVVYSILQGQPYFSVDPKTGVIRTALHNMDREAREHYSVVIQAKDMAGQVGGLSGSTTVNITLTDVNDNPPRFPQKHYQLYVPESAQVGSAVGKIKANDADTGSNADMTYSIINGDGMGIFSISTDKETREGILSLKKPLNYEKKKSYTLNIEGANTHLDFRFSHLGPFKDATMLKIIVGDVDEPPLFSMPSYLMEVYENAKIGTVVGTVLAQDPDSTNSLVRYFINYNVEDDRFFNIDANTGTIRTTKVLDREETPWYNITVTASEIDNPDLLSHVTVGIRVLDVNDNPPELAREYDIIVCENSKPGQVIHTISATDKDDFANGPRFNFFLDERLPVNPNFTLKDNEDNTASILTRRRRFSRTVQDVYYLPIMISDGGIPSLSSSSTLTIRVCACERDGRVRTCHAEAFLSSAGLSTGALIAILLCVLILLAIVVLFITLRRSKKEPLIISEEDVRENVVTYDDEGGGEEDTEAFDITALRNPSAAEELKYRRDIRPEVKLTPRHQTSSTLESIDVQEFIKQRLAEADLDPSVPPYDSLQTYAYEGQRSEAGSISSLDSATTQSDQDYHYLGDWGPEFKKLAELYGEIESERTT

SEQ ID NO: 2498 - protein, 790 aa, Homo sapiens; identical to SEQ ID NO: 2497

SEQ ID NO: 2499 - protein, 590 aa, Homo sapiens
MKITSTSCICPVLVCLCFVQRCYGTAHHSSIKVMRNQTKHIEGETEVHHRPKRGWVWNQFFVLEEHMGPDPQYVGKLHSNSDKGDGSVKYILTGEGAGTIFIIDDTTGDIHSTKSLDREQKTHYVLHAQAIDRRTNKPLEPESEFIIKVQDINDNAPKFTDGPYIVTVPEMSDMGTSVLQVTATDADDPTYGNSARVVYSILQGQPYFSVDPKTGVIRTALHNMDREAREHYSVVIQAKDMAGQVGGLSGSTTVNITLTDVNDNPPRFPQKHYQLYVPESAQVGSAVGKIKANDADTGSNADMTYSIINGDGMGIFSISTDKETREGILSLKKPLNYEKKKSYTLNIEGANTHLDFRFSHLGPFKDATMLKIIVGDVDEPPLFSMPSYLMEVYENAKIGTVVGTVLAQDPDSTNSLVRYFINYNVEDDRFFNIDANTGTIRTTKVLDREETPWYNITVTASEIDNPDLLSHVTVGIRVLDVNDNPPELAREYDIIVCENSKPGQVIHTISATDKDDFANGPRFNFFLDERLPVNPNFTLKDNEGEHIYTYLFIYVVSALTLYVIGFILIYTQTSCKSAFKVSLMLLCYDL

SEQ ID NO: 2500 - protein, 575 aa, Homo sapiens
MKITSTSCICPVLVCLCFVQRCYGTAHHSSIKVMRNQTKHIEGETEVHHRPKRGWVWNQFFVLEEHMGPDPQYVGKLHSNSDKGDGSVKYILTGEGAGTIFIIDDTTGDIHSTKSLDREQKTHYVLHAQAIDRRTNKPLEPESEFIIKVQDINDNAPKFTDGPYIVTVPEMSDMGTSVLQVTATDADDPTYGNSARVVYSILQGQPYFSVDPKTGVIRTALHNMDREAREHYSVVIQAKDMAGQVGGLSGSTTVNITLTDVNDNPPRFPQKHYQLYVPESAQVGSAVGKIKANDADTGSNADMTYSIINGDGMGIFSISTDKETREGILSLKKPLNYEKKKSYTLNIEGANTHLDFRFSHLGPFKDATMLKIIVGDVDEPPLFSMPSYLMEVYENAKIGTVVGTVLAQDPDSTNSLVRYFINYNVEDDRFFNIDANTGTIRTTKVLDREETPWYNITVTASEIDNPDLLSHVTVGIRVLDVNDNPPELAREYDIIVCENSKPGQVIHTISATDKDDFANGPRFNFFLDERLPVNPNFTLKDNEAAAAPSPSGFVHAREMGVCGPAMQKPSCPRLV

SEQ ID NO: 2501 - protein, 790 aa, Homo sapiens; identical to SEQ ID NO: 2497

SEQ ID NO: 2502 - protein, 574 aa, Homo sapiens
MKITSTSCICPVLVCLCFVQRCYGTAHHSSIKVMRNQTKHIEGETEVHHRPKRGWVWNQFFVLEEHMGPDPQYVGKLHSNSDKGDGSVKYILTGEGAGTIFIIDDTTGDIHSTKSLDREQKTHYVLHAQAIDRRTNKPLEPESEFIIKVQDINDNAPKFTDGPYIVTVPEMSDMGTSVLQVTATDADDPTYGNSARVVYSILQGQPYFSVDPKTGVIRTALHNMDREAREHYSVVIQAKDMAGQVGGLSGSTTVNITLTDVNDNPPRFPQKHYQLYVPESAQVGSAVGKIKANDADTGSNADMTYSIINGDGMGIFSISTDKETREGILSLKKPLNYEKKKSYTLNIEGANTHLDFRFSHLGPFKDATMLKIIVGDVDEPPLFSMPSYLMEVYENAKIGTVVGTVLAQDPDSTNSLVRYFINYNVEDDRFFNIDANTGTIRTTKVLDREETPWYNITVTASEIDNPDLLSHVTVGIRVLDVNDNPPELAREYDIIVCENSKPGQVIHTISATDKDDFANGPRFNFFLDERLPVNPNFTLKDNEAAAPSPSGFVHAREMGVCGPAMQKPSCPRLV

SEQ ID NO: 2503 - protein, 441 aa, Homo sapiens
WVWNQFFVLEEHMGPDPQYVGKLHSNSDKGDGSVKYILTGEGAGTIFIIDDTTGDIHSTKSLDREQKTHYVLHAQAIDRRTNKPLEPESEFIIKVQDINDNAPKFTDGPYIVTVPEMSDMGTSVLQVTATDADDPTYGNSARVVYSILQGQPYFSVDPKTGVIRTALHNMDREAREHYSVVIQAKDMAGQVGGLSGSTTVNITLTDVNDNPPRFPQKHYQLYVPESAQVGSAVGKIKANDADTGSNADMTYSIINGDGMGIFSISTDKETREGILSLKKPLNYEKKKSYTLNIEGANTHLDFRFSHLGPFKDATMLKIIVGDVDEPPLFSMPSYLMEVYENAKIGTVVGTVLAQDPDSTNSLVRYFINYNVEDDRFFNIDANTGTIRTTKVLDREETPWYNITVTASEIAAAAPSPSGFVHAREMGVCGPAMQKPSCPRLV

SEQ ID NO: 2504 - protein, 434 aa, Homo sapiens
GIPLLWPCLGATENSQTKKVKQPVRSHLRVKRGWVWNQFFVPEEMNTTSHHIGQLRSDLDNGNNSFQYKLLGAGAGSTFIIDERTGDIYAIQKLDREERSLYILRAQVIDIATGRAVEPESEFVIKVSDINDNEPKFLDEPYEAIVPEMSPEGTLVIQVTASDADDPSSGNNARLLYSLLQGQPYFSVEPTTGVIRISSKMDRELQDEYWVIIQAKDMIGQPGALSGTTSVLIKLSDVNDNKPIFKESLYRLTVSESAPTGTSIGTIMAYDNDIGENAEMDYSIEEDDSQTFDIITNHETQEGIVILKKKVDFEHQNHYGIRAKVKNHHVPEQLMKYHTEASTTFIKIQVEDVDEPPLFLLPYYVFEVFEETPQGSFVGVVSATDPDNRKSPIRYSITRSKVFNINDNGTITTSNSLDREISAWYNLSITATEK

SEQ ID NO: 2505 - protein, 65 aa, Homo sapiens
MNCYLLLRFMLGIPLLWPCLGATENSQTKKVKQPVRSHLRVKRGWVWNQFFVPEEMNTTSHHIGQ

SEQ ID NO: 2506 - protein, 772 aa, Homo sapiens
MNCYLLLRFMLGIPLLWPCLGATENSQTKKVKQPVRSHLRVKRGWVWNQFFVPEEMNTTSHHIGQLRSDLDNGNNSFQYKLLGAGAGSTFIIDERTGDIYAIQKLDREERSLYILRAQVIDIATGRAVEPESEFVIKVSDINDNEPKFLDEPYEAIVPEMSPEGTLVIQVTASDADDPSSGNNARLLYSLLQGQPYFSVEPTTGVIRISSKMDRELQDEYWVIIQAKDMIGQPGALSGTTSVLIKLSDVNDNKPIFKESLYRLTVSESAPTGTSIGTIMAYDNDIGENAEMDYSIEEDDSQTFDIITNHETQEGIVILKKKVDFEHQNHYGIRAKVKNHHVPEQLMKYHTEASTTFIKIQVEDVDEPPLFLLPYYVFEVFEETPQGSFVGVVSATDPDNRKSPIRYSITRSKVFNINDNGTITTSNSLDREISAWYNLSITATEKYNIEQISSIPLYVQVLNINDHAPEFSQYYETYVCENAGSGQVIQTISAVDRDESIEEHHFYFNLSVEDTNNSSFTIIDNQDNTAVILTNRTGFNLQEEPVFYISILIADNGIPSLTSTNTLTIHVCDCGDSGSTQTCQYQELVLSMGFKTEVIIAILICIMIIFGFIFLTLGLKQRRKQILFPEKSEDFRENIFQYDDEGGGEEDTEAFDIAELRSSTIMRERKTRKTTSAEIRSLYRQSLQVGPDSAIFRKFILEKLEEANTDPCAPPFDSLQTYAFEGTGSLAGSLSSLESAVSDQDESYDYLNELGPRFKRLACMFGSAVQSNN

SEQ ID NO: 2507 - protein, 490 aa, Homo sapiens
MNCYLLLRFMLGIPLLWPCLGATENSQTKKVKQPVRSHLRVKRGWVWNQFFVPEEMNTTSHHIGQLRSDLDNGNNSFQYKLLGAGAGSTFIIDERTGDIYAIQKLDREERSLYILRAQVIDIATGRAVEPESEFVIKVSDINDNEPKFLDEPYEAIVPEMSPEGTLVIQVTASDADDPSSGNNARLLYSLLQGQPYFSVEPTTGVIRISSKMDRELQDEYWVIIQAKDMIGQPGALSGTTSVLIKLSDVNDNKPIFKESLYRLTVSESAPTGTSIGTIMAYDNDIGENAEMDYSIEEDDSQTFDIITNHETQEGIVILKKKVDFEHQNHYGIRAKVKNHHVPEQLMKYHTEASTTFIKIQVEDVDEPPLFLLPYYVFEVFEETPQGSFVGVVSATDPDNRKSPIRYSITRSKVFNINDNGTITTSNSLDREISAWYNLSITATEKYNIEQISSIPLYVQVLNINDHAPEFSQYYETYVCENAGSGQGLFF

SEQ ID NO: 2508 - protein, 541 aa, Homo sapiens
MNCYLLLRFMLGIPLLWPCLGATENSQTKKVKQPVRSHLRVKRGWVWNQFFVPEEMNTTSHHIGQLRSDLDNGNNSFQYKLLGAGAGSTFIIDERTGDIYAIQKLDREERSLYILRAQVIDIATGRAVEPESEFVIKVSDINDNEPKFLDEPYEAIVPEMSPEGTLVIQVTASDADDPSSGNNARLLYSLLQGQPYFSVEPTTGVIRISSKMDRELQDEYWVIIQAKDMIGQPGALSGTTSVLIKLSDVNDNKPIFKESLYRLTVSESAPTGTSIGTIMAYDNDIGENAEMDYSIEEDDSQTFDIITNHETQEGIVILKKKVDFEHQNHYGIRAKVKNHHVPEQLMKYHTEASTTFIKIQVEDVDEPPLFLLPYYVFEVFEETPQGSFVGVVSATDPDNRKSPIRYSITRSKVFNINDNGTITTSNSLDREISAWYNLSITATEKYNIEQISSIPLYVQVLNINDHAPEFSQYYETYVCENAGSGQVIQTISAVDRDESIEEHHFYFNLSVEDTNNSSFTIIDNQELVLTFKKNLSSTSPS

SEQ ID NO: 2509 - protein, 445 aa, Homo sapiens
MDNDPLVFGVSGEEASRFFAVEPDTGVVWLRQPLDRETKSEFTVEFSVSDHQGVITRKVNIQVGDVNDNAPTFHNQPYSVRIPENTPVGTPIFIVNATDPDLGAGGSVLYSFQPPSQFFAIDSARGIVTVIRELDYETTQAYQLTVNALAIIITNLPYSTNIYEHSPPGTTVRIITAIDQDKGRPRGIGYTIVSGNTNSIFALDYISGVLTLNGLLDRENPLYSHGFILTVKGTELNDDRTPSDATVTTTFNILVIDINDNAPEFNSSEYSVAITELAQVGFALPLFIQVVDKDEGLNSMFEVYLVGNNSHHFIISPTSVQGKADIRIRVAIPLDYETVDRYDFDLFANESVPDHVGYAKVKITLINENDNRPIFSQPLYNISLYENVTVGTSVLTVLVSPRFTAGPLSSPGPTVVRHPEGFCPRDLSNQGRRHPQIPELCLLVY

SEQ ID NO: 2510 - protein, 3354 aa, Homo sapiens
MGRHVATSCHVAWLLVLISGCWGQVNRLPFFTNHFFDTYLLISEDTPVGSSVTQLLAQDMDNDPLVFGVSGEEASRFFAVEPDTGVVWLRQPLDRETKSEFTVEFSVSDHQGVITRKVNIQVGDVNDNAPTFHNQPYSVRIPENTPVGTPIFIVNATDPDLGAGGSVLYSFQPPSQFFAIDSARGIVTVIRELDYETTQAYQLTVNATDQDKTRPLSTLANLAIIITDVQDMDPIFINLPYSTNIYEHSPPGTTVRIITAIDQDKGRPRGIGYTIVSGNTNSIFALDYISGVLTLNGLLDRENPLYSHGFILTVKGTELNDDRTPSDATVTTTFNILVIDINDNAPEFNSSEYSVAITELAQVGFALPLFIQVVDKDENLGLNSMFEVYLVGNNSHHFIISPTSVQGKADIRIRVAIPLDYETVDRYDFDLFANESVPDHVGYAKVKITLINENDNRPIFSQPLYNISLYENVTVGTSVLTVLATDNDAGTFGEVSYFFSDDPDRFSLDKDTGLIMLIARLDYELIQRFTLTIIARDGGGEETTGRVRINVLDVNDNVPTFQKDAYVGALRENEPSVTQLVRLRATDEDSPPNNQITYSIVSASAFGSYFDISLYEGYGVISVSRPLDYEQISNGLIYLTVMAMDAGNPPLNSTVPVTIEVFDENDNPPTFSKPAYFVSVVENIMAGATVLFLNATDLDRSREYGQESIIYSLEGSTQFRINARSGEITTTSLLDRETKSEYILIVRAVDGGVGHNQKTGIATVNITLLDINDNHPTWKDAPYYINLVEMTPPDSDVTTVVAVDPDLGENGTLVYSIQPPNKFYSLNSTTGKIRTTHAMLDRENPDPHEAELMRKIVVSVTDCGRPPLKATSSATVFVNLLDLNDNDPTFQNLPFVAEVLEGIPAGVSIYQVVAIDLDEGLNGLVSYRMPVGMPRMDFLINSSSGVVVTTTELDRERIAEYQLRVVASDAGTPTKSSTSTLTIHVLDVNDETPTFFPAVYNVSVSEDVPREFRVVWLNCTDNDVGLNAELSYFITGGNVDGKFSVGYRDAVVRTVVGLDRETTAAYMLILEAIDNGPVGKRHTGTATVFVTVLDVNDNRPIFLQSSYEASVPEDIPEGHSILQLKATDADEGEFGRVWYRILHGNHGNNFRIHVSNGLLMRGPRPLDRERNSSHVLIVEAYNHDLGPMRSSVRVIVYVEDINDEAPVFTQQQYSRLGLRETAGIGTSVIVVQATDRDSGDGGLVNYRILSGAEGKFEIDESTGLIITVNYLDYETKTSYMMNVSATDQAPPFNQGFCSVYITLLNELDEAVQFSNASYEAAILENLALGTEIVRVQAYSIDNLNQITYRFNAYTSTQAKALFKIDAITGVITVQGLVDREKGDFYTLTVVADDGGPKVDSTVKVYITVLDENDNSPRFDFTSDSAVSIPEDCPVGQRVATVKAWDPDAGSNGQVVFSLASGNIAGAFEIVTTNDSIGEVFVARPLDREELDHYILQVVASDRGTPPRKKDHILQVTILDINDNPPVIESPFGYNVSVNENVGGGTAVVQVRATDRDIGINSVLSYYITEGNKDMAFRMDRISGEIATRPAPPDRERQSFYHLVATVEDEGTPTLSATTHVYVTIVDENDNAPMFQQPHYEVLLDEGPDTLNTSLITIQALDLDEGPNGTVTYAIVAGNIVNTFRIDRHMGVITAAKELDYEISHGRYTLIVTATDQCPILSHRLTSTTTVLVNVNDINDNVPTFPRDYEGPFEVTEGQPGPRVWTFLAHDRDSGPNGQVEYSIMDGDPLGEFVISPVEGVLRVRKDVELDRETIAFYNLTICARDRGMPPLSSTMLVGIRVLDINDNDPVLLNLPMNITISENSPVSSFVAHVLASDADSGCNARLTFNITAGNRERAFFINATTGIVTVNRPLDRERIPEYKLTISVKDNPENPRIARRDYDLLLIFLSDENDNHPLFTKSTYQAEVMENSPAGTPLTVLNGPILALDADQDIYAVVTYQLLGAQSGLFDINSSTGVVTVRSGVIIDREAFSPPILELLLLAEDIGLLNSTAHLLITILDDNDNRPTFSPATLTVHLLENCPPGFSVLQVTATDEDSGLNGELVYRIEAGAQDRFLIHLVTGVIRVGNATIDREEQESYRLTVVATDRGTVPLSGTAIVTILIDDINDSRPEFLNPIQTVSVLESAEPGTVIANITAIDHDLNPKLEYHIVGIVAKDDTDRLVPNQEDAFAVNINTGSVMVKSPMNRELVATYEVTLSVIDNASDLPERSVSVPNAKLTVNVLDVNDNTPQFKPFGITYYMERILEGATPGTTLIAVAAVDPDKGLNGLVTYTLLDLVPPGYVQLEDSSAGKVIANRTVDYEEVHWLNFTVRASDNGSPPRAAEIPVYLEIVDINDNNPIFDQPSYQEAVFEDVPVGTIILTVTATDADSGNFALIEYSLGDGESKFAINPTTGDIYVLSSLDREKKDHYILTALAKDNPGDVASNRRENSVQVVIQVLDVNDCRPQFSKPQFSTSVYENEPAGTSVITMMATDQDEGPNGELTYSLEGPGVEAFHVDMDSGLVTTQRPLQSYEKFSLTVVATDGGEPPLWGTTMLLVEVIDVNDNRPVFVRPPNGTILHIREEIPLRSNVYEVYATDKDEGLNGAVRYSFLKTAGNRDWEFFIIDPISGLIQTAQRLDRESQAVYSLILVASDLGQPVPYETMQPLQVALEDIDDNEPLFVRPPKGSPQYQLLTVPEHSPRGTLVGNVTGAVDADEGPNAIVYYFIAAGNEEKNFHLQPDGCLLVLRDLDREREAIFSFIVKASSNRSWTPPRGPSPTLDLVADLTLQEVRVVLEDINDQPPRFTKAEYTAGVATDAKVGSELIQVLALDADIGNNSLVFYSILAIHYFRALANDSEDVGQVFTMGSMDGILRTFDLFMAYSPGYFVVDIVARDLAGHNDTAIIGIYILRDDQRVKIVINEIPDRVRGFEEEFIHLLSNITGAIVNTDNVQFHVDKKGRVNFAQTELLIHVVNRDTNRILDVDRVIQMIDENKEQLRNLFRNYNVLDVQPAISVRLPDDMSALQMAIIVLAILLFLAAMLFVLMNWYYRTVHKRKLKAIVAGSAGNRGFIDIMDMPNTNKYSFDGANPVWLDPFCRNLELAAQAEHEDDLPENLSEIADLWNSPTRTHGTFGREPAAVKPDDDRYLRAAIQEYDNIAKLGQIIREGPIKGSLLKVVLEDYLRLKKLFAQRMVQKASSCHSSISELIQTELDEEPGDHSPGQGSLRFRHKPPVELKGPDGIHVVHGSTGTLLATDLNSLPEEDQKGLGRSLETLTAAEATAFERNARTESAKSTPLHKLRDVIMETPLEITEL

SEQ ID NO: 2511 - protein, 1061 aa, Homo sapiens
MGRHVATSCHVAWLLVLISGCWGQVNRLPFFTNHFFDTYLLISEDTPVGSSVTQLLAQDMDNDPLVFGVSGEEASRFFAVEPDTGVVWLRQPLDRETKSEFTVEFSVSDHQGVITRKVNIQVGDVNDNAPTFHNQPYSVRIPENTPVGTPIFIVNATDPDLGAGGSVLYSFQPPSQFFAIDSARGIVTVIRELDYETTQAYQLTVNATDQDKTRPLSTLANLAIIITDVQDMDPIFINLPYSTNIYEHSPPGTTVRIITAIDQDKGRPRGIGYTIVSGNTNSIFALDYISGVLTLNGLLDRENPLYSHGFILTVKGTELNDDRTPSDATVTTTFNILVIDINDNAPEFNSSEYSVAITELAQVGFALPLFIQVVDKDENLGLNSMFEVYLVGNNSHHFIISPTSVQGKADIRIRVAIPLDYETVDRYDFDLFANESVPDHVGYAKVKITLINENDNRPIFSQPLYNISLYENVTVGTSVLTVLATDNDAGTFGEVSYFFSDDPDRFSLDKDTGLIMLIARLDYELIQRFTLTIIARDGGGEETTGRVRINVLDVNDNVPTFQKDAYVGALRENEPSVTQLVRLRATDEDSPPNNQITYSIVSASAFGSYFDISLYEGYGVISVSRPLDYEQISNGLIYLTVMAMDAGNPPLNSTVPVTIEVFDENDNPPTFSKPAYFVSVVENIMAGATVLFLNATDLDRSREYGQESIIYSLEGSTQFRINARSGEITTTSLLDRETKSEYILIVRAVDGGVGHNQKTGIATVNITLLDINDNHPTWKDAPYYINLVEMTPPDSDVTTVVAVDPDLGENGTLVYSIQPPNKFYSLNSTTGKIRTTHAMLDRENPDPHEAELMRKIVVSVTDCGRPPLKATSSATVFVNLLDLNDNDPTFQNLPFVAEVLEGIPAGVSIYQVVAIDLDEGLNGLVSYRMPVGMPRMDFLINSSSGVVVTTTELDRERIAEYQLRVVASDAGTPTKSSTSTLTIHVLDVNDETPTFFPAVYNVSVSEDVPREFRVVWLNCTDNDVGLNAELSYFITGAAPASAHLCRPPGALPPPLPDGQPD

SEQ ID NO: 2512 - protein, 1380 aa, Homo sapiens
MGRHVATSCHVAWLLVLISGCWGQVNRLPFFTNHFFDTYLLISEDTPVGSSVTQLLAQDMDNDPLVFGVSGEEASRFFAVEPDTGVVWLRQPLDRETKSEFTVEFSVSDHQGVITRKVNIQVGDVNDNAPTFHNQPYSVRIPENTPVGTPIFIVNATDPDLGAGGSVLYSFQPPSQFFAIDSARGIVTVIRELDYETTQAYQLTVNATDQDKTRPLSTLANLAIIITDVQDMDPIFINLPYSTNIYEHSPPGTTVRIITAIDQDKGRPRGIGYTIVSGNTNSIFALDYISGVLTLNGLLDRENPLYSHGFILTVKGTELNDDRTPSDATVTTTFNILVIDINDNAPEFNSSEYSVAITELAQVGFALPLFIQVVDKDENLGLNSMFEVYLVGNNSHHFIISPTSVQGKADIRIRVAIPLDYETVDRYDFDLFANESVPDHVGYAKVKITLINENDNRPIFSQPLYNISLYENVTVGTSVLTVLATDNDAGTFGEVSYFFSDDPDRFSLDKDTGLIMLIARLDYELIQRFTLTIIARDGGGEETTGRVRINVLDVNDNVPTFQKDAYVGALRENEPSVTQLVRLRATDEDSPPNNQITYSIVSASAFGSYFDISLYEGYGVISVSRPLDYEQISNGLIYLTVMAMDAGNPPLNSTVPVTIEVFDENDNPPTFSKPAYFVSVVENIMAGATVLFLNATDLDRSREYGQESIIYSLEGSTQFRINARSGEITTTSLLDRETKSEYILIVRAVDGGVGHNQKTGIATVNITLLDINDNHPTWKDAPYYINLVEMTPPDSDVTTVVAVDPDLGENGTLVYSIQPPNKFYSLNSTTGKIRTTHAMLDRENPDPHEAELMRKIVVSVTDCGRPPLKATSSATVFVNLLDLNDNDPTFQNLPFVAEVLEGIPAGVSIYQVVAIDLDEGLNGLVSYRMPVGMPRMDFLINSSSGVVVTTTELDRERIAEYQLRVVASDAGTPTKSSTSTLTIHVLDVNDETPTFFPAVYNVSVSEDVPREFRVVWLNCTDNDVGLNAELSYFITGGNVDGKFSVGYRDAVVRTVVGLDRETTAAYMLILEAIDNGPVGKRHTGTATVFVTVLDVNDNRPIFLQSSYEASVPEDIPEGHSILQAATDADEGEFGRVWYRILHGNHGNNFRIHVSNGLLMRGPRPLDRERNSSHVLIVEAYNHDLGPMRSSVRVIVYVEDINDEAPVFTQQQYSRLGLRETAGIGTSVIVVQATDRDSGDGGLVNYRILSGAEGKFEIDESTGLIITVNYLDYETKTSYMMNVSATDQAPPFNQGFCSVYITLLNELDEAVQFSNASYEAAILENLALGTEIVRVQAYSIDNLNQITYRFNAYTSTQAKALFKIDAITVRGWGQGAPFLPI

SEQ ID NO: 2513 - protein, 1211 aa, Homo sapiens
MGRHVATSCHVAWLLVLISGCWGQVNRLPFFTNHFFDTYLLISEDTPVGSSVTQLLAQDMDNDPLVFGVSGEEASRFFAVEPDTGVVWLRQPLDRETKSEFTVEFSVSDHQGVITRKVNIQVGDVNDNAPTFHNQPYSVRIPENTPVGTPIFIVNATDPDLGAGGSVLYSFQPPSQFFAIDSARGIVTVIRELDYETTQAYQLTVNATDQDKTRPLSTLANLAIIITDVQDMDPIFINLPYSTNIYEHSPPGTTVRIITAIDQDKGRPRGIGYTIVSGNTNSIFALDYISGVLTLNGLLDRENPLYSHGFILTVKGTELNDDRTPSDATVTTTFNILVIDINDNAPEFNSSEYSVAITELAQVGFALPLFIQVVDKDENLGLNSMFEVYLVGNNSHHFIISPTSVQGKADIRIRVAIPLDYETVDRYDFDLFANESVPDHVGYAKVKITLINENDNRPIFSQPLYNISLYENVTVGTSVLTVLATDNDAGTFGEVSYFFSDDPDRFSLDKDTGLIMLIARLDYELIQRFTLTIIARDGGGEETTGRVRINVLDVNDNVPTFQKDAYVGALRENEPSVTQLVRLRATDEDSPPNNQITYSIVSASAFGSYFDISLYEGYGVISVSRPLDYEQISNGLIYLTVMAMDAGNPPLNSTVPVTIEVFDENDNPPTFSKPAYFVSVVENIMAGATVLFLNATDLDRSREYGQESIIYSLEGSTQFRINARSGEITTTSLLDRETKSEYILIVRAVDGGVGHNQKTGIATVNITLLDINDNHPTWKDAPYYINLVEMTPPDSDVTTVVAVDPDLGENGTLVYSIQPPNKFYSLNSTTGKIRTTHAMLDRENPDPHEAELMRKIVVSVTDCGRPPLKATSSATVFVNLLDLNDNDPTFQNLPFVAEVLEGIPAGVSIYQVVAIDLDEGLNGLVSYRMPVGMPRMDFLINSSSGVVVTTTELDRERIAEYQLRVVASDAGTPTKSSTSTLTIHVLDVNDETPTFFPAVYNVSVSEDVPREFRVVWLNCTDNDVGLNAELSYFITGGNVDGKFSVGYRDAVVRTVVGLDRETTAAYMLILEAIDNGPVGKRHTGTATVFVTVLDVNDNRPIFLQSSYEASVPEDIPEGHSILQEDLASPCISPAPPRRAFQSSGEKETSQFPGKELRREPGPSKAQNRAAFTEPLAEAPLLGSKQAQEERAPLPREQAQQLQGSEGEKGGP

SEQ ID NO: 2514 - protein, 530 aa, Homo sapiens
MGRHVATSCHVAWLLVLISGCWGQVNRLPFFTNHFFDTYLLISEDTPVGSSVTQLLAQDMDNDPLVFGVSGEEASRFFAVEPDTGVVWLRQPLDRETKSEFTVEFSVSDHQGVITRKVNIQVGDVNDNAPTFHNQPYSVRIPENTPVGTPIFIVNATDPDLGAGGSVLYSFQPPSQFFAIDSARGIVTVIRELDYETTQAYQLTVNATDQDKTRPLSTLANLAIIITDVQDMDPIFINLPYSTNIYEHSPPGTTVRIITAIDQDKGRPRGIGYTIVSGNTNSIFALDYISGVLTLNGLLDRENPLYSHGFILTVKGTELNDDRTPSDATVTTTFNILVIDINDNAPEFNSSEYSVAITELAQVGFALPLFIQVVDKDENLGLNSMFEVYLVGNNSHHFIISPTSVQGKADIRIRVAIPLDYETVDRYDFDLFANESVPDHVGYAKVKITLINENDNRPIFSQPLYNISLYENVTVGTSVLTVLVSPRFTAGPLSSPGPTVVRHPEGFCPRDLSNQGRRHPQIPELCLLVY

SEQ ID NO: 2515 - protein, 3354 aa, Homo sapiens
MGRHVATSCHVAWLLVLISGCWGQVNRLPFFTNHFFDTYLLISEDTPVGSSVTQLLAQDMDNDPLVFGVSGEEASRFFAVEPDTGVVWLRQPLDRETKSEFTVEFSVSDHQGVITRKVNIQVGDVNDNAPTFHNQPYSVRIPENTPVGTPIFIVNATDPDLGAGGSVLYSFQPPSQFFAIDSARGIVTVIRELDYETTQAYQLTVNATDQDKTRPLSTLANLAIIITDVQDMDPIFINLPYSTNIYEHSPPGTTVRIITAIDQDKGRPRGIGYTIVSGNTNSIFALDYISGVLTLNGLLDRENPLYSHGFILTVKGTELNDDRTPSDATVTTTFNILVIDINDNAPEFNSSEYSVAITELAQVGFALPLFIQVVDKDETQGLNSMFEVYLVGNNSHHFIISPTSVQGKADIRIRVAIPLDYETVDRYDFDLFANESVPDHVGYAKVKITLINENDNRPIFSQPLYNISLYENVTVGTSVLTVLATDNDAGTFGEVSYFFSDDPDRFSLDKDTGLIMLIARLDYELIQRFTLTIIARDGGGEETTGRVRINVLDVNDNVPTFQKDAYVGALRENEPSVTQLVRLRATDEDSPPNNQITYSIVSASAFGSYFDISLYEGYGVISVSRPLDYEQISNGLIYLTVMAMDAGNPPLNSTVPVTIEVFDENDNPPTFSKPAYFVSVVENIMAGATVLFLNATDLDRSREYGQESIIYSLEGSTQFRINARSGEITTTSLLDRETKSEYILIVRAVDGGVGHNQKTGIATVNITLLDINDNHPTWKDAPYYINLVEMTPPDSDVTTVVAVDPDLGENGTLVYSIQPPNKFYSLNSTTGKIRTTHAMLDRENPDPHEAELMRKIVVSVTDCGRPPLKATSSATVFVNLLDLNDNDPTFQNLPFVAEVLEGIPAGVSIYQVVAIDLDEGLNGLVSYRMPVGMPRMDFLINSSSGVVVTTTELDRERIAEYQLRVVASDAGTPTKSSTSTLTIHVLDVNDETPTFFPAVYNVSVSEDVPREFRVVWLNCTDNDVGLNAELSYFITGGNVDGKFSVGYRDAVVRTVVGLDRETTAAYMLILEAIDNGPVGKRHTGTATVFVTVLDVNDNRPIFLQSSYEASVPEDIPEGHSILQLKATDADEGEFGRVWYRILHGNHGNNFRIHVSNGLLMRGPRPLDRERNSSHVLIVEAYNHDLGPMRSSVRVIVYVEDINDEAPVFTQQQYSRLGLRETAGIGTSVIVVQATDRDSGDGGLVNYRILSGAEGKFEIDESTGLIITVNYLDYETKTSYMMNVSATDQAPPFNQGFCSVYITLLNELDEAVQFSNASYEAAILENLALGTEIVRVQAYSIDNLNQITYRFNAYTSTQAKALFKIDAITGVITVQGLVDREKGDFYTLTVVADDGGPKVDSTVQVYITVLDENDNSPRFDFTSDSAVSIPEDCPVGQRVATVKAWDPDAGSNGQVVFSLASGNIAGAFEIVTTNDSIGEVFVARPLDREELDHYILQVVASDRGTPPRKKDHILQVTILDINDNPPVIESPFGYNVSVNENVGGGTAVVQVRATDRDIGINSVLSYYITEGNKDMAFRMDRISGEIATRPAPPDRERQSFYHLVATVEDEGTPTLSATTHVYVTIVDENDNAPMFQQPHYEVLLDEGPDTLNTSLITIQALDLDEGPNGTVTYAIVAGNIVNTFRIDRHMGVITAAKELDYEISHGRYTLIVTATDQCPILSHRLTSTTTVLVNVNDINDNVPTFPRDYEGPFEVTEGQPGPRVWTFLAHDRDSGPNGQVEYSIMDGDPLGEFVISPVEGVLRVRKDVELDRETIAFYNLTICARDRGMPPLSSTMLVGIRVLDINDNDPVLLNLPMNITISENSPVSSFVAHVLASDADSGCNARLTFNITAGNRERAFFINATTGIVTVNRPLDRERIPEYKLTISVKDNPENPRIARRDYDLLLIFLSDENDNHPLFTKSTYQAEVMENSPAGTPLTVLNGPILALDADQDIYAVVTYQLLGAQSGLFDINSSTGVVTVRSGVIIDREAFSPPILELLLLAEDIGLLNSTAHLLITILDDNDNRPTFSPATLTVHLLENCPPGFSVLQVTATDEDSGLNGELVYRIEAGAQDRFLIHLVTGVIRVGNATIDREEQESYRLTVVATDRGTVPLSGTAIVTILIDDINDSRPEFLNPIQTVSVLESAEPGTVIANITAIDHDLNPKLEYHIVGIVAKDDTDRLVPNQEDAFAVNINTGSVMVKSPMNRELVATYEVTLSVIDNASDLPERSVSVPNAKLTVNVLDVNDNTPQFKPFGITYYMERILEGATPGTTLIAVAAVDPDKGLNGLVTYTLLDLVPPGYVQLEDSSAGKVIANRTVDYEEVHWLNFTVRASDNGSPPRAAEIPVYLEIVDINDNNPIFDQPSYQEAVFEDVPVGTIILTVTATDADSGNFALIEYSLGDGESKFAINPTTGDIYVLSSLDREKKDHYILTALAKDNPGDVASNRRENSVQVVIQVLDVNDCRPQFSKPQFSTSVYENEPAGTSVITMMATDQDEGPNGELTYSLEGPGVEAFHVDMDSGLVTTQRPLQSYEKFSLTVVATDGGEPPLWGTTMLLVEVIDVNDNRPVFVRPPNGTILHIREEIPLRSNVYEVYATDKDEGLNGAVRYSFLKTAGNRDWEFFIIDPISGLIQTAQRLDRESQAVYSLILVASDLGQPVPYETMQPLQVALEDIDDNEPLFVRPPKGSPQYQLLTVPEHSPRGTLVGNVTGAVDADEGPNAIVYYFIAAGNEEKNFHLQPDGCLLVLRDLDREREAIFSFIVKASSNRSWTPPRGPSPTLDLVADLTLQEVRVVLEDINDQPPRFTKAEYTAGVATDAKVGSELIQVLALDADIGNNSLVFYSILAIHYFRALANDSEDVGQVFTMGSMDGILRTFDLFMAYSPGYFVVDIVARDLAGHNDTAIIGIYILRDDQRVKIVINEIPDRVRGFEEEFIHLLSNITGAIVNTDNVQFHVDKKGRVNFAQTELLIHVVNRDTNRILDVDRVIQMIDENKEQLRNLFRNYNVLDVQPAISVRLPDDMSALQMAIIVLAILLFLAAMLFVLMNWYYRTVHKRKLKAIVAGSAGNRGFIDIMDMPNTNKYSFDGANPVWLDPFCRNLELAAQAEHEDDLPENLSEIADLWNSPTRTHGTFGREPAAVKPDDDRYLRAAIQEYDNIAKLGQIIREGPIKGSLLKVVLEDYLRLKKLFAQRMVQKASSCHSSISELIQTELDEEPGDHSPGQGSLRFRHKPPVELKGPDGIHVVHGSTGTLLATDLNSLPEEDQKGLGRSLETLTAAEATAFERNARTESAKSTPLHKLRDVIMETPLEITEL

SEQ ID NO: 2516 - protein, 1381 aa, Homo sapiens
MGRHVATSCHVAWLLVLISGCWGQVNRLPFFTNHFFDTYLLISEDTPVGSSVTQLLAQDMDNDPLVFGVSGEEASRFFAVEPDTGVVWLRQPLDRETKSEFTVEFSVSDHQGVITRKVNIQVGDVNDNAPTFHNQPYSVRIPENTPVGTPIFIVNATDPDLGAGGSVLYSFQPPSQFFAIDSARGIVTVIRELDYETTQAYQLTVNATDQDKTRPLSTLANLAIIITDVQDMDPIFINLPYSTNIYEHSPPGTTVRIITAIDQDKGRPRGIGYTIVSGNTNSIFALDYISGVLTLNGLLDRENPLYSHGFILTVKGTELNDDRTPSDATVTTTFNILVIDINDNAPEFNSSEYSVAITELAQVGFALPLFIQVVDKDENLGLNSMFEVYLVGNNSHHFIISPTSVQGKADIRIRVAIPLDYETVDRYDFDLFANESVPDHVGYAKVKITLINENDNRPIFSQPLYNISLYENVTVGTSVLTVLATDNDAGTFGEVSYFFSDDPDRFSLDKDTGLIMLIARLDYELIQRFTLTIIARDGGGEETTGRVRINVLDVNDNVPTFQKDAYVGALRENEPSVTQLVRLRATDEDSPPNNQITYSIVSASAFGSYFDISLYEGYGVISVSRPLDYEQISNGLIYLTVMAMDAGNPPLNSTVPVTIEVFDENDNPPTFSKPAYFVSVVENIMAGATVLFLNATDLDRSREYGQESIIYSLEGSTQFRINARSGEITTTSLLDRETKSEYILIVRAVDGGVGHNQKTGIATVNITLLDINDNHPTWKDAPYYINLVEMTPPDSDVTTVVAVDPDLGENGTLVYSIQPPNKFYSLNSTTGKIRTTHAMLDRENPDPHEAELMRKIVVSVTDCGRPPLKATSSATVFVNLLDLNDNDPTFQNLPFVAEVLEGIPAGVSIYQVVAIDLDEGLNGLVSYRMPVGMPRMDFLINSSSGVVVTTTELDRERIAEYQLRVVASDAGTPTKSSTSTLTIHVLDVNDETPTFFPAVYNVSVSEDVPREFRVVWLNCTDNDVGLNAELSYFITGGNVDGKFSVGYRDAVVRTVVGLDRETTAAYMLILEAIDNGPVGKRHTGTATVFVTVLDVNDNRPIFLQSSYEASVPEDIPEGHSILQLKATDADEGEFGRVWYRILHGNHGNNFRIHVSNGLLMRGPRPLDRERNSSHVLIVEAYNHDLGPMRSSVRVIVYVEDINDEAPVFTQQQYSRLGLRETAGIGTSVIVVQATDRDSGDGGLVNYRILSGAEGKFEIDESTGLIITVNYLDYETKTSYMMNVSATDQAPPFNQGFCSVYITLLNELDEAVQFSNASYEAAILENLALGTEIVRVQAYSIDNLNQITYRFNAYTSTQAKALFKIDAITVRGWGQGAPFLPI

SEQ ID NO: 2517 - protein, 115 aa, Homo sapiens
MSLRAGGKTRRWPGPEQAARGGRSGGEQSPRRGEARRRCTHAHGSSVTQLLAQDMDNDPLVFGVSGEEASRFFAVEPDTGVVWLRQPLDRETKSEFTVEFSVSDHQGVITRKVNI

SEQ ID NO: 2518 - protein, 1114 aa, Homo sapiens
MVKSPMNRELVATYEVTLSVIDNASDLPERSVSVPNAKLTVNVLDVNDNTPQFKPFGITYYMERILEGATPGTTLIAVAAVDPDKGLNGLVTYTLLDLVPPGYVQLEDSSAGKVIANRTVDYEEVHWLNFTVRASDNGSPPRAAEIPVYLEIVDINDNNPIFDQPSYQEAVFEDVPVGTIILTVTATDADSGNFALIEYSLGDGESKFAINPTTGDIYVLSSLDREKKDHYILTALAKDNPGDVASNRRENSVQVVIQVLDVNDCRPQFSKPQFSTSVYENEPAGTSVITMMATDQDEGPNGELTYSLEGPGVEAFHVDMDSGLVTTQRPLQSYEKFSLTVVATDGGEPPLWGTTMLLVEVIDVNDNRPVFVRPPNGTILHIREEIPLRSNVYEVYATDKDEGLNGAVRYSFLKTAGNRDWEFFIIDPISGLIQTAQRLDRESQAVYSLILVASDLGQPVPYETMQPLQVALEDIDDNEPLFVRPPKGSPQYQLLTVPEHSPRGTLVGNVTGAVDADEGPNAIVYYFIAAGNEEKNFHLQPDGCLLVLRDLDREREAIFSFIVKASSNRSWTPPRGPSPTLDLVADLTLQEVRVVLEDINDQPPRFTKAEYTAGVATDAKVGSELIQVLALDADIGNNSLVFYSILAIHYFRALANDSEDVGQVFTMGSMDGILRTFDLFMAYSPGYFVVDIVARDLAGHNDTAIIGIYILRDDQRVKIVINEIPDRVRGFEEEFIHLLSNITGAIVNTDNVQFHVDKKGRVNFAQTELLIHVVNRDTNRILDVDRVIQMIDENKEQLRNLFRNYNVLDVQPAISVRLPDDMSALQMAIIVLAILLFLAAMLFVLMNWYYRTVHKRKLKAIVAGSAGNRGFIDIMDMPNTNKYSFDGANPVWLDPFCRNLELAAQAEHEDDLPENLSEIADLWNSPTRTHGTFGREPAAVKPDDDRYLRAAIQEYDNIAKLGQIIREGPIKGSLLKVVLEDYLRLKKLFAQRMVQKASSCHSSISELIQTELDEEPGDHSPGQGSLRFRHKPPVELKGPDGIHVVHGSTGTLLATDLNSLPEEDQKGLGRSLETLTAAEATAFERNARTESAKSTPLHKLRDVIMETPLEITEL

SEQ ID NO: 2519 - protein, 1079 aa, Homo sapiens
MVKSPMNRELVATYEVTLSVIDNASDLPERSVSVPNAKLTVNVLDVNDNTPQFKPFGITYYMERILEGATPGTTLIAVAAVDPDKGLNGLVTYTLLDLVPPGYVQLEDSSAGKVIANRTVDYEEVHWLNFTVRASDNGSPPRAAEIPVYLEIVDINDNNPIFDQPSYQEAVFEDVPVGTIILTVTATDADSGNFALIEYSLGDGESKFAINPTTGDIYVLSSLDREKKDHYILTALAKDNPGDVASNRRENSVQVVIQVLDVNDCRPQFSKPQFSTSVYENEPAGTSVITMMATDQDEGPNGELTYSLEGPGVEAFHVDMDSGLVTTQRPLQSYEKFSLTVVATDGGEPPLWGTTMLLVEVIDVNDNRPVFVRPPNGTILHIREEIPLRSNVYEVYATDKDEGLNGAVRYSFLKTAGNRDWEFFIIDPISGLIQTAQRLDRESQAVYSLILVASDLGQPVPYETMQPLQVALEDIDDNEPLFVRPPKGSPQYQLLTVPEHSPRGTLVGNVTGAVDADEGPNAIVYYFIAAGNEEKNFHLQPDGCLLVLRDLDREREAIFSFIVKASSNRSWTPPRGPSPTLDLVADLTLQEVRVVLEDINDQPPRFTKAEYTAGVATDAKVGSELIQVLALDADIGNNSLVFYSILAIHYFRALANDSEDVGQVFTMGSMDGILRTFDLFMAYSPGYFVVDIVARDLAGHNDTAIIGIYILRDDQRVKIVINEIPDRVRGFEEEFIHLLSNITGAIVNTDNVQFHVDKKGRVNFAQTELLIHVVNRDTNRILDVDRVIQMIDENKEQLRNLFRNYNVLDVQPAISVRLPDDMSALQMAIIVLAILLFLAAMLFVLMNWYYRTVHKRKLKAIVAGSAGNRGFIDIMDMPNTNKYSFDGANPVWLDPFCRNLELAAQAEHEDDLPENLSEIADLWNSPTRTHGTFGREPAAVKPDDDRYLRAAIQEYDNIAKLGQIIREGPIKLIQTELDEEPGDHSPGQGSLRFRHKPPVELKGPDGIHVVHGSTGTLLATDLNSLPEEDQKGLGRSLETLTAAEATAFERNARTESAKSTPLHKLRDVIMETPLEITEL

SEQ ID NO: 2520 - protein, 6 aa, Homo sapiens
PCCTLN

SEQ ID NO: 2521 - protein, 29 aa, Homo sapiens
TGKGHGADTCTSWKAQRNDRRINMAVTKH

SEQ ID NO: 2522 - protein, 396 aa, Homo sapiens
VITRKVNIQVGDVNDNAPTFHNQPYSVRIPENTPVGTPIFIVNATDPDLGAGGSVLYSFQPPSQFFAIDSARGIVTVIRELDYETTQAYQLTVNATDQDKTRPLSTLANLAIIITDVQDMDPIFINLPYSTNIYEHSPPGTTVRIITAIDQDKGRPRGIGYTIVSGNTNSIFALDYISGVLTLNGLLDRENPLYSHGFILTVKGTELNDDRTPSDATVTTTFNILVIDINDNAPEFNSSEYSVAITELAQVGFALPLFIQVVDKDENLGLNSMFEVYLVGNNSHHFIISPTSVQGKADIRIRVAIPLDYETVDRYDFDLFANESVPDHVGYAKVKITLINENDNRPIFSQPLYNISLYENVTVGTSVLTVLWEKFFCSNSSRFSSAQLVVSSWNQL

SEQ ID NO: 2523 - protein, 1035 aa, Homo sapiens
  SITE 1: note = misc_feature - Xaa can be any naturally occurring amino acid
XDKTRPLSTLANLAIIITDVQDMDPIFINLPYSTNIYEHSPPGTTVRIITAIDQDKGRPRGIGYTIVSGNTNSIFALDYISGVLTLNGLLDRENPLYSHGFILTVKGTELNDDRTPSDATVTTTFNILVIDINDNAPEFNSSEYSVAITELAQVGFALPLFIQVVDKDEENGGWLQGRPEGVGEGLHVQNLGLNSMFEVYLVGNNSHHFIISPTSVQGKADIRIRVAIPLDYETVDRYDFDLFANESVPDHVGYAKVKITLINENDNRPIFSQPLYNISLYENVTVGTSVLTVLATDNDAGTFGEVSYFFSDDPDRFSLDKDTGLIMLIARLDYELIQRFTLTIIARDGGGEETTGRVRINVLDVNDNVPTFQKDAYVGALRENEPSVTQLVRLRATDEDSPPNNQITYSIVSASAFGSYFDISLYEGYGVISVSRPLDYEQISNGLIYLTVMAMDAGNPPLNSTVPVTIEVFDENDNPPTFSKPAYFVSVVENIMAGATVLFLNATDLDRSREYGQESIIYSLEGSTQFRINARSGEITTTSLLDRETKSEYILIVRAVDGGVGHNQKTGIATVNITLLDINDNHPTWKDAPYYINLVEMTPPDSDVTTVVAVDPDLGENGTLVYSIQPPNKFYSLNSTTGKIRTTHAMLDRENPDPHEAELMRKIVVSVTDCGRPPLKATSSATVFVNLLDLNDNDPTFQNLPFVAEVLEGIPAGVSIYQVVAIDLDEGLNGLVSYRMPVGMPRMDFLINSSSGVVVTTTELDRERIAEYQLRVVASDAGTPTKSSTSTLTIHVLDVNDETPTFFPAVYNVSVSEDVPREFRVVWLNCTDNDVGLNAELSYFITGGNVDGKFSVGYRDAVVRTVVGLDRETTAAYMLILEAIDNGPVGKRHTGTATVFVTVLDVNDNRPIFLQSSYEASVPEDIPEGHSILQHPPWPLKGASSIIFNPFLIDPNVGALKRGHQDGCQDHAWRALFAPPPSWHPGICSTRREAAAPTGHQADAGSTRETQGREPRGFAPALGQHRCQDSVLAPV

SEQ ID NO: 2524 - protein, 165 aa, Homo sapiens
  SITE 1: note = misc_feature - Xaa can be any naturally occurring amino acid
XDNAPEFNSSEYSVAITELAQVGFALPLFIQVVDKDEGLNSMFEVYLVGNNSHHFIISPTSVQGKADIRIRVAIPLDYETVDRYDFDLFANESVPDHVGYAKVKITLINENDNRPIFSQPLYNISLYENVTVGTSVLTVLWEKFFCSNSSRFSSAQLVVSSWNQL

SEQ ID NO: 2525 - protein, 223 aa, Homo sapiens
MPSRTGTSTLTVAVCKCNEQGEFTFCEDMAAQVGVSIQAVVAILLCILTITVITLLIFLRRRLRKQARAHGKSVPEIHEQLVTYDEEGGGEMDTTSYDVSVLNSVRRGGAKPPRPALDARPSLYAQVQKPPRHAPGAHGGPGEMAAMIEVKKDEADHDGDGPPYDTLHIYGYEGSESIAESLSSLGTDSSDSDVDYDFLNDWGPRFKMLAELYGSDPREELLY

SEQ ID NO: 2526 - protein, 17 aa, Homo sapiens
MQRLMMLLATSGACLGL

SEQ ID NO: 2527 - protein, 76 aa, Homo sapiens
MQRLMMLLATSGACLGLLAVAAVAAAGANPAQRDTHSLLPTHRRQKRDWIWNQMHIDEEKNTSLPHHVGKIKSSVS

SEQ ID NO: 2528 - protein, 131 aa, Homo sapiens
MQRLMMLLATSGACLGLLAVAAVAAAGANPAQRDTHSLLPTHRRQKRDWIWNQMHIDEEKNTSLPHHVGKIKSSVSRKNAKYLLKGEYVGKVFRVDAETGDVFAIERLDRENISEYHLTAVIVDKDTGENL

SEQ ID NO: 2529 - protein, 784 aa, Homo sapiens
MQRLMMLLATSGACLGLLAVAAVAAAGANPAQRDTHSLLPTHRRQKRDWIWNQMHIDEEKNTSLPHHVGKIKSSVSRKNAKYLLKGEYVGKVFRVDAETGDVFAIERLDRENISEYHLTAVIVDKDTGENLETPSSFTIKVHDVNDNWPVFTHRLFNASVPESSAVGTSVISVTAVDADDPTVGDHASVMYQILKGKEYFAIDNSGRIITITKSLDREKQARYEIVVEARDAQGLRGDSGTATVLVTLQDINDNFPFFTQTKYTFVVPEDTRVGTSVGSLFVEDPDEPQNRMTKYSILRGDYQDAFTIETNPAHNEGIIKPMKPLDYEYIQQYSFIVEATDPTIDLRYMSPPAGNRAQVIINITDVDEPPIFQQPFYHFQLKENQKKPLIGTVLAMDPDAARHSIGYSIRRTSDKGQFFRVTKKGDIYNEKELDREVYPWYNLTVEAKELDSTGTPTGKESIVQVHIEVLDENDNAPEFAKPYQPKVCENAVHGQLVLQISAIDKDITPRNVKFKFILNTENNFTLTDNHDNTANITVKYGQFDREHTKVHFLPVVISDNGMPSRTGTSTLTVAVCKCNEQGEFTFCEDMAAQVGVSIQAVVAILLCILTITVITLLIFLRRRLRKQARAHGKSVPEIHEQLVTYDEEGGGEMDTTSYDVSVLNSVRRGGAKPPRPALDARPSLYAQVQKPPRHAPGAHGGPGEMAAMIEVKKDEADHDGDGPPYDTLHIYGYEGSESIAESLSSLGTDSSDSDVDYDFLNDWGPRFKMLAELYGSDPREELLY

SEQ ID NO: 2530 - protein, 406 aa, Homo sapiens
MQRLMMLLATSGACLGLLAVAAVAAAGANPAQRDTHSLLPTHRRQKRDWIWNQMHIDEEKNTSLPHHVGKIKSSVSRKNAKYLLKGEYVGKVFRVDAETGDVFAIERLDRENISEYHLTAVIVDKDTGENLETPSSFTIKVHDVNDNWPVFTHRLFNASVPESSAVGTSVISVTAVDADDPTVGDHASVMYQILKGKEYFAIDNSGRIITITKSLDREKQARYEIVVEARDAQGLRGDSGTATVLVTLQDINDNFPFFTQTKYTFVVPEDTRVGTSVGSLFVEDPDEPQNRMTKYSILRGDYQDAFTIETNPAHNEGIIKPMKPLDYEYIQQYSFIVEATDPTIDLRYMSPPAGNRAQVIINITDVDEPPIFQQPFYHFQLKENQKKPLIGTVLAMDPDAARHSIG

SEQ ID NO: 2531 - protein, 669 aa, Homo sapiens
MQRLMMLLATSGACLGLLAVAAVAAAGANPAQRDTHSLLPTHRRQKRDWIWNQMHIDEEKNTSLPHHVGKIKSSVSRKNAKYLLKGEYVGKVFRVDAETGDVFAIERLDRENISEYHLTAVIVDKDTGENLETPSSFTIKVHDVNDNWPVFTHRLFNASVPESSAVGTSVISVTAVDADDPTVGDHASVMYQILKGKEYFAIDNSGRIITITKSLDREKQARYEIVVEARDAQGLRGDSGTATVLVTLQDINDNFPFFTQTKYTFVVPEDTRVGTSVGSLFVEDPDEPQNRMTKYSILRGDYQDAFTIETNPAHNEGIIKPMKPLDYEYIQQYSFIVEATDPTIDLRYMSPPAGNRAQVIINITDVDEPPIFQQPFYHFQLVLQISAIDKDITPRNVKFKFILNTENNFTLTDNHDNTANITVKYGQFDREHTKVHFLPVVISDNGMPSRTGTSTLTVAVCKCNEQGEFTFCEDMAAQVGVSIQAVVAILLCILTITVITLLIFLRRRLRKQARAHGKSVPEIHEQLVTYDEEGGGEMDTTSYDVSVLNSVRRGGAKPPRPALDARPSLYAQVQKPPRHAPGAHGGPGEMAAMIEVKKDEADHDGDGPPYDTLHIYGYEGSESIAESLSSLGTDSSDSDVDYDFLNDWGPRFKMLAELYGSDPREELLY

SEQ ID NO: 2532 - protein, 110 aa, Homo sapiens
MQRLMMLLATSGACLGLLAVAAVAAAGANPAQRDTHSLLPTHRRQKRDWIWNQMHIDEEKNTSLPHHVGKIKSSVSRKNAKYLLKGEYVGKVFRVDAETGDVTQMSPRTG

SEQ ID NO: 2533 - protein, 745 aa, Homo sapiens
MRRCRWAALALGLLRLCLAQANFAPHFFDNGVGSTNGNMALFSLPEDTPVGSHVYTLNGTDPEGDPISYHISFDPSTRSVFSVDPTFGNITLVEELDREREDEIEAIISISDGLNLVAEKVVILVTDANDEAPRFIQEPYVALVPEDIPAGSIIFKVHAVDRDTGSGGSVTYFLQNLHSPFAVDRHSGVLRLQAGATLDYERSRTHYITVVAKDGGGRLHGADVVFSATTTVTVNVEDVQDMAPVFVGTPYYGYVYEDTLPGSEVLKVVAMDGDRGKPNRILYSLVNGNDGAFEINETSGAISITQSPAQLQREVYELHVQVTEMSPAGSPAAQATVPVTIRIVDLNNHPPTFYGESGPQNRFELSMNEHPPQGEILRGLKITVNDSDQGANAKFNLQLVGPRGIFRVVPQTVLNEAQVTIIVENSAAIDFEKSKVLTFKLLAVEVNTPEKFSSTADVVIQLLDTNDNVPKFDSLYYVARIPENAPGGSSVVAVTAVDPDTGPWGEVKYSTYGTGADLFLIHPSTGLIYTQPWASLDAEATARYNFYVKAEDMEGKYSVAEVFITLLDVNDHPPQFGKSVQKKTMVLGTPVKIEAIDEDAEEPNNLVDYSITHAEPANVFDINSHTGEIWLKNSIRSLDALHNITPGRDCLWSLEVQAKDRGSPSFSTTALLKIDITDAEVRRLRYMKNSNFPGTTKSVRKPKFKPKKPHSSQGLFLHPHCEIALFNLSNVNLYSRVFQGAAQAS

SEQ ID NO: 2534 - protein, 859 aa, Homo sapiens
MRRCRWAALALGLLRLCLAQANFAPHFFDNGVGSTNGNMALFSLPEDTPVGSHVYTLNGTDPEGDPISYHISFDPSTRSVFSVDPTFGNITLVEELDREREDEIEAIISISDGLNLVAEKVVILVTDANDEAPRFIQEPYVALVPEDIPAGSIIFKVHAVDRDTGSGGSVTYFLQNLHSPFAVDRHSGVLRLQAGATLDYERSRTHYITVVAKDGGGRLHGADVVFSATTTVTVNVEDVQDMAPVFVGTPYYGYVYEDTLPGSEVLKVVAMDGDRGKPNRILYSLVNGNDGAFEINETSGAISITQSPAQLQREVYELHVQVTEMSPAGSPAAQATVPVTIRIVDLNNHPPTFYGESGPQNRFELSMNEHPPQGEILRGLKITVNDSDQGANAKFNLQLVGPRGIFRVVPQTVLNEAQVTIIVENSAAIDFEKSKVLTFKLLAVEVNTPEKFSSTADVVIQLLDTNDNVPKFDSLYYVARIPENAPGGSSVVAVTAVDPDTGPWGEVKYSTYGTGADLFLIHPSTGLIYTQPWASLDAEATARYNFYVKAEDMEGKYSVAEVFITLLDVNDHPPQFGKSVQKKTMVLGTPVKIEAIDEDAEEPNNLVDYSITHAEPANVFDINSHTGEIWLKNSIRSLDALHNITPGRDCLWSLEVQAKDRGSPSFSTTALLKIDITDAETLSRSPMAAFLIQTKDNPMKAVGVLAGTMATVVAITVLISTATFWRNKKSNKVLPMRRVLRKRPSPAPRTIRIEWLKSKSTKAATKFMLKEKPPNENCNNNSPESSLLPRAPALPPPPSVAPSTGAAQWTVPTVSGSLTPQPTQPPPKPKTMGSPVQSTLISELKQKFEKKSVHNKAYF

SEQ ID NO: 2535 - protein, 135 aa, Homo sapiens
  SITE 1: note = misc_feature - Xaa can be any naturally occurring amino acid
XENSAAIDFEKSKVLTFKLLAVEVNTPEKFSSTADVVIQLLDTNDNVPKFDSLYYVARIPENAPGGSSVVAVTAVDPDTGPWGEVKYSTYGTGADLFLIHPSTGLIYTQPWASLDAEATARYNFYVKAEDMEGKP

SEQ ID NO: 2536 - protein, 78 aa, Homo sapiens
  SITE 1: note = misc_feature - Xaa can be any naturally occurring amino acid
XITHAEPANVFDINSHTGEIWLKNSIRSLDALHNITPGRDCLWSLEVQAKDRGSPSFSTTALLKIDITDAEVRRLRSN

SEQ ID NO: 2537 - protein, 598 aa, Homo sapiens
  SITE 1: note = misc_feature - Xaa can be any naturally occurring amino acid
XITVVAKDGGGRLHGADVVFSATTTVTVNVEDVQDMAPVFVGTPYYGYVYEDTLPGSEVLKVVAMDGDRGKPNRILYSLVNGNDGAFEINETSGAISITQSPAQLQREVYELHVQVTEMSPAGSPAAQATVPVTIRIVDLNNHPPTFYGESGPQNRFELSMNEHPPQGEILRGLKITVNDSDQGANAKFNLQLVGPRGIFRVVPQTVLNEAQVTIIVENSAAIDFEKSKVLTFKAVDPDTGPWGEVKYSTYGTGADLFLIHPSTGLIYTQPWASLDAEATARYNFYVKAEDMEGKYSVAEVFITLLDVNDHPPQFGKSVQKKTMVLGTPVKIEAIDEDAEEPNNLVDYSITHAEPANVFDINSHTGEIWLKNSIRSLDALHNITPGRDCLWSLEVQAKDRGSPSFSTTALLKIDITDAETLSRSPMAAFLIQTKDNPMKAVGVLAGTMATVVAITVLISTATFWRNKKSNKVLPMRRVLRKRPSPAPRTIRIEWLKSKSTKAATKFMLKEKPPNENCNNNSPESSLLPRAPALPPPPSVAPSTGAAQWTVPTVSGSLTPQPTQPPPKPKTMGSPVQSTLISELKQKFEKKSVHNKAYF

SEQ ID NO: 2538 - protein, 48 aa, Homo sapiens
  SITE 1: note = misc_feature - Xaa can be any naturally occurring amino acid
XMDGDRGKPNRILYSLVNDFPRQCRTILWHDSPAPPCGPVQNFRVHLP

SEQ ID NO: 2539 - protein, 788 aa, Homo sapiens
MVLLRLLVFLFAPVVSDLCSLPCFINVSESQGPGTVLQFLSFNCSSYTPTPTLELLNVQPPTTFFNPPSLARWQGTYVGKLTLSSSAQLDALMVNHYKVQLKFTCGNHVMEGSLSVDVQRDLSHIQCAGQFASPAGEMIQVPETVTPGARLYTLLLPGLELHGAQMSIISAQDLPHFPGPFSINEQGWLQAPSQGLLGQAQKVFQLQISVSFGQRQSCQGMVIVKVLPVPSSQVSFLEQAQNITIPENLAPGSEVVQVQARGVDLRYEILSPVPSPLFSIGRADGVVRTTTPLELARTSGTAVSRLQVKAFEQGQLWASAKLNLTMNVQLVNLWPPRCLPALLVSQIPETAPVGTVLNTLTCEDPDSVGATLDYKLWFRSSSNPASLCLYDRVLEVNATLDCDTPGACFQHAASILVLDGGQPQMTTEVPVLVMVTPINEFSPACAPRTFRVQEDAAPHTLLGSVVGTDMDYPHDNIEYYTSGGPTTFAVDRLSGEVHLLGPLDYEQQRLYRLTVLVIDHGQDQNPNHHLSGSCTITIEVEDVNDHAPECEPPFQELTIYAPLGRSVEVTKMSCQIPQEPQRLIYSYSIVGGNSQNRFILQGAILVHSDLVLGPFWPEQPRTYELLICVADAGPSTPHLSTTATIIVHLVPRRASTVATSTHRTTVPSTMTPMLVTDTEAFWQPQPWFVVVLTATGALLLLALGWLLGRLLQGLAQLLQAPSKPAQALLLNSIQGTEGSIEGFLEAPKMEMSQAPSSVMSLHFDGRAQDSRTGRDYLFNTHTGARRWL

SEQ ID NO: 2540 - protein, 184 aa, Homo sapiens
MVLLRLLVFLFAPVVSDLCSLPCFINVSESQGPGTVLQFLSFNCSSYTPTPTLELLNVQPPTTFFNPPSLARWQGTYVGKLTLSSSAQLDALMVNHYKVQLKFTCGNHVMEGSLSVDVQRDLSHIQCAGQFASPAGEMIQVPETVTPGARLYTLLLPGLELHGAQVSPEHGTVGDRMGVGGWRE

SEQ ID NO: 2541 - protein, 199 aa, Homo sapiens
MVLLRLLVFLFAPVVSDLCSLPCFINVSESQGPGTVLQFLSFNCSSYTPTPTLELLNVQPPTTFFNPPSLARWQGTYVGKLTLSSSAQLDALMVNHYKVQLKFTCGNHVMEGSLSVDVQRDLSHIQCAGQFASPGEARGSRQGGGRHGLSRSSLTSTLASWGNDSGARDSHTWGSAVHSAPPRPRTPRSAGKPRTWDGG

SEQ ID NO: 2542 - protein, 134 aa, Homo sapiens
QELTIYAPLGRSVEVTKMSCQIPQEPQRLIYSYSIVGGNSQNRFILQGAILVHSDLVLGPFWPEQPRTYELLICVADAGPSTPHLSTTATIIVHLVPRRASTVATSTHRTTVGPAAASTQQTSPGFAAKQHPGN

SEQ ID NO: 2543 - protein, 151 aa, Homo sapiens
  SITE 1: note = misc_feature - Xaa can be any naturally occurring amino acid
XSTTATIIVHLVPRRASTVATSTHRTTVPSTMTPMLVTDTEAFWQPQPWFVVVLTATGALLLLALGWLLGRLLQGLAQLLQAPSKPAQALLLNSIQGTEGSIEGFLEAPKMEMSQAPSSVMSLQHFDGRAQDSRTGRDYLFNTHTGARRWL

SEQ ID NO: 2544 - protein, 190 aa, Homo sapiens
MGSWALLWPPLLFTGLLVRPPGTMAQAQYCSVNKDIFEVEENTNVTEPLVDIHVPEGQEVTLGALSTPFAFRIQGNQLFLNVTPDYEEKSLLEAQLLCQSGGTLDTKVNSTVIPETQLQAEDRDKDDILFYTLQEMTAGASDYFSLVSVNRPALRLDRPLDFYERPNMTFWLLVRPSVAGHSGGECGTQP

SEQ ID NO: 2545 - protein, 166 aa, Homo sapiens [sequence omitted]

SEQ ID NO: 2546 - protein, 651 aa, Homo sapiens
MGSWALLWPPLLFTGLLVRPPGTMAQAQYCSVNKDIFEVEENTNVTEPLVDIHVPEGQEVTLGALSTPFAFRIQGNQLFLNVTPDYEEKSLLEAQLLCQSGGTLVTQLRVFVSVLDVNDNAPEFPFKTKEIRVEEDTKVNSTVIPETQLQAEDRDKDDILFYTLQEMTAGASDYFSLVSVNRPALRLDRPLDFYERPNMTFWLLVRDTPGENVEPSHTATATLVLNVVPADLRPPWFLPCTFSDGYVCIQAQYHGAVPTGHILPSPLVLRPGPIYAEDGDRGINQPIIYSIFRGNVNGTFIIHPDSGNLTVARSVPSPMTFLLLVKGQQADLARYSVTQVTVEAVAAAGSPPRFPQRLYRGTVARGAGAGVVVKDAAAPSQPLRIQAQDPEFSDLNSAITYRITNHSHFRMEGEVVLTTTTLAQAGAFYAEVEAHNTVTSGTATTVIEIQVSEQEPPSTGGGPSEDKRFSVVDMAALGGVLGALLLLALLGLAVLVHKHYGPRLKCCCGKAPEPQPQGFDNQAFLPDHKANWAPVPSPTHDPKPAEAPMPAEPAPPGPASPGGAPEPPAAARAGGSPTAVRSILTKERRPEGGYKAVWFGEDIGTEADVVVLNAPTLDVDGASDSGSGDEGEGAGRGGGPYDAPGGDDSYI

SEQ ID NO: 2547 - protein, 845 aa, Homo sapiens
MGSWALLWPPLLFTGLLVRPPGTMAQAQYCSVNKDIFEVEENTNVTEPLVDIHVPEGQEVTLGALSTPFAFRIQGNQLFLNVTPDYEEKSLLEAQLLCQSGGTLVTQLRVFVSVLDVNDNAPEFPFKTKEIRVEEDTKVNSTVIPETQLQAEDRDKDDILFYTLQEMTAGASDYFSLVSVNRPALRLDRPLDFYERPNMTFWLLVRDTPGENVEPSHTATATLVLNVVPADLRPPWFLPCTFSDGYVCIQAQYHGAVPTGHILPSPLVLRPGPIYAEDGDRGINQPIIYSIFRGNVNGTFIIHPDSGNLTVARSVPSPMTFLLLVKGQQADLARYSVTQVTVEAVAAAGSPPRFPQRLYRGTVARGAGAGVVVKDAAAPSQPLRIQAQDPEFSDLNSAITYRITNHSHFRMEGEVVLTTTTLAQAGAFYAEVEAHNTVTSGTATTVIEIQVSEQEPPSTDVPPSPEAGGTTGPWTSTTSEVPRPPEPSQGPSTTSSGGGTGPHPPSGTTLRPPTSSTPGGPPGAENSTSHQPATPGGDTAQTPKPGTSQPMPPGVGTSTSHQPATPSGGTAQTPEPGTSQPMPPSMGTSTSHQPATPGGGTAQTPEAGTSQPMPPGMGTSTSHQPTTPGGGTAQTPEPGTSQPMPLSKSTPSSGGGPSEDKRFSVVDMAALGGVLGALLLLALLGLAVLVHKHYGPRLKCCCGKAPEPQPQGFDNQAFLPDHKANWAPVPSPTHDPKPAEAPMPAEPAPPGPASPGGAPEPPAAARAGGSPTAVRSILTKERRPEGGYKAVWFGEDIGTEADVVVLNAPTLDVDGASDSGSGDEGEGAGRGGGPYDAPGGDDSYI

SEQ ID NO: 2548 - protein, 845 aa, Homo sapiens; identical to SEQ ID NO: 2547

SEQ ID NO: 2549 - protein, 106 aa, Homo sapiens
MGSWALLWPPLLFTGLLVRPPGTMAQAQYCSVNKDIFEVEENTNVTEPLVDIHVPEGQEVTLGALSTPFAFRIQGNQLFLNVTPDYEKAGPFRDEAAWAHTLSTDH

SEQ ID NO: 2550 - protein, 15 aa, Homo sapiens
MTAGASDYFSLVSVN

SEQ ID NO: 2551 - protein, 116 aa, Homo sapiens
MEPAAGSSMEPSADWLATAAARGRVEEVRALLEAGALPNAPNSYGRRPIQVGRGSAAGAGDGGRLWRTKFAGELESGSASILRKKGRLPGEFSEGVCNHRPPPGDALGAWEAKEEE

SEQ ID NO: 2552 - protein, 138 aa, Homo sapiens
MEPAAGSSMEPSADWLATAAARGRVEEVRALLEAGALPNAPNSYGRRPIQVMMMGSARVAELLLLHGAEPNCADPATLTRPVHDAAREGFLDTLVVLHRAGARLDVRDAWGRLPVDLAEELGHRDVARHPRLKEPERL

SEQ ID NO: 2553 - protein, 156 aa, Homo sapiens
MEPAAGSSMEPSADWLATAAARGRVEEVRALLEAGALPNAPNSYGRRPIQVMMMGSARVAELLLLHGAEPNCADPATLTRPVHDAAREGFLDTLVVLHRAGARLDVRDAWGRLPVDLAEELGHRDVARYLRAAAGGTRGSNHARIDAAEGPSDIPD

SEQ ID NO: 2554 - protein, 167 aa, Homo sapiens
MEPAAGSSMEPSADWLATAAARGRVEEVRALLEAGALPNAPNSYGRRPIQVMMMGSARVAELLLLHGAEPNCADPATLTRPVHDAAREGFLDTLVVLHRAGARLDVRDAWGRLPVDLAEELGHRDVARYLRAAAGGTRGSNHARIDAAEGPSEMIGNHLWVCRSRHA

SEQ ID NO: 2555 - protein, 105 aa, Homo sapiens
MMMGSARVAELLLLHGAEPNCADPATLTRPVHDAAREGFLDTLVVLHRAGARLDVRDAWGRLPVDLAEELGHRDVARYLRAAAGGTRGSNHARIDAAEGPSDIPD

SEQ ID NO: 2556 - protein, 105 aa, Homo sapiens; identical to SEQ ID NO: 2555

SEQ ID NO: 2557 - protein, 105 aa, Homo sapiens; identical to SEQ ID NO: 2555

SEQ ID NO: 2558 - protein, 104 aa, Homo sapiens
MMMGSARVAELLLLHGAEPNCADPATLTRPVHDAAREGFLDTLVVLHRAGARLDVRDAWGRLPVDLAEELGHRDVARYLRAAAGGTRGSNHARIDAAEGPSGED

SEQ ID NO: 2559 - protein, 121 aa, Homo sapiens
MMMGSARVAELLLLHGAEPNCADPATLTRPVHDAAREGFLDTLVVLHRAGARLDVRDAWGRLPVDLAEELGHRDVARYLRAAAGGTRGSNHARIDAAEGPSVTASIQVPGGEEGDFGSSYS

SEQ ID NO: 2560 - protein, 132 aa, Homo sapiens
MVRRFLVTLRIRRACGPPRVRVFVVHIPRLTGEWAAPGAPAAVALVLMLLRSQRLGQQPLPRRPGHDDGQRPSGGAAAAPRRGAQLRRPRHSHPTRARRCPGGLPGHAGGAAPGRGAAGRARCLGPSARGPG

SEQ ID NO: 2561 - protein, 132 aa, Homo sapiens; identical to SEQ ID NO: 2560

SEQ ID NO: 2562 - protein, 85 aa, Homo sapiens
MSVHMPAMKICEKLKKLDSQICELKYEKTLDLASVDLRKMRVAELKQILHSWGEECRACAEKTDYVNLIQELAPKYAATHPKTEL

SEQ ID NO: 2563 - protein, 187 aa, Homo sapiens
MWCASPVAVVAFCAGLLVSHPVLTQGQEAGGRPGADCEVCKEFLNRFYKSLIDRGVNFSLDTIEKELISFCLDTKGKENRLCYYLGATKDAATKILSEVTRPMSVHMPAMKICEKLKKLDSQICELKYEKTLDLASVDLRKMRVAELKQILHSWGEECRACAEKTDYVNLIQELAPKYAATHPKTEL

SEQ ID NO: 2564 - protein, 111 aa, Homo sapiens
MHPDLGPLCTLLYVTLTILCSSVSSDLAPYFTSEPLSAVQKLGGPVVLHCSAQPVTTRISWLHNGKTLDGNLEHVKIHQGTLTILSLNSSLLGYYQCLANNSIGAIVSGPA

SEQ ID NO: 2565 - protein, 143 aa, Homo sapiens
MHPDLGPLCTLLYVTLTILCSSVSSDLAPYFTSEPLSAVQKLGGPVVLHCSAQPVTTRISWLHNGKTLDGNLEHVKIHQGTLTILSLNSSLLGYYQCLANNSIGAIVSGPATVSVAVLGDFGSSTKHVITAEEKSAGFIGCRV

SEQ ID NO: 2566 - protein, 165 aa, Homo sapiens
MHPDLGPLCTLLYVTLTILCSSVSSDLAPYFTSEPLSAVQKLGGPVVLHCSAQPVTTRISWLHNGKTLDGNLEHVKIHQGTLTILSLNSSLLGYYQCLANNSIGAIVSGPATVSVAVLGDFGSSTKHVITAEEKSAGFIGCRVPESNPKAEVRYKIRGKWLEHST

SEQ ID NO: 2567 - protein, 1264 aa, Homo sapiens
MHPDLGPLCTLLYVTLTILCSSVSSDLAPYFTSEPLSAVQKLGGPVVLHCSAQPVTTRISWLHNGKTLDGNLEHVKIHQGTLTILSLNSSLLGYYQCLANNSIGAIVSGPATVSVAVLGDFGSSTKHVITAEEKSAGFIGCRVPESNPKAEVRYKIRGKWLEHSTENYLILPSGNLQILNVSLEDKGSYKCAAYNPVTHQLKVEPIGRKLLVSRPSSDDVHILHPTHSQALAVLSRSPVTLECVVSGVPAPQVYWLKDGQDIAPGSNWRRLYSHLATDSVDPADSGNYSCMAGNKSGDVKYVTYMVNVLEHASISKGLQDQIVSLGATVHFTCDVHGNPAPNCTWFHNAQPIHPSARHLTAGNGLKISGVTVEDVGMYQCVADNGIGFMHSTGRLEIENDGGFKPVIITAPVSAKVADGDFVTLSCNASGLPVPVIRWYDSHGLITSHPSQVLRSKSRKSQLSRPEGLNLEPVYFVLSQAGASSLHIQAVTQEHAGKYICEAANEHGTTQAEASLMVVPFETNTKAETVTLPDAAQNDDRSKRDGSETGLLSSFPVKVHPSAVESAPEKNASGISVPDAPIILSPPQTHTPDTYNLVWRAGKDGGLPINAYFVKYRKLDDGVGMLGSWHTVRVPGSENELHLAELEPSSLYEVLMVARSAAGEGQPAMLTFRTSKEKTASSKNTQASSPPVGIPKYPVVSEAANNNFGVVLTDSSRHSGVPEAPDRPTISTASETSVYVTWIPRANGGSPITAFKVEYKRMRTSNWLVAAEDIPPSKLSVEVRSLEPGSTYKFRVIAINHYGESFRSSASRPYQVVGFPNRFSSRPITGPHIAYTEAVSDTQIMLKWTYIPSSNNNTPIQGFYIYYRPTDSDNDSDYKRDVVEGSKQWHMIGHLQPETSYDIKMQCFNEGGESEFSNVMICETKVKRVPGASEYPVKDLSTPPNSLGSGGNVGPATSPARSSDMLYLIVGCVLGVMVLILMVFIAMCLWKNRQQNTIQKYDPPGYLYQGSDMNGQMVDYTTLSGASQINGNVHGGFLTNGGLSSGYSHLHHKVPNAVNGIVNGSLNGGLYSGHSNSLTRTHVDFEHPHHLVNGGGMYTAVPQIDPLECVNCRNCRNNNRCFTKTNSTFSSSPPPVVPVVAPYPQDGLEMKPLSHVKVPVCLTSAVPDCGQLPEESVKDNVEPVPTQRTCCQDIVNDVSSDGSEDPAEFSRGDSCAHSETEINIVSWNALILPPVPEGCAEKTMWSPPGIPLDSPTEVLQQPRET

SEQ ID NO: 2568 - protein, 1287 aa, Homo sapiens
MHPDLGPLCTLLYVTLTILCSSVSSDLAPYFTSEPLSAVQKLGGPVVLHCSAQPVTTRISWLHNGKTLDGNLEHVKIHQGTLTILSLNSSLLGYYQCLANNSIGAIVSGPATVSVAVLGDFGSSTKHVITAEEKSAGFIGCRVPESNPKAEVRYKIRGKWLEHSTENYLILPSGNLQILNVSLEDKGSYKCAAYNPVTHQLKVEPIGRKLLVSRPSSDDVHILHPTHSQALAVLSRSPVTLECVVSGVPAPQVYWLKDGQDIAPGSNWRRLYSHLATDSVDPADSGNYSCMAGNKSGDVKYVTYMVNVLEHASISKGLQDQIVSLGATVHFTCDVHGNPAPNCTWFHNAQPIHPSARHLTAGNGLKISGVTVEDVGMYQCVADNGIGFMHSTGRLEIENDGGFKPVIITAPVSAKVADGDFVTLSCNASGLPVPVIRWYDSHGLITSHPSQVLRSKSRKSQLSRPEGLNLEPVYFVLSQAGASSLHIQAVTQEHAGKYICEAANEHGTTQAEASLMVVPFETNTKAETVTLPDAAQNDDRSKRDGSETGLLSSFPVKVHPSAVESAPEKNASGISVPDAPIILSPPQTHTPDTYNLVWRAGKDGGLPINAYFVKYRKLDDGVGMLGSWHTVRVPGSENELHLAELEPSSLYEVLMVARSAAGEGQPAMLTFRTSKEKTASSKNTQASSPPVGIPKYPVVSEAANNNFGVVLTDSSRHSGVPEAPDRPTISTASETSVYVTWIPRANGGSPITAFKVEYKRMRTSNWLVAAEDIPPSKLSVEVRSLEPGSTYKFRVIAINHYGESFRSSASRPYQVVGFPNRFSSRPITGPHIAYTEAVSDTQIMLKWTYIPSSNNNTPIQGFYIYYRPTDSDNDSDYKRDVVEGSKQWHMIGHLQPETSYDIKMQCFNEGGESEFSNVMICETKVKRVPGASEYPVKDLSTPPNSLGSGGNVGPATSPARSSDMLYLIVGCVLGVMVLILMVFIAMCLWKNRQQNTIQKYDPPGYLYQGSDMNGQMVDYTTLSGASQINGNVHGGFLTNGGLSSGYSHLHHKVPNAVNGIVNGSLNGGLYSGHSNSLTRTHVDFEHPHHLVNGGGMYTAVPQIDPLECVNCRNCRNNNRCFTKTNSTFSSSPPPVVPVVAPYPQDGLEMKPLSHVKVPVCLTSAVPDCGQLPEESVKDNVEPVPTQRTCCQDIVNDVSSDGSEDPAEFSRGQEGMINLRIPDHLQLAKSCVWEGDSCAHSETEINIVSWNALILPPVPEGCAEKTMWSPPGIPLDSPTEVLQQPRET

SEQ ID NO: 2569 - protein, 641 aa, Homo sapiens
MLGSWHTVRVPGSENELHLAELEPSSLYEVLMVARSAAGEGQPAMLTFRTSKEKTASSKNTQASSPPVGIPKYPVVSEAANNNFGVVLTDSSRHSGVPEAPDRPTISTASETSVYVTWIPRANGGSPITAFKVEYKRMRTSNWLVAAEDIPPSKLSVEVRSLEPGSTYKFRVIAINHYGESFRSSASRPYQVVGFPNRFSSRPITGPHIAYTEAVSDTQIMLKWTYIPSSNNNTPIQGFYIYYRPTDSDNDSDYKRDVVEGSKQWHMIGHLQPETSYDIKMQCFNEGGESEFSNVMICETKVKRVPGASEYPVKDLSTPPNSLGSGGNVGPATSPARSSDMLYLIVGCVLGVMVLILMVFIAMCLWKNRQQNTIQKYDPPGYLYQGSDMNGQMVDYTTLSGASQINGNVHGGFLTNGGLSSGYSHLHHKVPNAVNGIVNGSLNGGLYSGHSNSLTRTHVDFEHPHHLVNGGGMYTAVPQIDPLECVNCRNCRNNNRCFTKTNSTFSSSPPPVVPVVAPYPQDGLEMKPLSHVKVPVCLTSAVPDCGQLPEESVKDNVEPVPTQRTCCQDIVNDVSSDGSEDPAEFSRGDSCAHSETEINIVSWNALILPPVPEGCAEKTMWSPPGIPLDSPTEVLQQPRET

SEQ ID NO: 2570 - protein, 650 aa, Homo sapiens
  SITE 1: note = misc_feature - Xaa can be any naturally occurring amino acid
XDLAPYFTSEPLSAVQKLGGPVVLHCSAQPVTTRISWLHNGKTLDGNLEHVKIHQGTLTILSLNSSLLGYYQCLANNSIGAIVSGPATVSVAVLGDFGSSTKHVITAEEKSAGFIGCRVPESNPKAEVRYKIRGKWLEHSTENYLILPSGNLQILNVSLEDKGSYKCAAYNPVTHQLKVEPIGRKLLVSRPSSDDVHILHPTHSQALAVLSRSPVTLECVVSGVPAPQVYWLKDGQDIAPGSNWRRLYSHLATDSVDPADSGNYSCMAGNKSGDVKYVTYMVNVLEHASISKGLQDQIVSLGATVHFTCDVHGNPAPNCTWFHNAQPIHPSARHLTAGNGLKISGVTVEDVGMYQCVADNGIGFMHSTGRLEIENDGGFKPVIITAPVSAKVADGDFVTLSCNASGLPVPVIRWYDSHGLITSHPSQVLRSKSRKSQLSRPEGLNLEPVYFVLSQAGASSLHIQAVTQEHAGKYICEAANEHGTTQAEASLMVVPFETNTKAETVTLPDAAQNDDRSKRDGSETGLLSSFPVKVHPSAVESAPEKNASGISVPDAPIILSPPQTHTPDTYNLVWRAGKDGGLPINAYFVKYRKLDDGVGMLGSWHTVRVPGSENELHLAELEPSSLYEVLMVARSAAGEGQPAMLTFRTS

SEQ ID NO: 2571 - protein, 243 aa, Homo sapiens
  SITE 1: note = misc_feature - Xaa can be any naturally occurring amino acid
XNYLILPSGNLQILNVSLEDKGSYKCAAYNPVTHQLKVEPIGRKLLVSRPSSDDVHILHPTHSQALAVLSRSPVTLECVVSGVPAPQVYWLKDGQDIAPGSNWRRLYSHLATDSVDPADSGNYSCMAGNKSGDVKYVTYMVNVLEHASISKGLQDQIVSLGATVHFTCDVHGNPAPNCTWFHNAQPIHPSARHLTAGNGLKISGVTVEDVGMYQCVADNGIGFMHSTGRLEIENGQEIYVGNV

SEQ ID NO: 2572 - protein, 529 aa, Homo sapiens
MGSSRAPWMGRVGGHGMMALLLAGLLLPGTLAKSIGTFSDPCKDPTRITSPNDPCLTGKGDSSGFSSYSGSSSSGSSISSARSSGGGSSGSSSGSSIAQGGSAGSFKPGTGYSQVSYSSGSGSSLQGASGSSQLGSSSSHSGNSGSHSGSSSSHSSSSSSFQFSSSSFQVGNGSALPTNDNSYRGILNPSQPGQSSSSSQTFGVSSSGQSVSSNQRPCSSDIPDSPCSGGPIVSHSGPYIPSSHSVSGGQRPVVVVVDQHGSGAPGVVQGPPCSNGGLPGKPCPPITSVDKSYGGYEVVGGSSDSYLVPGMTYSKGKIYPVGYFTKENPVKGSPGVPSFAAGPPISEGKYFSSNPIIPSQSAASSAIAFQPVGTGGVQLCGGGSTGSKGPCSPSSSRVPSSSSISSSSGLPYHPCGSASQSPCSPPGTGSFSSSSSSQSSGKIILQPCGSKSSSSGHPCMSVSSLTLTGGPDGSPHPDPSAGAKPCGSSSAGKIPCRSIRDILAQVKPLGPQLADPEVFLPQGELLNSP

SEQ ID NO: 2573 - protein, 425 aa, Homo sapiens
MALTGYSWLLLSATFLNVGAEISITLEPAQPSEGDNVTLVVHGLSGELLAYSWYAGPTLSVSYLVASYIVSTGDETPGPAHTGREAVRPDGSLDIQGILPRHSGTYILQTFNRQLQTEVGYGHVQVHEILAQPTVLANSTALVERRDTLRLMCSSPSPTAEVRWFFNGGALPVALRLGLSPDGRVLARHGIRREEAGAYQCEVWNPVSVSRSEPINLTVYFGPERVAILQDSTTRTGCTIKVDFNTSLTLWCVSRSCPEPEYVWTFNGQALKNGQDHLNISSMTAAQEGTYTCIAKNTKTLLSGSASVVVKLSAAAVATMIVPVPTKPTEGQDVTLTVQGYPKDLLVYAWYRGPASEPNRLLSQLPSGTWIAGPAHTGREVGFPNCSLLVQKLNLTDTGRYTLKTVTVQGKTETLEVELQVAPLG

SEQ ID NO: 2574 - protein, 425 aa, Homo sapiens; identical to SEQ ID NO: 2573

SEQ ID NO: 2575 - protein, 384 aa, Homo sapiens
MDLSRPRWSLWRRVFLMASLLACGICQASGQIFITQTLGIKGYRTVVALDKVPEDVQEYSWYWGANDSAGNMIISHKPPSAQQPGPMYTGRERVNREGSLLIRPTALNDTGNYTVRVVAGNETQRATGWLEVLELGSNLGISVNASSLVENMDSVAADCLTNVTNITWYVNDVPTSSSDRMTISPDGKTLVILRVSRYDRTIQCMIESFPEIFQRSERISLTVAYGPDYVLLRSNPDDFNGIVTAEIGSQVEMECICYSFLDLKYHWIHNGSLLNFSDAKMNLSSLAWEQMGRYRCTVENPVTQLIMYMDVRIQAPHEDLTCCPQRFLHLRIHGDVPHHADSAGWRLHLWSPDPCSDQPLLNQDKSGSMSVHPRPEDKTRRASR

SEQ ID NO: 2576 - protein, 55 aa, Homo sapiens
MEIPMGTQGCFSKSLLLSASILVLWMLQGSQAALYIQKIPEQPQKNQDLLLSVQG

SEQ ID NO: 2577 - protein, 56 aa, Homo sapiens
MEIPMGTQGCFSKSLLLSASILVLWMLQGSQAALYIQKIPEQPQKNQDLLLSVQGV

SEQ ID NO: 2578 - protein, 56 aa, Homo sapiens; identical to SEQ ID NO: 2577

SEQ ID NO: 2579 - protein, 56 aa, Homo sapiens; identical to SEQ ID NO: 2577

SEQ ID NO: 2580 - protein, 56 aa, Homo sapiens; identical to SEQ ID NO: 2577

SEQ ID NO: 2581 - protein, 299 aa, Homo sapiens
MEIPMGTQGCFSKSLLLSASILVLWMLQGSQAALYIQKIPEQPQKNQDLLLSVQGVPDTFQDFNWYLGEETYGGTRLFTYIPGIQRPQRDGSAMGQRDIVGFPNGSMLLRRAQPTDSGTYQVAITINSEWTMKAKTEVQVAEKNKELPSTHLPTNAGILAATIIGSLAAGALLISCIAYLLVTRNWRGQSHRLPAPRGQGSLSILCSAVSPVPSVTPSTWMATTEKPELGPAHDAGDNNIYEVMPSPVLLVSPISDTRSINPARPLPTPPHLQAEPENHQYQDLLNPDPAPYCQLVPTS

SEQ ID NO: 2582 - protein, 300 aa, Homo sapiens
MEIPMGTQGCFSKSLLLSASILVLWMLQGSQAALYIQKIPEQPQKNQDLLLSVQGVPDTFQDFNWYLGEETYGGTRLFTYIPGIQRPQRDGSAMGQRDIVGFPNGSMLLRRAQPTDSGTYQVAITINSEWTMKAKTEVQVAEKNKELPSTHLPTNAGILAATIIGSLAAGALLISCIAYLLVTRNWRGQSHRLPAPRGQGSLSILCSAVSPVPSVTPSTWMATTEKPELGPAHDAGDNNIYEVMPSPVLLVSPISDTRSINPARPLPTPPHLQAEPENHQYQQDLLNPDPAPYCQLVPTS

SEQ ID NO: 2583 - protein, 346 aa, Homo sapiens
MESPSAPPHRWCIPWQRLLLTASLLTFWNPPTTAKLTIESTPFNVAEGKEVLLLVHNLPQHLFGYSWYKGERVDGNRQIIGYVIGTQQATPGPAYSGREIIYPNASLLIQNIIQNDTGFYTLHVIKSDLVNEEATGQFRVYPELPKPSISSNNSKPVEDKDAVAFTCEPETQDATYLWWVNNQSLPVSPRLQLSNGNRTLTLFNVTRNDARAYVCGIQNSVSANRSDPVTLDVLYGPDTPIISPPDSSYLSGANLNLSCHSASNPSPQYSWRINGIPQQHTQVLFIAKITPNNNGTYACFVSNLATGRNNSIVKSITVSASGTSPGLSAGATVGIMIGVLVGVALI

SEQ ID NO: 2584 - protein, 702 aa, Homo sapiens
MESPSAPPHRWCIPWQRLLLTASLLTFWNPPTTAKLTIESTPFNVAEGKEVLLLVHNLPQHLFGYSWYKGERVDGNRQIIGYVIGTQQATPGPAYSGREIIYPNASLLIQNIIQNDTGFYTLHVIKSDLVNEEATGQFRVYPELPKPSISSNNSKPVEDKDAVAFTCEPETQDATYLWWVNNQSLPVSPRLQLSNGNRTLTLFNVTRNDTASYKCETQNPVSARRSDSVILNVLYGPDAPTISPLNTSYRSGENLNLSCHAASNPPAQYSWFVNGTFQQSTQELFIPNITVNNSGSYTCQAHNSDTGLNRTTVTTITVYAEPPKPFITSNNSNPVEDEDAVALTCEPEIQNTTYLWWVNNQSLPVSPRLQLSNDNRTLTLLSVTRNDVGPYECGIQNELSVDHSDPVILNVLYGPDDPTISPSYTYYRPGVNLSLSCHAASNPPAQYSWLIDGNIQQHTQELFISNITEKNSGLYTCQANNSASGHSRTTVKTITVSAELPKPSISSNNSKPVEDKDAVAFTCEPEAQNTTYLWWVNGQSLPVSPRLQLSNGNRTLTLFNVTRNDARAYVCGIQNSVSANRSDPVTLDVLYGPDTPIISPPDSSYLSGANLNLSCHSASNPSPQYSWRINGIPQQHTQVLFIAKITPNNNGTYACFVSNLATGRNNSIVKSITVSASGTSPGLSAGATVGIMIGVLVGVALI

SEQ ID NO: 2585 - protein, 701 aa, Homo sapiens
MESPSAPPHRWCIPWQRLLLTASLLTFWNPPTTAKLTIESTPFNVAEGKEVLLLVHNLPQHLFGYSWYKGERVDGNRQIIGYVIGTQQATPGPAYSGREIIYPNASLLIQNIIQNDTGFYTLHVIKSDLVNEEATGQFRVYPELPKPSISSNNSKPVEDKDAVAFTCEPETQDATYLWWVNNQSLPVSPRLQLSNGNRTLTLFNVTRNDTASYKCETQNPVSARRSDSVILNVLYGPDAPTISPLNTSYRSGENLNLSCHAASNPPAQYSWFVNGTFQQSTQELFIPNITVNNSGSYTCQAHNSDTGLNRTTVTTITVYEPPKPFITSNNSNPVEDEDAVALTCEPEIQNTTYLWWVNNQSLPVSPRLQLSNDNRTLTLLSVTRNDVGPYECGIQNELSVDHSDPVILNVLYGPDDPTISPSYTYYRPGVNLSLSCHAASNPPAQYSWLIDGNIQQHTQELFISNITEKNSGLYTCQANNSASGHSRTTVKTITVSAELPKPSISSNNSKPVEDKDAVAFTCEPEAQNTTYLWWVNGQSLPVSPRLQLSNGNRTLTLFNVTRNDARAYVCGIQNSVSANRSDPVTLDVLYGPDTPIISPPDSSYLSGANLNLSCHSASNPSPQYSWRINGIPQQHTQVLFIAKITPNNNGTYACFVSNLATGRNNSIVKSITVSASGTSPGLSAGATVGIMIGVLVGVALI

SEQ ID NO: 2586 - protein, 702 aa, Homo sapiens; identical to SEQ ID NO: 2584

SEQ ID NO: 2587 - protein, 702 aa, Homo sapiens; identical to SEQ ID NO: 2584

SEQ ID NO: 2588 - protein, 524 aa, Homo sapiens
MESPSAPPHRWCIPWQRLLLTASLLTFWNPPTTAKLTIESTPFNVAEGKEVLLLVHNLPQHLFGYSWYKGERVDGNRQIIGYVIGTQQATPGPAYSGREIIYPNASLLIQNIIQNDTGFYTLHVIKSDLVNEEATGQFRVYPEPPKPFITSNNSNPVEDEDAVALTCEPEIQNTTYLWWVNNQSLPVSPRLQLSNDNRTLTLLSVTRNDVGPYECGIQNELSVDHSDPVILNVLYGPDDPTISPSYTYYRPGVNLSLSCHAASNPPAQYSWLIDGNIQQHTQELFISNITEKNSGLYTCQANNSASGHSRTTVKTITVSAELPKPSISSNNSKPVEDKDAVAFTCEPEAQNTTYLWWVNGQSLPVSPRLQLSNGNRTLTLFNVTRNDARAYVCGIQNSVSANRSDPVTLDVLYGPDTPIISPPDSSYLSGANLNLSCHSASNPSPQYSWRINGIPQQHTQVLFIAKITPNNNGTYACFVSNLATGRNNSIVKSITVSASGTSPGLSAGATVGIMIGVLVGVALI

SEQ ID NO: 2589 - protein, 194 aa, Homo sapiens
  SITE 1: note = misc_feature - Xaa can be any naturally occurring amino acid
XIYPNASLLIQNIIQNDTGFYTLHVIKSDLVNEEATGQFRVYPELPKPSISSNNSKPVEDKDAVAFTCEPETQDATYLWWVNNQSLPVSPRLQLSNGNRTLTLFNVTRNDTASYKCETQNPVSARRSDSVILNVLSEPPKPFITSNNSNPVEDEDAVALTCEPEIQNTTYLWWVNNQSLPVSPRLQLSNDNRTL

SEQ ID NO: 2590 - protein, 141 aa, Homo sapiens
  SITE 1: note = misc_feature - Xaa can be any naturally occurring amino acid
XKLTIESTPFNVAEGKEVLLLVHNLPQHLFGYSWYKGERVDGNRQIIGYVIGTQQATPGPAYSGREIIYPNASLLIQNIIQNDTGFYTLHVIKSDLVNEEATGQFRVYPELPKPSISSNNSKPVEDKDAVAFTCEPEAQNT

SEQ ID NO: 2591 - protein, 265 aa, Homo sapiens
MGSPSACPYRVCIPWQGLLLTASLLTFWNLPNSAQTNIDVVPFNVAEGKEVLLVVHNESQNLYGYNWYKGERVHANYRIIGYVKNISQENAPGPAHNGRETIYPNGTLLIQNVTHNDAGIYTLHVIKENLVNEEVTRQFYVFSEPPKPSITSNNFNPVENKDIVVLTCQPETQNTTYLWWVNNQSLLVSPRLLLSTDNRTLVLLSATKNDIGPYECEIQNPVGASRSDPVTLNVRYESVQASSPDLSAGTAVSIMIGVLAGMALI

SEQ ID NO: 2592 - protein, 265 aa, Homo sapiens; identical to SEQ ID NO: 2591

SEQ ID NO: 2593 - protein, 172 aa, Homo sapiens
MGSPSACPYRVCIPWQGLLLTASLLTFWNLPNSAQTNIDVVPFNVAEGKEVLLVVHNESQNLYGYNWYKGERVHANYRIIGYVKNISQENAPGPAHNGRETIYPNGTLLIQNVTHNDAGIYTLHVIKENLVNEEVTRQFYVFYESVQASSPDLSAGTAVSIMIGVLAGMALI

SEQ ID NO: 2594 - protein, 349 aa, Homo sapiens
MGPISAPSCRWRIPWQGLLLTASLFTFWNPPTTAQLTIEAVPSNAAEGKEVLLLVHNLPQDPRGYNWYKGETVDANRRIIGYVISNQQITPGPAYSNRETIYPNASLLMRNVTRNDTGSYTLQVIKLNLMSEEVTGQFSVHPETPKPSISSNNSNPVEDKDAVAFTCEPETQNTTYLWWVNGQSLPVSPRLQLSNGNRTLTLLSVTRNDVGPYECEIQNPASANFSDPVTLNVLYGPDAPTISPSDTYYHAGVNLNLSCHAASNPPSQYSWSVNGTFQQYTQKLFIPNITTKNSGSYACHTTNSATGRNRTTVRMITVSDALVQGSSPGLSARATVSIMIGVLARVALI

SEQ ID NO: 2595 - protein, 51 aa, Homo sapiens
MGPISAPSCRWRIPWQGLLLTDALVQGSSPGLSARATVSIMIGVLARVALI

SEQ ID NO: 2596 - protein, 756 aa, Homo sapiens
MLTMGRLQLVVLGLTCCWAVASAAKLGAVYTEGGFVEGVNKKLGLLGDSVDIFKGIPFAAPTKALENPQPHPGWQGTLKAKNFKKRCLQATITQDSTYGDEDCLYLNIWVPQGRKQVSRDLPVMIWIYGGAFLMGSGHGANFLNNYLYDGEEIATRGNVIVVTFNYRVGPLGFLSTGDANLPGNYGLRDQHMAIAWVKRNIAAFGGDPNNITLFGESAGGASVSLQTLSPYNKGLIRRAISQSGVALSPWVIQKNPLFWAKKVAEKVGCPVGDAARMAQCLKVTDPRALTLAYKVPLAGLEYPMLHYVGFVPVIDGDFIPADPINLYANAADIDYIAGTNNMDGHIFASIDMPAINKGNKKVTEEDFYKLVSEFTITKGLRGAKTTFDVYTESWAQDPSQENKKKTVVDFETDVLFLVPTEIALAQHRANAKSAKTYAYLFSHPSRMPVYPKWVGADHADDIQYVFGKPFATPTGYRPQDRTVSKAMIAYWTNFAKTGDPNMGDSAVPTHWEPYTTENSGYLEITKKMGSSSMKRSLRTNFLRYWTLTYLALPTVTDQEATPVPPTGDSEATPVPPTGDSETAPVPPTGDSGAPPVPPTGDSGAPPVPPTGDSGAPPVPPTGDSGAPPVPPTGDSGAPPVPPTGDSGAPPVPPTGDSGAPPVPPTGDSGAPPVPPTGDAGPPPVPPTGDSGAPPVPPTGDSGAPPVTPTGDSETAPVPPTGDSGAPPVPPTGDSEAAPVPPTDDSKEAQMPAVIRF

SEQ ID NO: 2597 - protein, 269 aa, Homo sapiens
MIRTLLLSTLVAGALSCGDPTYPPYVTRVVGGEEARPNSWPWQVSLQYSSNGKWYHTCGGSLIANSWVLTAAHCISSSRTYRVGLGRHNLYVAESGSLAVSVSKIVVHKDWNSNQISKGNDIALLKLANPVSLTDKIQLACLPPAGTILPNNYPCYVTGWGRLQTNGAVPDVLQQGRLLVVDYATCSSSAWWGSSVKTSMICAGGDGVISSCNGDSGGPLNCQASDGRWQVHGIVSFGSRLGCNYYHKPSVFTRVSNYIDWINSVIANN

SEQ ID NO: 2598 - protein, 126 aa, Homo sapiens [sequence omitted]

SEQ ID NO: 2599 - protein, 269 aa, Homo sapiens
MIRTLLLSTLVAGALSCGVSTYAPDMSRMLGGEEARPNSWPWQVSLQYSSNGQWYHTCGGSLIANSWVLTAAHCISSSGIYRVMLGQHNLYVAESGSLAVSVSKIVVHKDWNSDQVSKGNDIALLKLANPVSLTDKIQLACLPPAGTILPNNYPCYVTGWGRLQTNGALPDDLKQGQLLVVDYATCSSSGWWGSTVKTNMICAGGDGVICTCNGDSGGPLNCQASDGRWEVHGIGSLTSVLGCNYYYKPSIFTRVSNYNDWINSVIANN

SEQ ID NO: 2600 - protein, 121 aa, Homo sapiens
MMLRLLSSLLLVAVASGYGPPSSHSSSRVVHGEDAVPYSWPWQVSLQYEKSGSFYHTCGGSLIAPDWVVTAGHCISRDLTYQVVLGEYNLAVKEGPEQVIPINSEELFVHPLWNRSCVACG

SEQ ID NO: 2601 - protein, 270 aa, Homo sapiens
MMLRLLSSLLLVAVASGYGPPSSHSSSRVVHGEDAVPYSWPWQVSLQYEKSGSFYHTCGGSLIAPDWVVTAGHCISRDLTYQVVLGEYNLAVKEGPEQVIPINSEELFVHPLWNRSCVACGNDIALIKLSRSAQLGDAVQLASLPPAGDILPNKTPCYITGWGRLYTNGPLPDKLQQARLPVVDYKHCSRWNWWGSTVKKTMVCAGGYIRSGCNGDSGGPLNCPTEDGGWQVHGVTSFVSAFGCNFIWKPTVFTRVSAFIDWIEETIASH

SEQ ID NO: 2602 - protein, 75 aa, Homo sapiens
WWGSTVKKTMVCAGGYIRSGCNGDSGGPLNCPTEDGGWQVHGVTSFVSAFGCNFIWKPTVFTRVSAFIDWIEEGG

SEQ ID NO: 2603 - protein, 270 aa, Homo sapiens
MMLRLLSSLLLVAVASGYGPPSSRPSSRVVNGEDAVPYSWPWQVSLQYEKSGSFYHTCGGSLIAPDWVVTAGHCISSSRTYQVVLGEYDRAVKEGPEQVIPINSGDLFVHPLWNRSCVACGNDIALIKLSRSAQLGDAVQLASLPPAGDILPNETPCYITGWGRLYTNGPLPDKLQEALLPVVDYEHCSRWNWWGSSVKKTMVCAGGDIRSGCNGDSGGPLNCPTEDGGWQVHGVTSFVSAFGCNTRRKPTVFTRVSAFIDWIEETIASH

SEQ ID NO: 2604 - protein, 164 aa, Homo sapiens
MRSCYVAQAGLKLPGSSDPPASASQSTRITASGYGPPSSRPSSRVVNGEDAVPYSWPWQVSLQYEKSGSFYHTCGGSLIAPDWVVTAGHCISSSRTYQVVLGEYDRAVKEGPEQVIPINSGDLFVHPLWNRSCVACGNDIALIKLSRSAQLGDAVQLASLPPAG

SEQ ID NO: 2605 - protein, 180 aa, Homo sapiens
QVIPINSGDLFVHPLWNRSCVACGNDIALIKLSRSAQLGDAVQLASLPPAGDILPNETPCYITGWGRLYTNGPLPDKLQEALLPVVDYEHCSRWNWWGSSVKKTMVCAGGDIRSGCNGDSGGPLNCPTEDGGWQVHGVTSFVSAFGCNTRRKPTVFTRVSAFIDWIEEKLQGNKAPESRT

SEQ ID NO: 2606 - protein, 1361 aa, Homo sapiens
MGAAGRQDFLFKAMLTISWLTLTCFPGATSTVAAGCPDQSPELQPWNPGHDQDHHVHIGQGKTLLLTSSATVYSIHISEGGKLVIKDHDEPIVLRTRHILIDNGGELHAGSALCPFQGNFTIILYGRADEGIQPDPYYGLKYIGVGKGGALELHGQKKLSWTFLNKTLHPGGMAEGGYFFERSWGHRGVIVHVIDPKSGTVIHSDRFDTYRSKKESERLVQYLNAVPDGRILSVAVNDEGSRNLDDMARKAMTKLGSKHFLHLGFRHPWSFLTVKGNPSSSVEDHIEYHGHRGSAAARVFKLFQTEHGEYFNVSLSSEWVQDVEWTEWFDHDKVSQTKGGEKISDLWKAHPGKICNRPIDIQATTMDGVNLSTEVVYKKGQDYRFACYDRGRACRSYRVRFLCGKPVRPKLTVTIDTNVNSTILNLEDNVQSWKPGDTLVIASTDYSMYQAEEFQVLPCRSCAPNQVKVAGKPMYLHIGEEIDGVDMRAEVGLLSRNIIVMGEMEDKCYPYRNHICNFFDFDTFGGHIKFALGFKAAHLEGTELKHMGQQLVGQYPIHFHLAGDVDERGGYDPPTYIRDLSIHHTFSRCVTVHGSNGLLIKDVVGYNSLGHCFFTEDGPEERNTFDHCLGLLVKSGTLLPSDRDSKMCKMITEDSYPGYIPKPRQDCNAVSTFWMANPNNNLINCAAAGSEETGFWFIFHHVPTGPSVGMYSPGYSEHIPLGKFYNNRAHSNYRAGMIIDNGVKTTEASAKDKRPFLSIISARYSPHQDADPLKPREPAIIRHFIAYKNQDHGAWLRGGDVWLDSCRFADNGIGLTLASGGTFPYDDGSKQEIKNSLFVGESGNVGTEMMDNRIWGPGGLDHSGRTLPIGQNFPIRGIQLYDGPINIQNCTFRKFVALEGRHTSALAFRLNNAWQSCPHNNVTGIAFEDVPITSRVFFGEPGPWFNQLDMDGDKTSVFHDVDGSVSEYPGSYLTKNDNWLVRHPDCINVPDWRGAICSGCYAQMYIQAYKTSNLRMKIIKNDFPSHPLYLEGALTRSTHYQQYQPVVTLQKGYTIHWDQTAPAELAIWLINFNKGDWIRVGLCYPRGTTFSILSDVHNRLLKQTSKTGVFVRTLQMDKVEQSYPGRSHYYWDEDSGLLFLKLKAQNEREKFAFCSMKGCERIKIKALIPKNAGVSDCTATAYPKFTERAVVDVPMPKKLFGSQLKTKDHFLEVKMESSKQHFFHLWNDFAYIEVDGKKYPSSEDGIQVVVIDGNQGRVVSHTSFRNSILQGIPWQLFNYVATIPDNSIVLMASKGRYVSRGPWTRVLEKLGADRGLKLKEQMAFVGFKGSFRPIWVTLDTEDHKAKIFQVVPIPVVKKKKL

SEQ ID NO: 2607 - protein, 1361 aa, Homo sapiens; identical to SEQ ID NO: 2606

SEQ ID NO: 2608 - protein, 1361 aa, Homo sapiens; identical to SEQ ID NO: 2606

SEQ ID NO: 2609 - protein, 76 aa, Homo sapiens
  SITE 1: note = misc_feature - Xaa can be any naturally occurring amino acid
XINFNKGDWIRVGLCYPRGTTFSILSDVHNRLLKQTSKTGVFVRTLQMDKVEQSYPGRSHYYWDEDSGKQRTISWR

SEQ ID NO: 2610 - protein, 145 aa, Homo sapiens
  SITE 1: note = misc_feature - Xaa can be any naturally occurring amino acid
XRGAICSGCYAQMYIQAYKTSNLRMKIIKNDFPSHPLYLEGALTRSTHYQQYQPVVTLQKGYTIHWDQTAPAELAIWLINFNKGDWIRVGLCYPRGTTFSILSDVHNRLLKQTSKTGVFVRTLQMDKVEQSYPGRSHYYWDEDSG

SEQ ID NO: 2611 - protein, 173 aa, Homo sapiens
EQDSFIEPYATTSQLRPRPNWQSEMGRRSSLPSFETLDYGDEEDIETQLSSSGKELGDVSAREDRGGHSDDLYAVPHRNQVPLLHEVNSEDDENISHQDGFPGSPPAPQRTQQKDGKHPVLNLKDEKPPLCEKPPPSPGPTLLQDLWGVAFLVGNVCGASVPLPEFLSCVQEE

SEQ ID NO: 2612 - protein, 783 aa, Homo sapiens
MLLGFRRGRRSHFKHIIHGLLPAASVAPKAAVPRTPPPRSPNPSPERPRSALAAAILATTLTGRTVAIPQPRQRSRSESDVSSVEQDSFIEPYATTSQLRPRPNWQSEMGRRSSLPSFETLDYGDEEDIETQLSSSGKELGDVSAREDRGGHSDDLYAVPHRNQVPLLHEVNSEDDENISHQDGFPGSPPAPQRTQQKDGKHPVLNLKDEKPPLCEKPPPSPDITGRARQRYTEITREKFEALKEENMDLNNMNQSLTLELNTMKQAMKELQLKLKGMEKEKRKLKEAEKASSQEVAAPELLYLRKQAQELVDENDGLKMTVHRLNVELSRYQTKFRHLSKEESLNIEGLPSKGPIPPWLLDIKYLSPLLLAYEDMMKEKDELNATLKEEMRMFRMRVQEVVKENEELHQELNKSSAVTSEEWRQLQTQAKLVLEENKLLLEQLEIQQRKAKDSHQERLQEVSKLTKQLMLLEAKTHGQEKELAENREQLEILRAKCQELKTHSDGKIAVEVHKSIVNELKSQLQKEEEKERAEMEELMEKLTVLQAQKKSLLLEKNSLTEQNKALEAELERAQKINRKSQKKIEVLKKQVEKAMGNEMSAHQYLANLVGLAENITQERDSLMCLAKCLESEKDGVLNKVIKSNIRLGKLEEKVKGYKKQAALKLGDISHRLLEQQEDFAGKTAQYRQEMRHLHQVLKDKQEVLDQALQQNREMEGELEVIWESTFRENRRIRELLQDTLTRTGVQDNPRALVAPSLNGVSQADLLDGCDVCSYDLKSHAPTC

SEQ ID NO: 2613 - protein, 428 aa, Homo sapiens
MLLGFRRGRRSHFKHIIHGLLPAASVAPKAAVPRTPPPRSPNPSPERPRSALAAAILATTLTGRTVAIPQPRQRSRSESDVSSVEQDSFIEPYATTSQLRPRPNWQSEMGRRSSLPSFETLDYGDEEDIETQLSSSGKELGDVSAREDRGGHSDDLYAVPHRNQVPLLHEVNSEDDENISHQDGFPGSPPAPQRTQQKDGKHPVLNLKDEKPPLCEKPPPSPDITGRARQRYTEITREKFEALKEENMDLNNMNQSLTLELNTMKQAMKELQLKLKGMEKEKRKLKEAEKASSQEVAAPELLYLRKQAQELVDENDGLKMTVHRLNVELSRYQTKFRHLSKEESLNIEGLPSKGPIPPWLLDIKYLSPLLLAYEDMMKEKDELNATLKASASDSSKTGFRGKQVVAGAVGDSAKESQGQPPGAPPRSF

SEQ ID NO: 2614 - protein, 356 aa, Homo sapiens
MLLGFRRGRRSHFKHIIHGLLPAASVAPKAAVPRTPPPRSPNPSPERPRSALAAAILATTLTGRTVAIPQPRQRSRSESDVSSVEQDSFIEPYATTSQLRPRPNWQSEMGRRSSLPSFETLDYGDEEDIETQLSSSGKELGDVSAREDRGGHSDDLYAVPHRNQVPLLHEVNSEDDENISHQDGFPGSPPAPQRTQQKDGKHPVLNLKDEKPPLCEKPPPSPDITGRARQRYTEITREKFEALKEENMDLNNMNQSLTLELNTMKQAMKELQLKLKGMEKEKRKLKEAEKASSQEVAAPELLYLRKQAQELVDENDGLKMTVHRLNVELSRYQTKFRHLSKEEVTFPIVKISFSDF

SEQ ID NO: 2615 - protein, 80 aa, Homo sapiens
MLLGFRRGRRSHFKQGLALSPRLECSGAIIAHCILELLGSSDLPTPASRGAETTGARHYSRLIVQYFCGNRDLAMFLWWS

SEQ ID NO: 2616 - protein, 217 aa, Homo sapiens
  SITE 1: note = misc_feature - Xaa can be any naturally occurring amino acid
XAAVPRTPPPRSPNPSPERPRSALAAAILATTLTGRTVAIPQPRQRSRSESDVSSVEQDSFIEPYATTSQLRPRPNWQSEMGRRSSLPSFETLDYGDEEDIETQLSSSGKELGDVSAREDRGGHSDDLYAVPHRNQVPLLHEVNSEDDENISHQDGFPGSPPAPQRTQQKDGKHPVLNLKDEKPPLCEKPPPSPGICLLNYIMIEKLVLENIQINFI

SEQ ID NO: 2617 - protein, 267 aa, Homo sapiens
MHLLLFQLLVLLPLGKTTRHQDGRQNQSSLSPVLLPRNQRELPTGNHEEAEEKPDLFVAVPHLVATSPAGEGQRQREKMLSRFGRFWKKPEREMHPSRDSDSEPFPPGTQSLIQPIDGMKMEKSPLREEAKKFWHHFMFRKTPASQGVILPIKSHEVHWETCRTVPFSQTITHEGCEKVVVQNNLCFGKCGSVHFPGAAQHSHTSCSHCLPAKFTTMHLPLNCTELSSVIKVVMLVEECQCKVKTEHEDGHILHAGSQDSFIPGVSA

SEQ ID NO: 2618 - protein, 64 aa, Homo sapiens
MLQEWLAAVGDDYAAVVWRPEGEPRFYPDEEGPKHWTKERHQFLMELKQEALTFARNWGADYIL

SEQ ID NO: 2619 - protein, 79 aa, Homo sapiens
MLQEWLAAVGDDYAAVVWRPEGEPRFYPDEEGPKHWTKERHQFLMELKQEALTFARNWGADYILFADTDNILTNNQTLR

SEQ ID NO: 2620 - protein, 109 aa, Homo sapiens
MLQEWLAAVGDDYAAVVWRPEGEPRFYPDEEGPKHWTKERHQFLMELKQEALTFARNWGADYILFADTDNILTNNQTLRLLMGQGLPVVAPMLDSQTYYSNFWCGITPQ

SEQ ID NO: 2621 - protein, 218 aa, Homo sapiens
MLQEWLAAVGDDYAAVVWRPEGEPRFYPDEEGPKHWTKERHQFLMELKQEALTFARNWGADYILFADTDNILTNNQTLRLLMGQGLPVVAPMLDSQTYYSNFWCGITPQGYYRRTAEYFPTKNRQRRGCFRVPMVHSTFLASLRAEGADQLAFYPPHPNYTWPFDDIIVFAYACQAAGVSVHVCNEHRYGYMNVPVKSHQGLEDERVNFIHLILEALG

SEQ ID NO: 2622 - protein, 517 aa, Homo sapiens
MLQEWLAAVGDDYAAVVWRPEGEPRFYPDEEGPKHWTKERHQFLMELKQEALTFARNWGADYILFADTDNILTNNQTLRLLMGQGLPVVAPMLDSQTYYSNFWCGITPQGYYRRTAEYFPTKNRQRRGCFRVPMVHSTFLASLRAEGADQLAFYPPHPNYTWPFDDIIVFAYACQAAGVSVHVCNEHRYGYMNVPVKSHQGLEDERVNFIHLILEALVDGPRMQASAHVTRPSKRPSKIGFDEVFVISLARRPDRRERMLASLWEMEISGRVVDAVDGWMLNSSAIRNLGVDLLPGYQDPYSGRTLTKGEVGCFLSHYSIWEEVVARGLARVLVFEDDVRFESNFRGRLERLMEDVEAEKLSWDLIYLGRKQVNPEKETAVEGLPGLVVAGYSYWTLAYALRLAGARKLLASQPLRRMLPVDEFLPIMFDQHPNEQYKAHFWPRDLVAFSAQPLLAAPTHYAGDAEWLSDTETSSPWDDDSGRLISWSGSQKTLRSPRLDLTGSSGHSLQPQPRDEL

SEQ ID NO: 2623 - protein, 517 aa, Homo sapiens [sequence omitted]

SEQ ID NO: 2624 - protein, 595 aa, Homo sapiens
MRAARAAPLLQLLLLLGPWLEAAGVAESPLPAVVLAILARNAEHSLPHYLGALERLDYPRARMALWCATDHNVDNTTEMLQEWLAAVGDDYAAVVWRPEGEPRFYPDEEGPKHWTKERHQFLMELKQEALTFARNWGADYILFADTDNILTNNQTLRLLMGQGLPVVAPMLDSQTYYSNFWCGITPQGYYRRTAEYFPTKNRQRRGCFRVPMVHSTFLASLRAEGADQLAFYPPHPNYTWPFDDIIVFAYACQAAGVSVHVCNEHRYGYMNVPVKSHQGLEDERVNFIHLILEALVDGPRMQASAHVTRPSKRPSKIGFDEVFVISLARRPDRRERMLASLWEMEISGRVVDAVDGWMLNSSAIRNLGVDLLPGYQDPYSGRTLTKGEVGCFLSHYSIWEEVVARGLARVLVFEDDVRFESNFRGRLERLMEDVEAEKLSWDLIYLGRKQVNPEKETAVEGLPGLVVAGYSYWTLAYALRLAGARKLLASQPLRRMLPVDEFLPIMFDQHPNEQYKAHFWPRDLVAFSAQPLLAAPTHYAGDAEWLSDTETSSPWDDDSGRLISWSGSQKTLRSPRLDLTGSSGHSLQPQPRDEL

SEQ ID NO: 2625 - protein, 155 aa, Homo sapiens
MTAKQCPGAGHYCPESRGGGCWQGLQILSDLATTLGMATLPSGPVFHREKPLRDGSHSLKVSQQRSRTPRPLYPAWPDSGPCGPQLVSSWADPRIPSLPKDSAEGPLCPFYLHLSTLPQLDVWVSPAPSSLAGAKYREVKQDPCRHVAQHTVGPQ

SEQ ID NO: 2626 - protein, 337 aa, Homo sapiens
MAAAGPAAGPTGPEPMPSYAQLVQRGWGSALAAARGCTDCGWGLARRGLAEHAHLAPPELLLLALGALGWTALRSAATARLFRPLAKRCCLQPRDAAKMPESAWKFLFYLGSWSYSAYLLFGTDYPFFHDPPSVFYDWTPGMAVPRDIAAAYLLQGSFYGHSIYATLYMDTWRKDSVVMLLHHVVTLILIVSSYAFRYHNVGILVLFLHDISDVQLEFTKLNIYFKSRGGSYHRLHALAADLGCLSFGFSWFWFRLYWFPLKVLYATSHCSLRTVPDIPFYFFFNALLLLLTLMNLYWFLYIVAFAAKVLTGQVHELKDLREYDTAEAQSLKPSKAE

SEQ ID NO: 2627 - protein, 350 aa, Homo sapiens
MAAAGPAAGPTGPEPMPSYAQLVQRGWGSALAAARGCTDCGWGLARRGLAEHAHLAPPELLLLALGALGWTALRSAATARLFRPLAKRCCLQPRDAAKMPESAWKFLFYLGSWSYSAYLLFGTDYPFFHDPPSVFYDWTPGMAVPRDIAAAYLLQGSFYGHSIYATLYMDTWRKDSVVMLLHHVVTLILIVSSYAFRYHNVGILVLFLHDISDVQLEFTKLNIYFKSRGGSYHRLHALAADLGCLSFGFSWFWFRLYWFPLKVLYATSHCSLRTVPDIPFYFFFNALLLLLTLMNLYWFLYIVAFAAKVLTGQVHELKDLREYDTAEAQSLKPSKAEKPLRNGLVKDKRF

SEQ ID NO: 2628 - protein, 239 aa, Homo sapiens
MPESAWKFLFYLGSWSYSAYLLFGTDYPFFHDPPSVFYDWTPGMAVPRDIAAAYLLQGSFYGHSIYATLYMDTWRKDSVVMLLHHVVTLILIVSSYAFRYHNVGILVLFLHDISDVQLEFTKLNIYFKSRGGSYHRLHALAADLGCLSFGFSWFWFRLYWFPLKVLYATSHCSLRTVPDIPFYFFFNALLLLLTLMNLYWFLYIVAFAAKVLTGQVHELKDLREYDTAEAQSLKPSKAE

SEQ ID NO: 2629 - protein, 372 aa, Homo sapiens
MPPPQQGPCGHHLLLLLALLLPSLPLTRAPVPPGPAAALLQALGLRDEPQGAPRLRPVPPVMWRLFRRRDPQETRSGSRRTSPGVTLQPCHVEELGVAGNIVRHIPDRGAPTRASEPASAAGHCPEWTVVFDLSAVEPAERPSRARLELRFAAAAAAAPEGGWELSVAQAGQGAGADPGPVLLRQLVPALGPPVRAELLGAAWARNASWPRSLRLALALRPRAPAACARLAEASLLLVTLDPRLCHPLARPRRDAEPVLGGGPGGACRARRLYVSFREVGWHRWVIAPRGFLANYCQGQCALPVALSGSGGPPALNHAVLRALMHAAAPGAADLPCCVPARLSPISVLFFDNSDNVVLRQYEDMVVDECGCR

SEQ ID NO: 2630 - protein, 216 aa, Homo sapiens
  SITE 1: note = misc_feature - Xaa can be any naturally occurring amino acid
XAAAYLLQGSFYGHSIYATLYMDTWRKDSVVMLLHHVVTLILIVSSYAFRYHNVGILVLFLHDISDVQLEFTKLNIYFKSRGGSYHRLHALAADLGCLSFGFSWFWFRLYWFPLKVLYATSHCSLRTVPDIPFYFFFNALLLLLTLMNLYWFLYIVAFAAKVLTGQVHELKDLREYDTAEAQSLKPSKAEEAVAQSSVTFFGTGGARCRHLTHPGL

SEQ ID NO: 2631 - protein, 44 aa, Homo sapiens
ERNFHTVPYMVGINKQEFGWLIPMMLEHPPTCMSFSTVQASHQT

SEQ ID NO: 2632 - protein, 131 aa, Homo sapiens
KELIPEATEKYLGGTDDTVKKKDLFLDLIADVMFGVPSVIVARNHREGASEEEIRLSKMVMKFWANFARNGNPNGEGLPHWPEYNQKEGYLQIGANTQAAQKLKDKEVAFWTNLFAKKAVEKPPQTEHIEL

SEQ ID NO: 2633 - protein, 568 aa, Homo sapiens
MWLRAFILATLSASAAWAGHPSSPPVVDTVHGKVLGKFVSLEGFAQPVAIFLGIPFAKPPLGPLRFTPPQPAEPWSFVKNATSYPPMCTQDPKAGQLLSELFTNRKENIPLKLSEDCLYLNIYTPADLTKKNRLPVMVWIHGGGLMVGAASTYDGLALAAHENVVVVTIQYRLGIWGFFSTGDEHSRGNWGHLDQVAALRWVQDNIASFGGNPGSVTIFGESAGGESVSVLVLSPLAKNLFHRAISESGVALTSVLVKKGDVKPLAEQIAITAGCKTTTSAVMVHCLRQKTEEELLETTLKMKFLSLDLQGDPRESQPLLGTVIDGMLLLKTPEELQAERNFHTVPYMVGINKQEFGWLIPMQLMSYPLSEGQLDQKTAMSLLWKSYPLVCIAKELIPEATEKYLGGTDDTVKKKDLFLDLIADVMFGVPSVIVARNHRDAGAPTYMYEFQYRPSFSSDMKPKTVIGDHGDELFSVFGAPFLKEGASEEEIRLSKMVMKFWANFARNGNPNGEGLPHWPEYNQKEGYLQIGANTQAAQKLKDKEVAFWTNLFAKKAVEKPPQTEHIEL

SEQ ID NO: 2634 - protein, 567 aa, Homo sapiens
MWLRAFILATLSASAAWGHPSSPPVVDTVHGKVLGKFVSLEGFAQPVAIFLGIPFAKPPLGPLRFTPPQPAEPWSFVKNATSYPPMCTQDPKAGQLLSELFTNRKENIPLKLSEDCLYLNIYTPADLTKKNRLPVMVWIHGGGLMVGAASTYDGLALAAHENVVVVTIQYRLGIWGFFSTGDEHSRGNWGHLDQVAALRWVQDNIASFGGNPGSVTIFGESAGGESVSVLVLSPLAKNLFHRAISESGVALTSVLVKKGDVKPLAEQIAITAGCKTTTSAVMVHCLRQKTEEELLETTLKMKFLSLDLQGDPRESQPLLGTVIDGMLLLKTPEELQAERNFHTVPYMVGINKQEFGWLIPMQLMSYPLSEGQLDQKTAMSLLWKSYPLVCIAKELIPEATEKYLGGTDDTVKKKDLFLDLIADVMFGVPSVIVARNHRDAGAPTYMYEFQYRPSFSSDMKPKTVIGDHGDELFSVFGAPFLKEGASEEEIRLSKMVMKFWANFARNGNPNGEGLPHWPEYNQKEGYLQIGANTQAAQKLKDKEVAFWTNLFAKKAVEKPPQTEHIEL

SEQ ID NO: 2635 - protein, 566 aa, Homo sapiens
MWLRAFILATLSASAAWGHPSSPPVVDTVHGKVLGKFVSLEGFAQPVAIFLGIPFAKPPLGPLRFTPPQPAEPWSFVKNATSYPPMCTQDPKAGQLLSELFTNRKENIPLKLSEDCLYLNIYTPADLTKKNRLPVMVWIHGGGLMVGAASTYDGLALAAHENVVVVTIQYRLGIWGFFSTGDEHSRGNWGHLDQVAALRWVQDNIASFGGNPGSVTIFGESAGGESVSVLVLSPLAKNLFHRAISESGVALTSVLVKKGDVKPLAEQIAITAGCKTTTSAVMVHCLRQKTEEELLETTLKMKFLSLDLQGDPRESQPLLGTVIDGMLLLKTPEELQAERNFHTVPYMVGINKQEFGWLIPMLMSYPLSEGQLDQKTAMSLLWKSYPLVCIAKELIPEATEKYLGGTDDTVKKKDLFLDLIADVMFGVPSVIVARNHRDAGAPTYMYEFQYRPSFSSDMKPKTVIGDHGDELFSVFGAPFLKEGASEEEIRLSKMVMKFWANFARNGNPNGEGLPHWPEYNQKEGYLQIGANTQAAQKLKDKEVAFWTNLFAKKAVEKPPQTEHIEL

SEQ ID NO: 2636 - protein, 84 aa, Homo sapiens
  SITE 1: note = misc_feature - Xaa can be any naturally occurring amino acid
XRQKTEEELLETTLKMKFLSLDLQGDPRESQPLLGTVIDGMLLLKTPEELQAERNFHTVPYMVGINKQEFGWLIPMGTADISVY

SEQ ID NO: 2637 - protein, 210 aa, Homo sapiens
MEQMSREDMLAISTPVLTSLDVPPEMMPTVIDEYLGSNSDAQAKCQAFQEFMGDVFINVPTVSFSRYLRDSGSPVFFYEFQHRPSSFAKIKPAWVKADHGAEGAFVFGGPFLMDESSRLAFPEATEEEKQLSLTMMAQWTHFARTGDPNSKALPPWPQFNQAEQYLEINPVPRAGQKFREAWMQFWSETLPSKIQQWHQKQKNRKAQEDL

SEQ ID NO: 2638 - protein, 571 aa, Homo sapiens
MERAVRVESGVLVGVVCLLLACPATATGPEVAQPEVDTTLGRVRGRQVGVKGTDRLVNVFLGIPFAQPPLGPDRFSAPHPAQPWEGVRDASTAPPMCLQDVESMNSSRFVLNGKQQIFSVSEDCLVLNVYSPAEVPAGSGRPVMVWVHGGALITGAATSYDGSALAAYGDVVVVTVQYRLGVLGFFSTGDEHAPGNQGFLDVVAALRWVQENIAPFGGDLNCVTVFGGSAGGSIISGLVLSPVAAGLFHRAITQSGVITTPGIIDSHPWPLAQKIANTLACSSSSPAEMVQCLQQKEGEELVLSKKLKNTIYPLTVDGTVFPKSPKELLKEKPFHSVPFLMGVNNHEFSWLIPRGWGLLDTMEQMSREDMLAISTPVLTSLDVPPEMMPTVIDEYLGSNSDAQAKCQAFQEFMGDVFINVPTVSFSRYLRDSGSPVFFYEFQHRPSSFAKIKPAWVKADHGAEGAFVFGGPFLMDESSRLAFPEATEEEKQLSLTMMAQWTHFARTGDPNSKALPPWPQFNQAEQYLEINPVPRAGQKFREAWMQFWSETLPSKIQQWHQKQKNRKAQEDL

SEQ ID NO: 2639 - protein, 568 aa, Homo sapiens
MERAVRVESGVLVGVVCLLLACPATATGPEVAQPEVDTTLGRVRGRQVGVKGTDRLVNVFLGIPFAQPPLGPDRFSAPHPAQPWEGVRDASTAPPMCLQDVESMNSSRFVLNGKQQIFSVSEDCLVLNVYSPAEVPAGSGRPVMVWVHGGALITGAATSYDGSALAAYGDVVVVTVQYRLGVLGFFSTGDEHAPGNQGFLDVVAALRWVQENIAPFGGDLNCVTVFGGSAGGSIISGLVLSPVAAGLFHRAITQSGVITTPGIIDSHPWPLAQKIANTLACSSSSPAEMVQCLQQKEGEELVLSKKLKNTIYPLTVDGTVFPKSPKELLKEKPFHSVPFLMGVNNHEFSWLIPRGWGLLDTMEQMSREDMLAISTPVLTSLDVPPEMMPTVIDEYLGSNSDAQAKCQAFQEFMGDVFINVPTVSFSRYLRDSGSPVFFYEFQHRPSSFAKIKPAWVKADHGAEGAFVFGGPFLMDESSRLEATEEEKQLSLTMMAQWTHFARTGDPNSKALPPWPQFNQAEQYLEINPVPRAGQKFREAWMQFWSETLPSKIQQWHQKQKNRKAQEDL

SEQ ID NO: 2640 - protein, 379 aa, Homo sapiens
MERAVRVESGVLVGVVCLLLACPATATGPEVAQPEVDTTLGRVRGRQVGVKGTDRLVNVFLGIPFAQPPLGPDRFSAPHPAQPWEGVRDASTAPPMCLQDVESMNSSRFVLNGKQQIFSVSEDCLVLNVYSPAEVPAGSGRPVMVWVHGGALITGAATSYDGSALAAYGDVVVVTVQYRLGVLGFFSTGDEHAPGNQGFLDVVAALRWVQENIAPFGGDLNCVTVFGGSAGGSIISGLVLSPVAAGLFHRAITQSGVITTPGIIDSHPWPLAQKIANTLACSSSSPAEMVQCLQQKEGEELVLSKKLKNTIYPLTVDGTVFPKSPKELLKEKPFHSVPFLMGVNNHEFSWLIPRILEALSFSMSSSIDPVLLRRSNLPG

SEQ ID NO: 2641 - protein, 40 aa, Homo sapiens
MERAVRVESGVLVGVVCLLLACPATATGYQDAVWARSCSA

SEQ ID NO: 2642 - protein, 454 aa, Homo sapiens
GKQMHVGKTPIQVFLGVPFSRPPLGILRFAPPEPPEPWKGIRDATTYPPGCLQESWGQLASMYVSTRERYKWLRFSEDCLYLNVYAPARAPGDPQLPVMVWFPGGAFIVGAASSYEGSDLAAREKVVLVFLQHRLGIFGFLSTDDSHARGNWGLLDQMAALRWVQENIAAFGGDPGNVTLFGQSAGAMSISGLMMSPLASGLFHRAISQSGTALFRLFITSNPLKVAKKVAHLAGCNHNSTQILVNCLRALSGTKVMRVSNKMRFLQLNFQRDPEEIIWSMSPVVDGVVIPDDPLVLLTQGKVSSVPYLLGVNNLEFNWLLPYNITKEQVPLVVEEYLDNVNEHDWKMLRNRMMDIVQDATFVYATLQTAHYHRGLSMGKEKALSLQMMKYWANFARTGNPNDGNLPCWPRYNKDEKYLQLDFTTRVGMKLKEKKMAFWMSLYQSQRPEKQRQF

SEQ ID NO: 2643 - protein, 468 aa, Homo sapiens
MRWILCWSLTLCLMAQTALGALHTKRPQVVTKYGTLQGKQMHVGKTPIQVFLGVPFSRPPLGILRFAPPEPPEPWKGIRDATTYPPGCLQESWGQLASMYVSTRERYKWLRFSEDCLYLNVYAPARAPGDPQLPVMVWFPGGAFIVGAASSYEGSDLAAREKVVLVFLQHRLGIFGFLSTDDSHARGNWGLLDQMAALRWVQENIAAFGGDPGNVTLFGQSAGAMSISGLMMSPLASGLFHRAISQSGTALFRLFITSNPLKVAKKVAHLAGCNHNSTQILVNCLRALSGTKVMRVSNKMRFLQLNFQRDPEEIIWSMSPVVDGVVIPDDPLVLLTQGKVSSVPYLLGVNNLEFNWLLPYIMKFPLNRQAMRKETITKMLWSTRTLLNITKEQVPLVVEEYLDNVNEHDWKMLRNRMMDIVQDATFVYATLQTAHYHRETPMMGICPAGHATTRMKSTCSWILPQEWA

SEQ ID NO: 2644 - protein, 374 aa, Homo sapiens
MYVSTRERYKWLRFSEDCLYLNVYAPARAPGDPQLPVMVWFPGGAFIVGAASSYEGSDLAAREKVVLVFLQHRLGIFGFLRWRGRTDDSHARGNWGLLDQMAALRWVQENIAAFGGDPGNVTLFGQSAGAMSISGLMMSPLASGLFHRAISQSGTALFRLFITSNPLKVAKKVAHLAGCNHNSTQILVNCLRALSGTKVMRVSNKMRFLQLNFQRDPEEIIWSMSPVVDGVVIPDDPLVLLTQGKVSSVPYLLGVNNLEFNWLLPYIMKFPLNRQAMRKETITKMLWSTRTLLNITKEQVPLVVEEYLDNVNEHDWKMLRNRMMDIVQDATFVYATLQTAHYHRETPMMGICPAGHATTRMKSTCSWILPQEWA

SEQ ID NO: 2645 - protein, 135 aa, Homo sapiens
MYVSTRERYKWLRFSEDCLYLNVYAPARAPGDPQLPVMVWFPGGAFIVGAASSYEGSDLAAREKVVLVFLQHRLGIFGFLRWRGRYPLGPQLWPERRGLARTTATRAGTGGCWTRWRLCAGCRRTSQPSGETQEM

SEQ ID NO: 2646 - protein, 463 aa, Homo sapiens
MYVSTRERYKWLRFSEDCLYLNVYAPARAPGDPQLPVMVWFPGGAFIVGAASSYEGSDLAAREKVVLVFLQHRLGIFGFLSTDDSHARGNWGLLDQMAALRWVQENIAAFGGDPGNVTLFGQSAGAMSISGLMMSPLASGLFHRAISQSGTALFRLFITSNPLKVAKKVAHLAGCNHNSTQILVNCLRALSGTKVMRVSNKMRFLQLNFQRDPEEIIWSMSPVVDGVVIPDDPLVLLTQGKVSSVPYLLGVNNLEFNWLLPYIMKFPLNRQAMRKETITKMLWSTRTLLNITKEQVPLVVEEYLDNVNEHDWKMLRNRMMDIVQDATFVYATLQTAHYHRDAGLPVYLYEFEHHARGIIVKPRTDGADHGDEMYFLFGGPFATGLSMGKEKALSLQMMKYWANFARTGNPNDGNLPCWPRYNKDEKYLQLDFTTRVGMKLKEKKMAFWMSLYQSQRPEKQRQF

SEQ ID NO: 2647 - protein, 177 aa, Homo sapiens
  SITE 1: note = misc_feature - Xaa can be any naturally occurring amino acid
XALHTKRPQVVTKYGTLQGKQMHVGKTPIQVFLGVPFSRPPLGILRFAPPEPPEPWKGIRDATTYPPGWSLALSPGWSAVARSRLTATSASRVQASLLPQPLSIWGYRCLQESWGQLASMYVSTRERYKWLRFSEDCLYLNVYAPARAPGDPQLPVSDGLVPGRRLHRGRCFFVRGL

SEQ ID NO: 2648 - protein, 604 aa, Homo sapiens
MAVLVCPASCHGLKEFRIRRGMWRLCLVYYFYPASSTLYVLRIDVLNYTSKDEGPSAEGPQRNTRLGWIQGKQVTVLGSPVPVNVFLGVPFAAPPLGSLRFTNPQPASPWDNLREATSYPNLCLQNSEWLLLDQHMLKVHYPKFGVSEDCLYLNIYAPAHADTGSKLPVLVWFPGGAFKTGSASIFDGSALAAYEDVLVVVVQYRLGIFGFFTTWDQHAPGNWAFKDQVAALSWVQKNIEFFGGDPSSVTIFGESAGAISVSSLILSPMAKGLFHKAIMESGVAIIPYLEAHDYEKSEDLQVVAHFCGNNASDSEALLRCLRTKPSKELLTLSQKTKSFTRVVDGAFFPNEPLDLLSQKAFKAIPSIIGVNNHECGFLLPMKEAPEILSGSNKSLALHLIQNILHIPPQYLHLVANEYFHDKHSLTEIRDSLLDLLGDVFFVVPALITARYHRDAGAPVYFYEFRHRPQCFEDTKPAFVKADHADEVRFVFGGAFLKGDIVMFEGATEEEKLLSRKMMKYWATFARTGNPNGNDLSLWPAYNLTEQYLQLDLNMSLGQRLKEPRVDFWTSTIPLILSASDMLHSPLSSLTFLSLLQPFFFFCAP

SEQ ID NO: 2649 - protein, 355 aa, Homo sapiens
MEDDLSWRSWSLLCMEILSPMAKGLFHKAIMESGVAIIPYLEAHDYEKSEDLQVVAHFCGNNASDSEALLRCLRTKPSKELLTLSQKTKSFTRVVDGAFFPNEPLDLLSQKAFKAIPSIIGVNNHECGFLLPMEAPEILSGSNKSLALHLIQNILHIPPQYLHLVANEYFHDKHSLTEIRDSLLDLLGDVFFVVPALITARYHRDAGAPVYFYEFRHRPQCFEDTKPAFVKADHADEVRFVFGGAFLKGDIVMFEGATEEEKLLSRKMMKYWATFARTGNPNGNDLSLWPAYNLTEQYLQLDLNMSLGQRLKEPRVDFWTSTIPLILSASDMLHSPLSSLTFLSLLQPFFFFCAP

SEQ ID NO: 2650 - protein, 75 aa, Homo sapiens
MLKVHYPKFGVSEDCLYLNIYAPAHADTGSKLPVLVWFPGGAFKTGSASIFDGSALAAYEDVLVVVVQYRLGIFG

SEQ ID NO: 2651 - protein, 78 aa, Homo sapiens
MLKVHYPKFGVSEDCLYLNIYAPAHADTGSKLPVLVWFPGGAFKTGSASIFDGSALAAYEDVLVVVVQYRLGIFGFFT

SEQ ID NO: 2652 - protein, 469 aa, Homo sapiens
MLKVHYPKFGVSEDCLYLNIYAPAHADTGSKLPVLVWFPGGAFKTGSASIFDGSALAAYEDVLVVVVQYRLGIFGFFTTWDQHAPGNWAFKDQVAALSWVQKNIEFFGGDPSSVTIFGESAGAISVSSLILSPMAKGLFHKAIMESGVAIIPYLEAHDYEKSEDLQVVAHFCGNNASDSEALLRCLRTKPSKELLTLSQKTKSFTRVVDGAFFPNEPLDLLSQKAFKAIPSIIGVNNHECGFLLPMKEAPEILSGSNKSLALHLIQNILHIPPQYLHLVANEYFHDKHSLTEIRDSLLDLLGDVFFVVPALITARYHRDAGAPVYFYEFRHRPQCFEDTKPAFVKADHADEVRFVFGGAFLKGDIVMFEGATEEEKLLSRKMMKYWATFARTGNPNGNDLSLWPAYNLTEQYLQLDLNMSLGQRLKEPRVDFWTSTIPLILSASDMLHSPLSSLTFLSLLQPFFFFCAP

SEQ ID NO: 2653 - protein, 575 aa, Homo sapiens
MSGNWVHPGQILIWAIWVLAAPTKGPSAEGPQRNTRLGWIQGKQVTVLGSPVPVNVFLGVPFAAPPLGSLRFTNPQPASPWDNLREATSYPNLCLQNSEWLLLDQHMLKVHYPKFGVSEDCLYLNIYAPAHADTGSKLPVLVWFPGGAFKTGSASIFDGSALAAYEDVLVVVVQYRLGIFGFFTTWDQHAPGNWAFKDQVAALSWVQKNIEFFGGDPSSVTIFGESAGAISVSSLILSPMAKGLFHKAIMESGVAIIPYLEAHDYEKSEDLQVVAHFCGNNASDSEALLRCLRTKPSKELLTLSQKTKSFTRVVDGAFFPNEPLDLLSQKAFKAIPSIIGVNNHECGFLLPMKEAPEILSGSNKSLALHLIQNILHIPPQYLHLVANEYFHDKHSLTEIRDSLLDLLGDVFFVVPALITARYHRDAGAPVYFYEFRHRPQCFEDTKPAFVKADHADEVRFVFGGAFLKGDIVMFEGATEEEKLLSRKMMKYWATFARTGNPNGNDLSLWPAYNLTEQYLQLDLNMSLGQRLKEPRVDFWTSTIPLILSASDMLHSPLSSLTFLSLLQPFFFFCAP

SEQ ID NO: 2654 - protein, 525 aa, Homo sapiens
MSGNWVHPGQILIWAIWVLAAPTKGPSAEGPQRNTRLGWIQGKQVTVLGSPVPVNVFLGVPFAAPPLGSLRFTNPQPASPWDNLREATSYPNLCLQNSEWLLLDQHMLKVHYPKFGVSEDCLYLNIYAPAHADTGSKLPVLVWFPGGAFKTGSASIFDGSALAAYEDVLVVVVQYRLGIFGFFTTWDQHAPGNWAFKDQVAALSWVQKNIEFFGGDPSSVTIFGESAGAISVSSLILSPMAKGLFHKAIMESGVAIIPYLEAHDYEKSEDLQVVAHFCGNNASDSEALLRCLRTKPSKELLTLSQKTKSFTRVVDGAFFPNEPLDLLSQKAFKAIPSIIGVNNHECGFLLPMKEAPEILSGSNKSLALHLIQNILHIPPQYLHLVANEYFHDKHSLTEIRDSLLDLLGDVFFVVPALITARYHREGATEEEKLLSRKMMKYWATFARTGNPNGNDLSLWPAYNLTEQYLQLDLNMSLGQRLKEPRVDFWTSTIPLILSASDMLHSPLSSLTFLSLLQPFFFFCAP

SEQ ID NO: 2655 - protein, 545 aa, Homo sapiens
MSGNWVHPGQILIWAIWVLAAPTKGPSAEGPQRNTRLGWIQGKQVTVLGSPVPVNVFLGVPFAAPPLGSLRFTNPQPASPWDNLREATSYPNLCLQNSEWLLLDQHMLKVLVWFPGGAFKTGSASIFDGSALAAYEDVLVVVVQYRLGIFGFFTTWDQHAPGNWAFKDQVAALSWVQKNIEFFGGDPSSVTIFGESAGAISVSSLILSPMAKGLFHKAIMESGVAIIPYLEAHDYEKSEDLQVVAHFCGNNASDSEALLRCLRTKPSKELLTLSQKTKSFTRVVDGAFFPNEPLDLLSQKAFKAIPSIIGVNNHECGFLLPMKEAPEILSGSNKSLALHLIQNILHIPPQYLHLVANEYFHDKHSLTEIRDSLLDLLGDVFFVVPALITARYHRDAGAPVYFYEFRHRPQCFEDTKPAFVKADHADEVRFVFGGAFLKGDIVMFEGATEEEKLLSRKMMKYWATFARTGNPNGNDLSLWPAYNLTEQYLQLDLNMSLGQRLKEPRVDFWTSTIPLILSASDMLHSPLSSLTFLSLLQPFFFFCAP

SEQ ID NO: 2656 - protein, 433 aa, Homo sapiens
MLAATVLTLALLGNAHACSKGTSHEAGIVCRITKPALLVLNHETAKVIQTAFQRASYPDITGEKAMMLLGQVKYGLHNIQISHLSIASSQVELVEAKSIDVSIQNVSVVFKGTLKYGYTTAWWLGIDQSIDFEIDSAIDLQINTQLTCDSGRVRTDAPDCYLSFHKLLLHLQGEREPGWIKQLFTNFISFTLKLVLKGQICKEINVISNIMADFVQTRAASILSDGDIGVDISLTGDPVITASYLESHHKAVLETWGFNTNQEIFQEVVGGFPSQAQVTVHCLKMPKISCQNKGVVVNSSVMVKFLFPRPDQQHSVAYTFEEDIVTTVQASYSKKKLFLSLLDFQITPKTVSNLTESSSESVQSFLQSMITAVGIPEVMSRLEVVFTALMNSKGVSLFDIINPEIITRDGFLLLQMDFGFPEHLLVDFLQSLS

SEQ ID NO: 2657 - protein, 493 aa, Homo sapiens [sequence omitted]

SEQ ID NO: 2658 - protein, 428 aa, Homo sapiens
MMLLGQVKYGLHNIQISHLSIASSQVELVEAKSIDVSIQNVSVVFKGTLKYGYTTAWWLGIDQSIDFEIDSAIDLQINTQLTCDSGRVRTDAPDCYLSFHKLLLHLQGEREPGWIKQLFTNFISFTLKLVLKGQICKEINVISNIMADFVQTRAASILSDGDIGVDISLTGDPVITASYLESHHKGHFIYKNVSEDLPLPTFSPTLLGDSRMLYFWFSERVFHSLAKVAFQDGRLMLSLMGDEFKAVLETWGFNTNQEIFQEVVGGFPSQAQVTVHCLKMPKISCQNKGVVVNSSVMVKFLFPRPDQQHSVAYTFEEDIVTTVQASYSKKKLFLSLLDFQITPKTVSNLTESSSESVQSFLQSMITAVGIPEVMSRLEVVFTALMNSKGVSLFDIINPEIITRDGFLLLQMDFGFPEHLLVDFLQSLS

SEQ ID NO: 2659 - protein, 784 aa, Homo sapiens
METAIWRRSYISLISSERPVHNWRGKSVQKKQAESKSQIKLHTQSAPFGLCPKDMMLTQAPSSVVRSRNSRNHTVNSGGSCLSASTVAIPAINDSSAAMSACSTISAQPASSMDTQMHSPKKQERVNKRVIWGIEVAEELHWKGWELGKETTRNLVLKNRSLKLQKMKYRPPKTKFFFTVIPQPIFLSPGITLTLPIVFRPLEAKEYMDQLWFEKAEGMFCVGLRATLPCHRLICRPPSLQLPMCAVGDTTEAFFCLDNVGDLPTFFTWEFSSPFQMLPATGLLEPGQASQIKVTFQPLTAVIYEVQATCWYGAGSRQRSSIQLQAVAKCAQLLVSIKHKCPEDQDAEGFQKLLYFGSVAVGCTSERQIRLHNPSAVNAPFRIEISPDELAEDQAFSCPTAHGIVLPGEKKCVSVFFHPKTLDTRTVDYCSIMPSGCASKTLLKVVGFCRGPAVSLQHYCVNFSWVNLGERSEQPLWIENQSDCTAHFQFAIDCLESVFTIRPAFGTLVGKARMTLHCAFQPTHPIICFRRVACLIHHQDPLFLDLMGTCHSDSTKPAILKPQHLTWYRTHLARGLTLYPPDILDAMLKEKKLAQDQNGALMIPIQDLEDMPAPQYPYIPPMTEFFFDGTSDITIFPPPISVEPVEVDFGACPGPEAPNPVPLCLMNHTKGKIMVVWTRRSDCPFWVTPESCDVPPLKSMAMRLHFQPPHPNCLYTVELEAFAIYKVCARNEREECGVSARSLSGLVGWQEVTEGSFRLHPLRARLSLGWTVTPMSLSPPKLLA

SEQ ID NO: 2660 - protein, 234 aa, Homo sapiens
METAIWRRSYISLISSERPVHNWRGKSVQKKQAESKSQIKLHTQSAPFGLCPKDMMLTQAPSSVVRSRNSRNHTVNSGGSCLSASTVAIPAINDSSAAMSACSTISAQPASSMDTQMHSPKKQERVNKRVIWGIEVAEELHWKGWELGKETTRNLVLKNRSLKLQKMKYRPPKTKFFFTVIPQPIFLSPGITLTLPIVFRPLEAPLTAVIYEVQATCWYGAGSRQRSSIQLQAV

SEQ ID NO: 2661 - protein, 1925 aa, Homo sapiens
MFTLTGCRLVEKTQKVENPSVSFASSFPLIPLLLRGKSVQKKQAESKSQIKLHTQSAPFGLCPKDMMLTQAPSSVVRSRNSRNHTVNSGGSCLSASTVAIPAINDSSAAMSACSTISAQPASSMDTQMHSPKKQERVNKRVIWGIEVAEELHWKGWELGKETTRNLVLKNRSLKLQKMKYRPPKTKFFFTVIPQPIFLSPGITLTLPIVFRPLEAKEYMDQLWFEKAEGMFCVGLRATLPCHRLICRPPSLQLPMCAVGDTTEAFFCLDNVGDLPTFFTWEFSSPFQMLPATGLLEPGQASQIKVTFQPLTAVIYEVQATCWYGAGSRQRSSIQLQAVAKCAQLLVSIKHKCPEDQDAEGFQKLLYFGSVAVGCTSERQIRLHNPSAVNAPFRIEISPDELAEDQAFSCPTAHGIVLPGEKKCVSVFFHPKTLDTRTVDYCSIMPSGCASKTLLKVVGFCRGPAVSLQHYCVNFSWVNLGERSEQPLWIENQSDCTAHFQFAIDCLESVFTIRPAFGTLVGKARMTLHCAFQPTHPIICFRRVACLIHHQDPLFLDLMGTCHSDSTKPAILKPQHLTWYRTHLARGLTLYPPDILDAMLKEKKLAQDQNGALMIPIQDLEDMPAPQYPYIPPMTEFFFDGTSDITIFPPPISVEPVEVDFGACPGPEAPNPVPLCLMNHTKGKIMVVWTRRSDCPFWVTPESCDVPPLKSMAMRLHFQPPHPNCLYTVELEAFAIYKVLQSYSNIEEDCTMCPSWCLTVRARGHSYFAGFEHHIPQYSLDVPKLFPAVSSGEPTYRSLLLVNKDCKLLTFSLAPQRGSDVILRPTSGLVAPGAHQIILICTYPEGSSWKQHTFYLQCNASPQYLKEVSMYSREEPLQLKLDTHKSLYFKPTWVGCSSTSPFTFRNPSRLPLQFEWRVSEQHRKLLAVQPSRGLIQPNERLTLTWTFSPLEETKYLFQVGMWVWEAGLSPNANPAATTHYMLRLVGVGLTSSLSAKEKELAFGNVLVNSKQSRFLVLLNDGNCTLYYRLYLEQGSPEAVDNHPLALQLDRTEGSMPPRSQDTICLTACPKQRSQYSWTITYSLLSHRDNKAGEKQELCCVSLVAVYPLLSILDVSSMGSAEGITRKHLWRLFSLDLLNSYLERDPTPCELTYKVPTRHSMSQIPPVLTPLRLDFNFGAAPFKAPPSVVFLALKNSGVVSLDWAFLLPSDQRIDVELWAEQAELNSTELHQMRVQDNCLFSISPKAGSLSPGQEQMVELKYSHLFIGTDHLPVLFKVSHGREILLNFIGVTVKPEQKYVHFTSTTHQFIPIPIGDTLPPRQIYELYNGGSVPVTYEVQTDVLSQVQEKNFDHPIFCCLNPKGEIQPGSTARVLWIFSPIEAKTYTVDVPIHILGWNSALIHFQGVGYNPHMMGDTAPFHNISSWDNSSIHSRLVVPGQNVFLSQSHISLGNIPVQSKCSRLLFLNNISKNEEIAFSWQPSPLDFGEVSVSPMIGVVAPEETVPFVVTLRASVHASFYSADLVCKLYSQQLMRQYHKELQEWKDEKVRQEVEFTITDMKVKKRTCCTACEPARKYKTLPPIKNQQSVSRPASWKLQTPKEEVSWPCPQPPSPGMLCLGLTARAHATDYFLANFFSEFPCHFLHRELPKRKAPREESETSEEKSPNKWGPVSKQKKQLLVDILTTIIRGLLEDKNFHEAVDQSLVEQVPYFRQFWNEQSTKFMDQKNSLYLMPILPVPSSSWEDGKGKQPKEDRPEHYPGLGKKEEGEEEKGEEEEEELEEEEEEEEETEEEELGKEEIEEKEEERDEKEEKVSWAGIGPTPQPESQESMQWQWQQQLNVMVKEEQEQDEKEAIRRLPAFANLQEALLENMIQNILVEASRGEVVLTSRPRVIALPPFCVPRSLTPDTLLPTQQAEVLHPVVPLPTDLP

SEQ ID NO: 2662 - protein, 1925 aa, Homo sapiens; identical to SEQ ID NO: 2661

SEQ ID NO: 2663 - protein, 114 aa, Homo sapiens
MMLTQAPSSVVRSRNSRNHTVNSGGSCLSASTVAIPAINDSSAAMSACSTISAQPASSMDTQMHSPKKQERVNKRVIWGIEVAEELHWKGWELGKETTRNLVLKNRSLKLQKMK

SEQ ID NO: 2664 - protein, 117 aa, Homo sapiens
MMLTQAPSSVVRSRNSRNHTVNSGGSCLSASTVAIPAINDSSAAMSACSTISAQPASSMDTQMHSPKKQERVNKRVIWGIEVAEELHWKGWELGKETTRNLVLKNRSLKLQKMKYRP

SEQ ID NO: 2665 - protein, 730 aa, Homo sapiens
MMLTQAPSSVVRSRNSRNHTVNSGGSCLSASTVAIPAINDSSAAMSACSTISAQPASSMDTQMHSPKKQERVNKRVIWGIEVAEELHWKGWELGKETTRNLVLKNRSLKLQKMKYRPPKTKFFFTVIPQPIFLSPGITLTLPIVFRPLEAKEYMDQLWFEKAEGMFCVGLRATLPCHRLICRPPSLQLPMCAVGDTTEAFFCLDNVGDLPTFFTWEFSSPFQMLPATGLLEPGQASQIKVTFQPLTAVIYEVQATCWYGAGSRQRSSIQLQAVAKCAQLLVSIKHKCPEDQDAEGFQKLLYFGSVAVGCTSERQIRLHNPSAVNAPFRIEISPDELAEDQAFSCPTAHGIVLPGEKKCVSVFFHPKTLDTRTVDYCSIMPSGCASKTLLKVVGFCRGPAVSLQHYCVNFSWVNLGERSEQPLWIENQSDCTAHFQFAIDCLESVFTIRPAFGTLVGKARMTLHCAFQPTHPIICFRRVACLIHHQDPLFLDLMGTCHSDSTKPAILKPQHLTWYRTHLARGLTLYPPDILDAMLKEKKLAQDQNGALMIPIQDLEDMPAPQYPYIPPMTEFFFDGTSDITIFPPPISVEPVEVDFGACPGPEAPNPVPLCLMNHTKGKIMVVWTRRSDCPFWVTPESCDVPPLKSMAMRLHFQPPHPNCLYTVELEAFAIYKVCARNEREECGVSARSLSGLVGWQEVTEGSFRLHPLRARLSLGWTVTPMSLSPPKLLA

SEQ ID NO: 2666 - protein, 164 aa, Homo sapiens
MMLTQAPSSVVRSRNSRNHTVNSGGSCLSASTVAIPAINDSSAAMSACSTISAQPASSMDTQMHSPKKQERVNKRVIWGIEVAEELHWKGWELGKETTRNLVLKNRSLKLQKMKYRYQYKGSRTQCHSLEPRKQALFKTKQNKQKKPLTCHIKASECLKYVQYE

SEQ ID NO: 2667 - protein, 271 aa, Homo sapiens
MTLHCAFQPTHPIICFRRVACLIHHQDPLFLDLMGTCHSDSTKPAILKPQHLTWYRTHLARGLTLYPPDILDAMLKEKKLAQDQNGALMIPIQDLEDMPAPQYPYIPPMTEFFFDGTSDITIFPPPISVEPVEVDFGACPGPEAPNPVPLCLMNHTKGKIMVVWTRRSDCPFWVTPESCDVPPLKSMAMRLHFQPPHPNCLYTVELEAFAIYKVCARNEREECGVSARSLSGLVGWQEVTEGSFRLHPLRARLSLGWTVTPMSLSPPKLLA

SEQ ID NO: 2668 - protein, 127 aa, Homo sapiens
  SITE 1: note = misc_feature - Xaa can be any naturally occurring amino acid
XKQELCCVSLVAVYPLLSILDVSSMGSAEGITRKHLWRLFSLDLLNSYLERDPTPCELTYKVPTRHSMSQIPPVLTPLRLDFNFGAAPFKAPPSVVFLALKNSGVVSLDWYGLKGATGGPGRQVPRG

SEQ ID NO: 2669 - protein, 144 aa, Homo sapiens
MGSNLSPQLCLMPFILGLLSGGVTTTPWSLARPQGSCSLEGVEIKGGSFRLLQEGQALEYVCPSGFYPYPVQTRTCRSTGSWSTLKTQDQKTVRKAECRAIHCPRPHDFENGEYWPRSPYYNVSDEISFHCYDGYTLRGSANRT

SEQ ID NO: 2670 - protein, 764 aa, Homo sapiens
MGSNLSPQLCLMPFILGLLSGGVTTTPWSLARPQGSCSLEGVEIKGGSFRLLQEGQALEYVCPSGFYPYPVQTRTCRSTGSWSTLKTQDQKTVRKAECRAIHCPRPHDFENGEYWPRSPYYNVSDEISFHCYDGYTLRGSANRTCQVNGRWSGQTAICDNGAGYCSNPGIPIGTRKVGSQYRLEDSVTYHCSRGLTLRGSQRRTCQEGGSWSGTEPSCQDSFMYDTPQEVAEAFLSSLTETIEGVDAEDGHGPGEQQKRKIVLDPSGSMNIYLVLDGSDSIGASNFTGAKKCLVNLIEKVASYGVKPRYGLVTYATYPKIWVKVSEADSSNADWVTKQLNEINYEDHKLKSGTNTKKALQAVYSMMSWPDDVPPEGWNRTRHVIILMTDGLHNMGGDPITVIDEIRDLLYIGKDRKNPREDYLDVYVFGVGPLVNQVNINALASKKDNEQHVFKVKDMENLEDVFYQMIDESQSLSLCGMVWEHRKGTDYHKQPWQAKISVIRPSKGHESCMGAVVSEYFVLTAAHCFTVDDKEHSIKVSVGGEKRDLEIEVVLFHPNYNINGKKEAGIPEFYDYDVALIKLKNKLKYGQTIRPICLPCTEGTTRALRLPPTTTCQQQKEELLPAQDIKALFVSEEEKKLTRKEVYIKNGDKKGSCERDAQYAPGYDKVKDISEVVTPRFLCTGGVSPYADPNTCRGDSGGPLIVHKRSRFIQVGVISWGVVDVCKNQKRQKQVPAHARDFHINLFQVLPWLKEKLQDEDLGFL

SEQ ID NO: 2671 - protein, 86 aa, Homo sapiens
MGSNLSPQLCLMPFILGLLSGVRVSFWLLPVPCADTYLQIYGVLEHPEDSRPKDCQEGRVQSNPLSKTTRLRERGILAPVSLLQCE

SEQ ID NO: 2672 - protein, 305 aa, Homo sapiens
  SITE 1: note = misc_feature - Xaa can be any naturally occurring amino acid
XDGLHNMGGDPITVIDEIRDLLYIGKDRKNPREDYLDVYVFGVGPLVNQVNINALASKKDNEQHVFKVKDMENLEDVFYQMIGGEKRDLEIEVVLFHPNYNINGKKEAGIPEFYDYDVALIKLKNKLKYGQTIRPICLPCTEGTTRALRLPPTTTCQQQKEELLPAQDIKALFVSEEEKKLTRKEVYIKNGDKKGSCERDAQYAPGYDKVKDISEVVTPRFLCTGGVSPYADPNTCRGDSGGPLIVHKRSRFIQVGVISWGVVDVCKNQKRQKQVPAHARDFHINLFQVLPWLKEKLQDEDLGFL

SEQ ID NO: 2673 - protein, 68 aa, Homo sapiens
  SITE 1: note = misc_feature - Xaa can be any naturally occurring amino acid
XPRFLCTGGVSPYADPNTCRGDSGGPLIVHKRSRFIQVSPPFPIWGDAKWSAWAPKQESSMHVASNSR

SEQ ID NO: 2674 - protein, 148 aa, Homo sapiens
MTWRHHVRLLFTVSLALQIINLGNSYQREKHNGGREEVTKVATQKHRQSPLNWTSSHFGEVTGSAEGWGPEEPLPYSRAFGEDPKDFLASHAHGPSAGGAPSLLLLLPCALLHRLLRPDAPAHPRSLVPSVLQRERRPCGRPGLGHRL

SEQ ID NO: 2675 - protein, 223 aa, Homo sapiens
MTWRHHVRLLFTVSLALQIINLGNSYQREKHNGGREEVTKVATQKHRQSPLNWTSSHFGEVTGSAEGWGPEEPLPYSRAFGEGASARPRCCRNGGTCVLGSFCVCPAHFTGRYCEHDQRRSECGALEHGAWTLRACHLCRCIFGALHCLPLQTPDRCDPKDFLASHAHGPSAGGAPSLLLLLPCALLHRLLRPDAPAHPRSLVPSVLQRERRPCGRPGLGHRL

SEQ ID NO: 2676 - protein, 191 aa, Homo sapiens
MTWRHHVRLLFTVSLALQIINLGNSYQREKHNGGREEVTKVATQKHRQSPLNWTSSHFGEVTGSAEGWGPEEPLPYSRAFGEVNAAPWSTEPGPSAPATSAGASSGPCTASPSRRLTAVTRKTSWPPTLTGRAPGARPACYSCCPAHSCTASCARMRPRTLGPWSLPSSSGSGAPAEGRDLGIAFNFLCCK

SEQ ID NO: 2677 - protein, 148 aa, Homo sapiens
MTWRHHVRLLFTVSLALQIINLGNSYQREKHNGGREEVTKVATQKHRQSPLNWTSSHFGEVTGSAEGWGPEEPLPYSWAFGEDPKDFLASHAHGPSAGGAPSLLLLLPCALLHRLLRPDAPAHPRSLVPSVLQRERRPCGRPGLGHRL

SEQ ID NO: 2678 - protein, 223 aa, Homo sapiens
MTWRHHVRLLFTVSLALQIINLGNSYQREKHNGGREEVTKVATQKHRQSPLNWTSSHFGEVTGSAEGWGPEEPLPYSWAFGEGASARPRCCRNGGTCVLGSFCVCPAHFTGRYCEHDQRRSECGALEHGAWTLRACHLCRCIFGALHCLPLQTPDRCDPKDFLASHAHGPSAGGAPSLLLLLPCALLHRLLRPDAPAHPRSLVPSVLQRERRPCGRPGLGHRL

SEQ ID NO: 2679 - protein, 191 aa, Homo sapiens
MTWRHHVRLLFTVSLALQIINLGNSYQREKHNGGREEVTKVATQKHRQSPLNWTSSHFGEVTGSAEGWGPEEPLPYSWAFGEVNAAPWSTEPGPSAPATSAGASSGPCTASPSRRLTAVTRKTSWPPTLTGRAPGARPACYSCCPAHSCTASCARMRPRTLGPWSLPSSSGSGAPAEGRDLGIAFNFLCCK

SEQ ID NO: 2680 - protein, 253 aa, Homo sapiens
MHSWERLAVLVLLGAAACAAPPRGRILGGREAEAHARPYMASVQLNGAHLCGGVLVAEQWVLSAAHCLEDAADGKVQVLLGAHSLSQPEPSKRLYDVLRAVPHPDSQPDTIDHDLLLLQLSEKATLGPAVRPLPWQRVDRDVAPGTLCDVAGWGIVNHAGRRPDSLQHVLLPVLDRATCNRRTHHDGAITERLMCAESNRRDSCKGDSGGPLVCGGVLEGVVTSGSRVCGNRKKPGIYTRVASYAAWIDSVLA

SEQ ID NO: 2681 - protein, 260 aa, Homo sapiens
MHSWERLAVLVLLGAAACGEEAWAWAAPPRGRILGGREAEAHARPYMASVQLNGAHLCGGVLVAEQWVLSAAHCLEDAADGKVQVLLGAHSLSQPEPSKRLYDVLRAVPHPDSQPDTIDHDLLLLQLSEKATLGPAVRPLPWQRVDRDVAPGTLCDVAGWGIVNHAGRRPDSLQHVLLPVLDRATCNRRTHHDGAITERLMCAESNRRDSCKGDSGGPLVCGGVLEGVVTSGSRVCGNRKKPGIYTRVASYAAWIDSVLA

SEQ ID NO: 2682 - protein, 299 aa, Homo sapiens
MEEFDSEDFSTSEEDEDYVPSGGEYSEDDVNELVKEDEVDGEEQTQKTQGKKRKAQSIPARKRRQGGLSLEEEEEEDANSESEGSSSEEEDDAAEQEKGIGSEDARKKKEDELWASFLNDVGPKSKVPPSTQVKKGEETEETSSSKLLVKAEELEKPKETEKVKITKVFDFAGEEVRVTKEVDATSKEAKSFFKQNEKEKPQANVPSALPSLPAGSGLKRSSGMSSLLGKIGAKKQKMSTLEKSKLDWESFKEEEGIGEELAIHNRGKEGYIERKAFLDRVDHRQFEIERDLRLSKMKP

SEQ ID NO: 2683 - protein, 50 aa, Homo sapiens
MSRRPAYCSLQFLGSSDPPASASPVDGTTGGEYSEDDVNELVKEDEVDGE

SEQ ID NO: 2684 - protein, 19 aa, Homo sapiens
QANVPSALPSLPAGSGCVI

SEQ ID NO: 2685 - protein, 17 aa, Homo sapiens
  SITE 1: note = misc_feature - Xaa can be any naturally occurring amino acid
XALPSLPAGSGKKKFDA

SEQ ID NO: 2686 - protein, 385 aa, Homo sapiens
MRLLAKIICLMLWAICVAEDCNELPPRRNTEILTGSWSDQTYPEGTQAIYKCRPGYRSLGNVIMVCRKGEWVALNPLRKCQKRPCGHPGDTPFGTFTLTGGNVFEYGVKAVYTCNEGYQLLGEINYRECDTDGWTNDIPICEEISCKSPDVINGSPISQKIIYKENERFQYKCNMGYEYSERGDAVCTESGWRPLPSCEEKSCDNPYIPNGDYSPLRIKHRTGDEITYQCRNGFYPATRGNTAKCTSTGWIPAPRCTLKPCDYPDIKHGGLYHENMRRPYFPVAVGKYYSYYCDEHFETPSGSYWDHIHCTQDGWSPAVPCLRKCYFPYLENGYNQNHGRKFVQGKSIDVACHPGYALPKAQTTVTCMENGWSPTPRCIRVSFTL

SEQ ID NO: 2687 - protein, 1231 aa, Homo sapiens
MRLLAKIICLMLWAICVAEDCNELPPRRNTEILTGSWSDQTYPEGTQAIYKCRPGYRSLGNVIMVCRKGEWVALNPLRKCQKRPCGHPGDTPFGTFTLTGGNVFEYGVKAVYTCNEGYQLLGEINYRECDTDGWTNDIPICEVVKCLPVTAPENGKIVSSAMEPDREYHFGQAVRFVCNSGYKIEGDEEMHCSDDGFWSKEKPKCVEISCKSPDVINGSPISQKIIYKENERFQYKCNMGYEYSERGDAVCTESGWRPLPSCEEKSCDNPYIPNGDYSPLRIKHRTGDEITYQCRNGFYPATRGNTAKCTSTGWIPAPRCTLKPCDYPDIKHGGLYHENMRRPYFPVAVGKYYSYYCDEHFETPSGSYWDHIHCTQDGWSPAVPCLRKCYFPYLENGYNQNHGRKFVQGKSIDVACHPGYALPKAQTTVTCMENGWSPTPRCIRVKTCSKSSIDIENGFISESQYTYALKEKAKYQCKLGYVTADGETSGSITCGKDGWSAQPTCIKSCDIPVFMNARTKNDFTWFKLNDTLDYECHDGYESNTGSTTGSIVCGYNGWSDLPICYERECELPKIDVHLVPDRKKDQYKVGEVLKFSCKPGFTIVGPNSVQCYHFGLSPDLPICKEQVQSCGPPPELLNGNVKEKTKEEYGHSEVVEYYCNPRFLMKGPNKIQCVDGEWTTLPVCIVEESTCGDIPELEHGWAQLSSPPYYYGDSVEFNCSESFTMIGHRSITCIHGVWTQLPQCVAIDKLKKCKSSNLIILEEHLKNKKEFDHNSNIRYRCRGKEGWIHTVCINGRWDPEVNCSMAQIQLCPPPPQIPNSHNMTTTLNYRDGEKVSVLCQENYLIQEGEEITCKDGRWQSIPLCVEKIPCSQPPQIEHGTINSSRSSQESYAHGTKLSYTCEGGFRISEENETTCYMGKWSSPPQCEGLPCKSPPEISHGVVAHMSDSYQYGEEVTYKCFEGFGIDGPAIAKCLGEKWSHPPSCIKTDCLSLPSFENAIPMGEKKDVYKAGEQVTYTCATYYKMDGASNVTCINSRWTGRPTCRDTSCVNPPTVQNAYIVSRQMSKYPSGERVRYQCRSPYEMFGDEEVMCLNGNWTEPPQCKDSTGKCGPPPPIDNGDITSFPLSVYAPASSVEYQCQNLYQLEGNKRITCRNGQWSEPPKCLHPCVISREIMENYNIALRWTAKQKLYSRTGESVEFVCKRGYRLSSRSHTLRTTCWDGKLEYPTCAKR

SEQ ID NO: 2688 - protein, 449 aa, Homo sapiens
MRLLAKIICLMLWAICVAEDCNELPPRRNTEILTGSWSDQTYPEGTQAIYKCRPGYRSLGNVIMVCRKGEWVALNPLRKCQKRPCGHPGDTPFGTFTLTGGNVFEYGVKAVYTCNEGYQLLGEINYRECDTDGWTNDIPICEVVKCLPVTAPENGKIVSSAMEPDREYHFGQAVRFVCNSGYKIEGDEEMHCSDDGFWSKEKPKCVEISCKSPDVINGSPISQKIIYKENERFQYKCNMGYEYSERGDAVCTESGWRPLPSCEEKSCDNPYIPNGDYSPLRIKHRTGDEITYQCRNGFYPATRGNTAKCTSTGWIPAPRCTLKPCDYPDIKHGGLYHENMRRPYFPVAVGKYYSYYCDEHFETPSGSYWDHIHCTQDGWSPAVPCLRKCYFPYLENGYNQNHGRKFVQGKSIDVACHPGYALPKAQTTVTCMENGWSPTPRCIRVSFTL

SEQ ID NO: 2689 - protein, 271 aa, Homo sapiens
MWLLVSVILISRISSVGGEATFCDFPKINHGILYDEEKYKPFSQVPTGEVFYYSCEYNFVSPSKSFWTRITCTEEGWSPTPKCLRLCFFPFVENGHSESSGQTHLEGDTVQIICNTGYRLQNNENNISCVERGWSTPPKCRSTDSTGKCGPPPPIDNGDITSFPLSVYAPASSVEYQCQNLYQLEGNKRITCRNGQWSEPPKCLHPCVISREIMENYNIALRWTAKQKLYLRTGESAEFVCKRGYRLSSRSHTLRTTCWDGKLEYPTCAKR

SEQ ID NO: 2690 - protein, 330 aa, Homo sapiens
MWLLVSVILISRISSVGGEATFCDFPKINHGILYDEEKYKPFSQVPTGEVFYYSCEYNFVSPSKSFWTRITCTEEGWSPTPKCLRLCFFPFVENGHSESSGQTHLEGDTVQIICNTGYRLQNNENNISCVERGWSTPPKCRSTDTSCVNPPTVQNAHILSRQMSKYPSGERVRYECRSPYEMFGDEEVMCLNGNWTEPPQCKDSTGKCGPPPPIDNGDITSFPLSVYAPASSVEYQCQNLYQLEGNKRITCRNGQWSEPPKCLHPCVISREIMENYNIALRWTAKQKLYLRTGESAEFVCKRGYRLSSRSHTLRTTCWDGKLEYPTCAKR

SEQ ID NO: 2691 - protein, 270 aa, Homo sapiens; identical to SEQ ID NO: 1649

SEQ ID NO: 2692 - protein, 254 aa, Homo sapiens
MWLLVSVILISRISSVGGEAMFCDFPKINHGILYDEEKYKPFSQVPTGEVFYYSCEYNFVSPSKSFWTRITCAEEGWSPTPKCLRQTHLEGDTVQIICNTGYRLQNNENNISCVERGWSTPPKCRSTISAEKCGPPPPIDNGDITSFLLSVYAPGSSVEYQCQNLYQLEGNNQITCRNGQWSEPPKCLDPCVISQEIMEKYNIKLKWTNQQKLYSRTGDIVEFVCKSGYHPTKSHSFRAMCQNGKLVYPSCEEK

SEQ ID NO: 2693 - protein, 269 aa, Homo sapiens
MLLLINVILTLWVSCANGQVKPCDFPDIKHGGLFHENMRRPYFPVAVGKYYSYYCDEHFETPSGSYWDYIHCTQNGWSPAVPCLRKCYFPYLENGYNQNYGRKFVQGNSTEVACHPGYGLPKAQTTVTCTEKGWSPTPRCIRVNSSEKCGPPPPISNGDTTSFLLKVYVPQSRVEYQCQPYYELQGSNYVTCSNGEWSEPPRCIHPCIITEENMNKNNIKLKGRSDRKYYAKTGDTIEFMCKLGYNANTSILSFQAVCREGIVEYPRCE

SEQ ID NO: 2694 - protein, 195 aa, Homo sapiens
MLLLINVILTLWVSCANGQVKPCDFPDIKHGGLFHENMRRPYFPVAVGKYYSYYCDEHFETPSGSYWDYIHCTQNGWSPAVPCLRKCYFPYLENGYNQNYGRKFVQGNSTEVACHPGYGLPKAQTTVTCTEKGWSPTPRCIRVRTCSKSDIEIENGFISESSSIYILNKEIQYKCKPGYATADGNSSDMVFCISY

SEQ ID NO: 2695 - protein, 330 aa, Homo sapiens
MLLLINVILTLWVSCANGQVKPCDFPDIKHGGLFHENMRRPYFPVAVGKYYSYYCDEHFETPSGSYWDYIHCTQNGWSPAVPCLRKCYFPYLENGYNQNYGRKFVQGNSTEVACHPGYGLPKAQTTVTCTEKGWSPTPRCIRVRTCSKSDIEIENGFISESSSIYILNKEIQYKCKPGYATADGNSSGSITCLQNGWSAQPICINSSEKCGPPPPISNGDTTSFLLKVYVPQSRVEYQCQPYYELQGSNYVTCSNGEWSEPPRCIHPCIITEENMNKNNIKLKGRSDRKYYAKTGDTIEFMCKLGYNANTSILSFQAVCREGIVEYPRCE

SEQ ID NO: 2696 - protein, 232 aa, Homo sapiens
MLLLINVILTLWVSCANGQVKPCDFPDIKHGGLFHENMRRPYFPVAVGKYYSYYCDEHFETPSGSYWDYIHCTQNGWSPAVPCLRKCYFPYLENGYNQNYGRKFVQGNSTEVACHPGYGLPKAQTTVTCTEKGWSPTPRCIRVRTCSKSDIEIENGFISESSSIYILNKEIQYKCKPGYATADGNSSGSITCLQNGWSAQPICITACIAFRAHAQKSCTCRGRNECLILNFC

SEQ ID NO: 2697 - protein, 232 aa, Homo sapiens; identical to SEQ ID NO: 2696

SEQ ID NO: 2698 - protein, 201 aa, Homo sapiens
MENGWSPPCRCIRVRTCSKSDIEIENGFISESSSIYILNKEIQYKCKPGYATADGNSSGSITCLQNGWSAQPICINSSEKCGPPPPISNGDTTSFLLKVYVPQSRVEYQCQSYYELQGSNYVTCSNGEWSEPPRCIHPCIITEENMNKNNIQLKGKSDIKYYAKTGDTIEFMCKLGYNANTSVLSFQAVCREGIVEYPRCE

SEQ ID NO: 2699 - protein, 331 aa, Homo sapiens
MLLLINVILTLWVSCANGQEVKPCDFPEIQHGGLYYKSLRRLYFPAAAGQSYSYYCDQNFVTPSGSYWDYIHCTQDGWLPTVPCLRTCSKSDIEIENGFISESSSIYILNKEIQYKCKPGYATADGNSSGSITCLQNGWSAQPICIKFCDMPVFENSRAKSNGMRFKLHDTLDYECYDGYEISYGNTTGSIVCGEDGWSHFPTCYNSSEKCGPPPPISNGDTTSFLLKVYVPQSRVEYQCQSYYELQGSNYVTCSNGEWSEPPRCIHPCIITEENMNKNNIQLKGKSDIKYYAKTGDTIEFMCKLGYNANTSVLSFQAVCREGIVEYPRCE

SEQ ID NO: 2700 - protein, 331 aa, Homo sapiens
MLLLINVILTLWVSCANGQEVKPCDFPEIQHGGLYYKSLRRLYFPAAAGQSYSYYCDQNFVTPSGSYWDYIHCTQDGWSPTVPCLRTCSKSDIEIENGFISESSSIYILNKEIQYKCKPGYATADGNSSGSITCLQNGWSAQPICIKFCDMPVFENSRAKSNGMRFKLHDTLDYECYDGYEISYGNTTGSIVCGEDGWSHFPTCYNSSEKCGPPPPISNGDTTSFLLKVYVPQSRVEYQCQSYYELQGSNYVTCSNGEWSEPPRCIHPCIITEENMNKNNIQLKGKSDIKYYAKTGDTIEFMCKLGYNANTSVLSFQAVCREGIVEYPRCE

SEQ ID NO: 2701 - protein, 577 aa, Homo sapiens
MLLLINVILTLWVSCANGQVKPCDFPEIQHGGLYYKSLRRLYFPAAAGQSYSYYCDQNFVTPSGSYWDYIHCTQDGWSPTVPCLRTCSKSDVEIENGFISESSSIYILNEETQYNCKPGYATAEGNSSGSITCLQNGWSTQPICIKFCDMPVFENSRAKSNGMWFKLHDTLDYECYDGYESSYGNTTDSIVCGEDGWSHLPTCYNSSENCGPPPPISNGDTTSFPQKVYLPWSRVEYQCQSYYELQGSKYVTCSNGDWSEPPRCISMKPCEFPEIQHGHLYYENTRRPYFPVATGQSYSYYCDQNFVTPSGSYWDYIHCTQDGWLPTVPCLRTCSKSDIEIENGFISESSSIYILNKEIQYKCKPGYATADGNSSGSITCLQNGWSAQPICIKFCDMPVFENSRAKSNGMRFKLHDTLDYECYDGYEISYGNTTGSIVCGEDGWSHFPTCYNSSEKCGPPPPISNGDTTSFLLKVYVPQSRVEYQCQSYYELQGSNYVTCSNGEWSEPPRCIHPCIITEENMNKNNIQLKGKSDIKYYAKTGDTIEFMCKLGYNANTSVLSFQAVCREGIVEYPRCE

SEQ ID NO: 2702 - protein, 569 aa, Homo sapiens
MLLLFSVILISWVSTVGGEGTLCDFPKIHHGFLYDEEDYNPFSQVPTGEVFYYSCEYNFVSPSKSFWTRITCTEEGWSPTPKCLRMCSFPFVKNGHSESSGLIHLEGDTVQIICNTGYSLQNNEKNISCVERGWSTPPICSFTKGECHVPILEANVDAQPKKESYKVGDVLKFSCRKNLIRVGSDSVQCYQFGWSPNFPTCKGQVRSCGPPPQLSNGEVKEIRKEEYGHNEVVEYDCNPNFIINGPKKIQCVDGEWTTLPTCVEQVKTCGYIPELEYGYVQPSVPPYQHGVSVEVNCRNEYAMIGNNMITCINGIWTELPMCVATHQLKRCKIAGVNIKTLLKLSGKEFNHNSRIRYRCSDIFRYRHSVCINGKWNPEVDCTEKREQFCPPPPQIPNAQNMTTTVNYQDGEKVAVLCKENYLLPEAKEIVCKDGRWQSLPRCVESTAYCGPPPSINNGDTTSFPLSVYPPGSTVTYRCQSFYKLQGSVTVTCRNKQWSEPPRCLDPCVVSEENMNKNNIQLKWRNDGKLYAKTGDAVEFQCKFPHKAMISSPPFRAICQEGKFEYPICE

SEQ ID NO: 2703 - protein, 161 aa, Homo sapiens
MKLLHVFLLFLCFHLRFCKVTYTSQEDLVEKKCLAKKYTHLSCDKVFCQPWQRCIEGTCVCKLPYQCPKNGTAVCATNRRSFPTYCQQKSLECLHPGTKFLNNGTCTAEGKFSVSLKHGNTDSEGIVEVKLVDQDKTMFICKSSWSMREANVACLDLGFQQ

SEQ ID NO: 2704 - protein, 591 aa, Homo sapiens
MKLLHVFLLFLCFHLRFCKVTYTSQEDLVEKKCLAKKYTHLSCDKVFCQPWQRCIEGTCVCKLPYQCPKNGTAVCATNRRSFPTYCQQKSLECLHPGTKFLNNGTCTAEGKFSVSLKHGNTDSEGIVEVKLVDQDKTMFICKSSWSMREANVACLDLGFQQGADTQRRFKLSDLSINSTECLHVHCRGLETSLAECTFTKRRTMGYQDFADVVCYTQKADSPMDDFFQCVNGKYISQMKACDGINDCGDQSDELCCKACQGKGFHCKSGVCIPSQYQCNGEVDCITGEDEVGCAAARHPTIQGFASVTQEETEILTADMDAERRRIKSLLPKLSCGVKNRMHIRRKRIVGGKRAQLGDLPWQVAIKDASGITCGGIYIGGCWILTAAHCLRASKTHRYQIWTTVVDWIHPDLKRIVIEYVDRIIFHENYNAGTYQNDIALIEMKKDGNKKDCELPRSIPACVPWSPYLFQPNDTCIVSGWGREKDNERVFSLQWGEVKLISNCSKFYGNRFYEKEMECAGTYDGSIDACKGDSGGPLVCMDANNVTYVWGVVSWGENCGKPEFPGVYTKVANYFDWISYHVGRPFISQYNV

SEQ ID NO: 2705 - protein, 583 aa, Homo sapiens
MKLLHVFLLFLCFHLRFCKVTYTSQEDLVEKKCLAKKYTHLSCDKVFCQPWQRCIEGTCVCKLPYQCPKNGTAVCATNRRSFPTYCQQKSLECLHPGTKFLNNGTCTAEGKFSVSLKHGNTDSEGIVEVKLVDQDKTMFICKSSWSMREANVACLDLGFQQGADTQRRFKLSDLSINSTECLHVHCRGLETSLAECTFTKRRTMGYQDFADVVCYTQKADSPMDDFFQCVNGKYISQMKACDGINDCGDQSDELCCKACQGKGFHCKSGVCIPSQYQCNGEVDCITGEDEVGCAGFASVTQEETEILTADMDAERRRIKSLLPKLSCGVKNRMHIRRKRIVGGKRAQLGDLPWQVAIKDASGITCGGIYIGGCWILTAAHCLRASKTHRYQIWTTVVDWIHPDLKRIVIEYVDRIIFHENYNAGTYQNDIALIEMKKDGNKKDCELPRSIPACVPWSPYLFQPNDTCIVSGWGREKDNERVFSLQWGEVKLISNCSKFYGNRFYEKEMECAGTYDGSIDACKGDSGGPLVCMDANNVTYVWGVVSWGENCGKPEFPGVYTKVANYFDWISYHVGRPFISQYNV

SEQ ID NO: 2706 - protein, 576 aa, Homo sapiens
MKLLHVFLLFLCFHLRFCKVTYTSQEDLVEKKCLAKKYTHLSCDKVFCQPWQRCIEGTCVCKLPYQCPKNGTAVCATNRRSFPTYCQQKSLECLHPGTKFLNNGTCTAEGKFSVSLKHGNTDSEGIVEVKLVDQDKTMFICKSSWSMREANVACLDLGFQQGADTQRRFKLSDLSINSTECLHVHCRGLETSLAECTFTKRRTMGYQDFADVVCYTQKADSPMDDFFQCVNGKYISQMKACDGINDCGDQSDELCCKACQGKGFHCKSGVCIPSQYQCNGEVDCITGEDEVGCAEETEILTADMDAERRRIKSLLPKLSCGVKNRMHIRRKRIVGGKRAQLGDLPWQVAIKDASGITCGGIYIGGCWILTAAHCLRASKTHRYQIWTTVVDWIHPDLKRIVIEYVDRIIFHENYNAGTYQNDIALIEMKKDGNKKDCELPRSIPACVPWSPYLFQPNDTCIVSGWGREKDNERVFSLQWGEVKLISNCSKFYGNRFYEKEMECAGTYDGSIDACKGDSGGPLVCMDANNVTYVWGVVSWGENCGKPEFPGVYTKVANYFDWISYHVGRPFISQYNV

SEQ ID NO: 2707 - protein, 378 aa, Homo sapiens
MKLLHVFLLFLCFHLRFCKVTYTSQEDLVEKKCLAKKYTHLSCDKVFCQPWQRCIEGTCVCKLPYQCPKNGTAVCATNRRSFPTYCQQKSLECLHPGTKFLNNGTCTAEGKFSVSLKHGNTDSEGIVEVKLVDQDKTMFICKSSWSMREANVACLDLGFQQGADTQRRFKLSDLSINSTECLHVHCRGLETSLAECTFTKRRTMGYQDFADVVCYTQKADSPMDDFFQCVNGKYISQMKACDGINDCGDQSDELCCKACQGKGFHCKSGVCIPSQYQCNGEVDCITGEDEVGCAGFASVTQEETEILTADMDAERRRIKSLLPKLSCGVKNRMHIRRKRIVGGKRAQLGGKMKQISLDIFKGLHRVYAILEFCCIILK

SEQ ID NO: 2708 - protein, 167 aa, Homo sapiens
MGGWSGWGPWEPCSVTCSKGTRTRRRACNHPAPKCGGHCPGQAQESEACDTQQVCPTHGAWATWGPWTPCSASCHGGPHEPKETRSRKCSAPEPSQKPPGKPCPGLAYEQRRCTGLPPCPVAGGWGPWGPVSPCPVTCGLGQTMEQRTCNHPVPQHGGPFCAGDATR

SEQ ID NO: 2709 - protein, 469 aa, Homo sapiens
MITEGAQAPRLLLPPLLLLLTLPATGSDPVLCFTQYEESSGKCKGLLGGGVSVEDCCLNTAFAYQKRSGGLCQPCRSPRWSLWSTWAPCSVTCSEGSQLRYRRCVGWNGQCSGKVAPGTLEWQLQACEDQQCCPEMGGWSGWGPWEPCSVTCSKGTRTRRRACNHPAPKCGGHCPGQAQESEACDTQQVCPTHGAWATWGPWTPCSASCHGGPHEPKETRSRKCSAPEPSQKPPGKPCPGLAYEQRRCTGLPPCPVAGGWGPWGPVSPCPVTCGLGQTMEQRTCNHPVPQHGGPFCAGDATRTHICNTAVPCPVDGEWDSWGEWSPCIRRNMKSISCQEIPGQQSRGRTCRGRKFDGHRCAGQQQDIRHCYSIQHCPLKGSWSEWSTWGLCMPPCGPNPTRARQRLCTPLLPKYPPTVSMVEGQGEKNVTFWGRPLPRCEELQGQKLVVEEKRPCLHVPACKDPEEEEL

SEQ ID NO: 2710 - protein, 415 aa, Homo sapiens
MITEGAQAPRLLLPPLLLLLTLPATGSDPVLCFTQYEESSGKCKGLLGGGVSVEDCCLNTAFAYQKRSGGLCQPCRSPRWSLWSTWAPCSVTCSEGSQLRYRRCVGWNGQCSGKVAPGTLEWQLQACEDQQCCPEMGGWSGWGPWEPCSVTCSKGTRTRRRACNHPAPKCGGHCPGQAQESEACDTQQVCPTHGAWATWGPWTPCSASCHGGPHEPKETRSRKCSAPEPSQKPPGKPCPGLAYEQRRCTGLPPCPVAGGWGPWGPVSPCPVTCGLGQTMEQRTCNHPVPQHGGPFCAGDATRTHICNTAVPCPVDGEWDSWGEWSPCIRRNMKSISCQEIPGQQSRGRTCRGRKFDGHRCAGQQQDIRHCYSIQHCPLKGSWSEWSTWGLCMPPCGPNPTRARQRLCTPLLPKYP

SEQ ID NO: 2711 - protein, 469 aa, Homo sapiens; identical to SEQ ID NO: 2709

SEQ ID NO: 2712 - protein, 62 aa, Homo sapiens
MDYYRKYAAIFLVTLSVFLHVLHSAPDVQDCPECTLQENPFFSQPGAPILQCMGCCFSRAYP

SEQ ID NO: 2713 - protein, 101 aa, Homo sapiens
MDYYRKYAAIFLVTLSVFLHVLHSAPDVQDCPECTLQENPFFSQPGAPILQCMGCCFSRAYPTPLRSKKTMLVQKNVTSESTCCVAKSYNRVRTSRSPEAF

SEQ ID NO: 2714 - protein, 116 aa, Homo sapiens
MDYYRKYAAIFLVTLSVFLHVLHSAPDVQDCPECTLQENPFFSQPGAPILQCMGCCFSRAYPTPLRSKKTMLVQKNVTSESTCCVAKSYNRVTVMGGFKVENHTACHCSTCYYHKS

SEQ ID NO: 2715 - protein, 147 aa, Homo sapiens
MDYYRKYAAIFLVTLSVFLHVLHSAPDVQETGFHHVAQAALKLLSSSNPPTKASQSARITDCPECTLQENPFFSQPGAPILQCMGCCFSRAYPTPLRSKKTMLVQKNVTSESTCCVAKSYNRVTVMGGFKVENHTACHCSTCYYHKS

SEQ ID NO: 2716 - protein, 116 aa, Homo sapiens
MQLSFWSHCRCFCMFSIPLLMCRVRDQICDCPECTLQENPFFSQPGAPILQCMGCCFSRAYPTPLRSKKTMLVQKNVTSESTCCVAKSYNRVTVMGGFKVENHTACHCSTCYYHKS

SEQ ID NO: 2717 - protein, 130 aa, Homo sapiens; identical to SEQ ID NO: 74

SEQ ID NO: 2718 - protein, 155 aa, Homo sapiens
MSKRLLLLLLLSMGGTWASKEPLRPRCRPINATLAVEKEGCPVCITVNTTICAGYCPTMTRVLQGVLPALPQVVCNYRDVRFESIRLPGCPRGVNPVVSYAVALSCQCALCRRSTTDCGGPKDHPLTCDDPRFQDSSSSKAPPPSLPSPSRLPGP

SEQ ID NO: 2719 - protein, 130 aa, Homo sapiens
MGGTWASKEPLRPRCRPINATLAVEKEGCPVCITVNTTICAGYCPTMTRVLQGVLPALPQVVCNYRDVRFESIRLPGCPRGVNPVVSYAVALSCQCALCRRSTTDCGGPKDHPLTCDDPRFQASSSSKAP

SEQ ID NO: 2720 - protein, 163 aa, Homo sapiens
MSKGLLLLLLLSMGGTWASKEPLRPRCRPINATLAVEKEGCPVCITVNTTICAGYCPTMTRVLQGVLPALPQVVCNYRDVRFESIRLPGCPRGVNPVVSYAVALSCQCALCRRSTTDCGGPKDHPLTCDDPRFQASSSSKAPPPSLPSPSRLPGPSDTPILPQ

SEQ ID NO: 2721 - protein, 165 aa, Homo sapiens
MEMFQGLLLLLLLSMGGTWASKEPLRPRCRPINATLAVEKEGCPVCITVNTTICAGYCPTMTRVLQGVLPALPQVVCNYRDVRFESIRLPGCPRGVNPVVSYAVALSCQCALCRRSTTDCGGPKDHPLTCDDPRFQDSSSSKAPPPSLPSPSRLPGPSDTPILPQ

SEQ ID NO: 2722 - protein, 165 aa, Homo sapiens; identical to SEQ ID NO: 2721

SEQ ID NO: 2723 - protein, 165 aa, Homo sapiens
MEMFQGLLLLLLLSMGGTWASREMLRPRCRPINATLAVEKEGCPVCITVNTTICAGYCPTMTRVLQGVLPALPQVVCNYRDVRFESIRLPGCPRGVNPVVSYAVALSCQCALCRRSTTDCGGPKDHPLTCDDPRFQASSSSKAPPPSLPSPSRLPGPSDTPILPQ

SEQ ID NO: 2724 - protein, 165 aa, Homo sapiens; identical to SEQ ID NO: 2723

SEQ ID NO: 2725 - protein, 165 aa, Homo sapiens; identical to SEQ ID NO: 2723

SEQ ID NO: 2726 - protein, 165 aa, Homo sapiens; identical to SEQ ID NO: 2721

SEQ ID NO: 2727 - protein, 132 aa, Homo sapiens
MLPLTMTVLILLLLPTGQAAPKDGVTRPDSEVQHQLLPNPFQPGQEQLGLLQSYLKGLGRTEVQLEHLSREQVLLYLFALHDYDQSGQLDGLELLSMLTAALAPGAANSPTTNPGNLDARLDGGEKAMQPQW

SEQ ID NO: 2728 - protein, 301 aa, Homo sapiens
MLPLTMTVLILLLLPTGQAAPKDGVTRPDSEVQHQLLPNPFQPGQEQLGLLQSYLKGLGRTEVQLEHLSREQVLLYLFALHDYDQSGQLDGLELLSMLTAALAPGAANSPTTNPVILIVDKVLETQDLNGDGLMTPAELINFPGVALRHVEPGEPLAPSPQEPQAVGRQSLLAKSPLRQETQEAPGPREEAKGQVEARRESLDPVQEPGGQAEADGDVPGPRGEAEGQAEAKGDAPGPRGEAGGQAEAEGDAPGPRGEAGGQAEARENGEEAKELPGETLESKNTQNDFEVHIVQVENDEI

SEQ ID NO: 2729 - protein, 318 aa, Homo sapiens
MLPLTMTVLILLLLPTGQAAPKDGVTRPDSEVQHQLLPNPFQPGQEQLGLLQSYLKGLGRTEVQLEHLSREQVLLYLFALHDYDQSGQLDGLELLSMLTAALAPGAANSPTTNPVILIVDKVLETQDLNGDGLMTPAELINFPGVALRHVEPGEPLAPSPQEPQAVGRQSLLAKSPLRQETQEAPGPREEAKGQVEARRESLDPVQEPGGQAEADGDVPGPRGEAEGQAEAKGDAPGPRGEAGGQAEAEGDAPGPRGEAGGQAEAEGDAPGPRGEAGGQAEARENGEEAKELPGETLESKNTQNDFEVHIVQVENDEI

SEQ ID NO: 2730 - protein, 318 aa, Homo sapiens; identical to SEQ ID NO: 2729

SEQ ID NO: 2731 - protein, 318 aa, Homo sapiens; identical to SEQ ID NO: 2729

SEQ ID NO: 2732 - protein, 57 aa, Homo sapiens
MLPLTMTVLILLLLPTGQAAPKDGVTRPDSEVQHQLLPNPFQPGQEQLGSPLPLCPP

SEQ ID NO: 2733 - protein, 112 aa, Homo sapiens
MLTAALAPGAANSPTTNPVILIVDKVLETQDLNGDGLMTPAELINFPGVALRPYPPYIGVGPNSNMCSRSDLPEDSNTLYPGSHLWLRHALNSKGNLDARLDGGEKAMQPQW

SEQ ID NO: 2734 - protein, 440 aa, Homo sapiens
MNGLKEVRYACAVLLWAPWHLVGSKGMGRGVGMRPQLCFRHSRPAFMCFIYKSWSDIYFEHSSMGSLLSVCESSLSRSPVFGAAGRSRQKMRLCLTQPICDTVADASFPRPLILFLVPVPGRMLPLTMTVLILLLLPTGQAAPKDGVTRPDSEVQHQLLPNPFQPGQEQLGLLQSYLKGLGRTEVQLEHLSREQVLLYLFALHDYDQSGQLDGLELLSMLTAALAPGAANSPTTNPVILIVDKVLETQDLNGDGLMTPAELINFPGVALRHVEPGEPLAPSPQEPQAVGRQSLLAKSPLRQETQEAPGPREEAKGQVEARRESLDPVQEPGGQAEADGDVPGPRGEAEGQAEAKGDAPGPRGEAGGQAEAEGDAPGPRGEAGGQAEAEGDAPGPRGEAGGQAEARENGEEAKELPGETLESKNTQNDFEVHIVQVENDEI

SEQ ID NO: 2735 - protein, 359 aa, Homo sapiens
MVRPMLLLSLGLLAGLLPALAACPQNCHCHSDLQHVICDKVGLQKIPKVSEKTKLLNLQRNNFPVLAANSFRAMPNLVSLHLQHCQIREVAAGAFRGLKQLIYLYLSHNDIRVLRAGAFDDLTELTYLYLDHNKVTELPRGLLSPLVNLFILQLNNNKIRELRAGAFQGAKDLRWLYLSENALSSLQPGALDDVENLAKFHVDRNQLSSYPSAALSKLRVVEELKLSHNPLKSIPDNAFQSFGRYLETLWLDNTNLEKFSDGAFLGVTTLKHVHLENNRLNQLPSNFPFDSLETLALTNNPWKCTCQLRGLRRWLEAKASRPDATCASPAKFKGQHIRDTDAFRSCKFPTKRSKKAGRH

SEQ ID NO: 2736 - protein, 359 aa, Homo sapiens; identical to SEQ ID NO: 2735

SEQ ID NO: 2737 - protein, 42 aa, Homo sapiens
  SITE 1: note = misc_feature - Xaa can be any naturally occurring amino acid
XASRPDATCASPAKFKGQHIRDTDAFRSCKFPTKRSKKAGRH

SEQ ID NO: 2738 - protein, 762 aa, Homo sapiens
MEGPRSSTHVPLVLPLLVLLLLAPARQAAAQRCPQACICDNSRRHVACRYQNLTEVPDAIPELTQRLDLQGNLLKVIPAAAFQGVPHLTHLDLRHCEVELVAEGAFRGLGRLLLLNLASNHLRELPQEALDGLGSLRRLELEGNALEELRPGTFGALGALATLNLAHNALVYLPAMAFQGLLRVRWLRLSHNALSVLAPEALAGLPALRRLSLHHNELQALPGPVLSQARGLARLELGHNPLTYAGEEDGLALPGLRELLLDGGALQALGPRAFAHCPRLHTLDLRGNQLDTLPPLQGPGQLRRLRLQGNPLWCGCQARPLLEWLARARVRSDGACQGPRRLRGEALDALRPWDLRCPGDAAQEEEELEERAVAGPRAPPRGPPRGPGEERAVAPCPRACVCVPESRHSSCEGCGLQAVPRGFPSDTQLLDLRRNHFPSVPRAAFPGLGHLVSLHLQHCGIAELEAGALAGLGRLIYLYLSDNQLAGLSAAALEGAPRLGYLYLERNRFLQVPGAALRALPSLFSLHLQDNAVDRLAPGDLGRTRALRWVYLSGNRITEVSLGALGPARELEKLHLDRNQLREVPTGALEGLPALLELQLSGNPLRALRDGAFQPVGRSLQHLFLNSSGLEQICPGAFSGLGPGLQSLHLQKNQLRALPALPSLSQLELIDLSSNPFHCDCQLLPLHRWLTGLNLRVGATCATPPNARGQRVKAAAAVFEDCPGWAARKAKRTPASRPSARRTPIKGRQCGADKVGKEKGRL

SEQ ID NO: 2739 - protein, 253 aa, Homo sapiens [sequence omitted]

SEQ ID NO: 2740 - protein, 684 aa, Homo sapiens
  SITE 1: note = misc_feature - Xaa can be any naturally occurring amino acid
XPRSSTHVPLVLPLLVLLLLAPARQAAAQRCPQACICDNSRRHVACRYQNLTEVPDAIPELTQRLDLQGNLLKVIPAAAFQGVPHLTHLDLRHCEVELVAEGAFRGLGRLLLLNLASNHLRELPQEALDGLGSLRRLELEGNALEELRPGTFGALGALATLNLAHNALVYLPAMAFQGLLRVRWLRLSHNALSVLAPEALAGLPALRRLSLHHNELQALPGPVLSQARGLARLELGHNPLTYAGEEDGLALPGLRELLLDGGALQALGPRAFAHCPRLHTLDLRGNQLDTLPPLQGPGQLRRLRLQGNPLWCGCQARPLLEWLARARVRSDGACQGPRRLRGEALDALRPWDLRCPGDAAQEEEELEERAVAGPRAPPRGPPRGPGEERAVAPCPRACVCVPESRHSSCEGCGLQAVPRGFPSDTQLLDLRRNHFPSVPRAAFPGLGHLVSLHLQHCGIAELEAGALAGLGRLIYLYLSDNQLAGLSAAALEGAPRLGYLYLERNRFLQVPGAALRALPSLFSLHLQDNAVDRLAPGDLGRTRALRWVYLSGNRITEVSLGALGPARELEKLHLDRNQLREVPTGALEGLPALLELQLSGNPLRALRDGAFQPVGRSLQHLFLNSSGLEQICPGAFSGLGPGLQSLHLQKNQLRALPALPSARRTPIKGRQCGADKVGKEKGRL

SEQ ID NO: 2741 - protein, 57 aa, Homo sapiens
FREVGPKNSYIAYIEDHSGNGTFVNTELVGKGKRRPLNNNSEIALSLSRNKVVPVER

SEQ ID NO: 2742 - protein, 137 aa, Homo sapiens
MERLLYGIGACGEVKLAFERKTCKKVAIKIISKRKFAIGSAREADPALNVETEIEILKKLNHPCIIKIKNFFDAEDYYIVLELMEGGELFDKVVGNKRLKEATCKLYFYQMLLAVQYLHENGIIHRDLKPENVLLSS

SEQ ID NO: 2743 - protein, 172 aa, Homo sapiens
MLRLLTSMVVMSRESDVEAQQSHGSSACSQPHGSVTQSQGSSSQSQGISSSSTSTMPNSSQSSHSSSGTLSSLETVSTQELYSIPEDQEPEDQEPEEPTPAPWARLWALQDGFANLECVNDNYWFGRDKSCEYCFDEPLLKRTDKYRTYSKKHFRIFREVGPKNSYIAYIED

SEQ ID NO: 2744 - protein, 121 aa, Homo sapiens
MSKTLGSGACGEVKLAFERKTCKKVAIKIISKRKFAIGSAREADPALNVETEIEILKKLNHPCIIKIKNFFDAEDYYIVLELMEGGELFDKVVGNKRLKEATCKLYFYQMLLAVQYLHENG

SEQ ID NO: 2745 - protein, 161 aa, Homo sapiens
MSRESDVEAQQSHGSSACSQPHGSVTQSQGSSSQSQGISSSSTSTMPNSSQSSHSSSGTLSSLETVSTQELYSIPEDQEPEDQEPEEPTPAPWARLWALQDGFANLECVNDNYWFGRDKSCEYCFDEPLLKRTDKYRTYSKKHFRIFREENLSCPYRIWFK

SEQ ID NO: 2746 - protein, 165 aa, Homo sapiens
MSRESDVEAQQSHGSSACSQPHGSVTQSQGSSSQSQGISSSSTSTMPNSSQSSHSSSGTLSSLETVSTQELYSIPEDQEPEDQEPEEPTPAPWARLWALQDGFANLECVNDNYWFGRDKSCEYCFDEPLLKRTDKYRTYSKKHFRIFREENLSCPYRIWFNFCLF

SEQ ID NO: 2747 - protein, 298 aa, Homo sapiens
MSRESDVEAQQSHGSSACSQPHGSVTQSQGSSSQSQGISSSSTSTMPNSSQSSHSSSGTLSSLETVSTQELYSIPEDQEPEDQEPEEPTPAPWARLWALQDGFANLECVNDNYWFGRDKSCEYCFDEPLLKRTDKYRTYSKKHFRIFREENLSCPYRIWFNGACGEVKLAFERKTCKKVAIKIISKRKFAIGSAREADPALNVETEIEILKKLNHPCIIKIKNFFDAEDYYIVLELMEGGELFDKVVGNKRLKEATCKLYFYQMLLAVQYLHENGIIHRDLKPENVLLSSQEEDCLIK

SEQ ID NO: 2748 - protein, 207 aa, Homo sapiens
MSRESDVEAQQSHGSSACSQPHGSVTQSQGSSSQSQGISSSSTSTMPNSSQSSHSSSGTLSSLETVSTQELYSIPEDQEPEDQEPEEPTPAPWARLWALQDGFANLECVNDNYWFGRDKSCEYCFDEPLLKRTDKYRTYSKKHFRIFREVGPKNSYIAYIEDHSGNGTFVNTELVGKGKRRPLNNNSEIALSLSRNKEKILKIYSLS

SEQ ID NO: 2749 - protein, 207 aa, Homo sapiens; identical to SEQ ID NO: 2748

SEQ ID NO: 2750 - protein, 514 aa, Homo sapiens
MSRESDVEAQQSHGSSACSQPHGSVTQSQGSSSQSQGISSSSTSTMPNSSQSSHSSSGTLSSLETVSTQELYSIPEDQEPEDQEPEEPTPAPWARLWALQDGFANLECVNDNYWFGRDKSCEYCFDEPLLKRTDKYRTYSKKHFRIFREVGPKNSYIAYIEDHSGNGTFVNTELVGKGKRRPLNNNSEIALSLSRNKVFVFFDLTVDDQSVYPKALRDEYIMSKTLGSGACGEVKLAFERKTCKKVAIKIISKRKFAIGSAREADPALNVETEIEILKKLNHPCIIKIKNFFDAEDYYIVLELMEGGELFDKVVGNKRLKEATCKLYFYQMLLAVQITDFGHSKILGETSLMRTLCGTPTYLAPEVLVSVGTAGYNRAVDCWSLGVILFICLSGYPPFSEHRTQVSLKDQITSGKYNFIPEVWAEVSEKALDLVKKLLVVDPKARFTTEEALRHPWLQDEDMKRKFQDLLSEENESTALPQVLAQPSTSRKRPREGEAEGAETTKRPAVCAAVL

SEQ ID NO: 2751 - protein, 543 aa, Homo sapiens
MSRESDVEAQQSHGSSACSQPHGSVTQSQGSSSQSQGISSSSTSTMPNSSQSSHSSSGTLSSLETVSTQELYSIPEDQEPEDQEPEEPTPAPWARLWALQDGFANLECVNDNYWFGRDKSCEYCFDEPLLKRTDKYRTYSKKHFRIFREVGPKNSYIAYIEDHSGNGTFVNTELVGKGKRRPLNNNSEIALSLSRNKVFVFFDLTVDDQSVYPKALRDEYIMSKTLGSGACGEVKLAFERKTCKKVAIKIISKRKFAIGSAREADPALNVETEIEILKKLNHPCIIKIKNFFDAEDYYIVLELMEGGELFDKVVGNKRLKEATCKLYFYQMLLAVQYLHENGIIHRDLKPENVLLSSQEEDCLIKITDFGHSKILGETSLMRTLCGTPTYLAPEVLVSVGTAGYNRAVDCWSLGVILFICLSGYPPFSEHRTQVSLKDQITSGKYNFIPEVWAEVSEKALDLVKKLLVVDPKARFTTEEALRHPWLQDEDMKRKFQDLLSEENESTALPQVLAQPSTSRKRPREGEAEGAETTKRPAVCAAVL

SEQ ID NO: 2752 - protein, 514 aa, Homo sapiens; identical to SEQ ID NO: 2750

SEQ ID NO: 2753 - protein, 543 aa, Homo sapiens; identical to SEQ ID NO: 2751

SEQ ID NO: 2754 - protein, 289 aa, Homo sapiens
MSRESDVEAQQSHGSSACSQPHGSVTQSQGSSSQSQGISSSSTSTMPNSSQSSHSSSGTLSSLETVSTQELYSIPEDQEPEDQEPEEPTPAPWARLWALQDGFANLECVNDNYWFGRDKSCEYCFDEPLLKRTDKYRTYSKKHFRIFREVGPKNSYIAYIEDHSGNGTFVNTELVGKGKRRPLNNNSEIALSLSRNKVFVFFDLTVDDQSVYPKALRDEYIMSKTLGSGACGEVKLAFERKTCKKVAIKIISKRKFAIGSAREADPALNVETEIEILKKLNHDGRGRAV

SEQ ID NO: 2755 - protein, 543 aa, Homo sapiens; identical to SEQ ID NO: 2751

SEQ ID NO: 2756 - protein, 203 aa, Homo sapiens
MSRESDVEAQQSHGSSACSQPHGSVTQSQGSSSQSQGISSSSTSTMPNSSQSSHSSSGTLSSLETVSTQELYSIPEDQEPEDQEPEEPTPAPWARLWALQDGFANLECVNDNYWFGRDKSCEYCFDEPLLKRTDKYRTYSKKHFRIFREVGPKNSYIAYIEDHSGNGTFVNTELVGKGKRRPLNNNSEIALSLSRNKVVPVER

SEQ ID NO: 2757 - protein, 295 aa, Homo sapiens
MSRESDVEAQQSHGSSACSQPHGSVTQSQGSSSQSQGISSSSTSTMPNSSQSSHSSSGTLSSLETVSTQELYSIPEDQEPEDQEPEEPTPAPWARLWALQDGFANLETESGHVTQSDLELLLSSDPPASASQSAGIRECVNDNYWFGRDKSCEYCFDEPLLKRTDKYRTYSKKHFRIFREVGPKNSYIAYIEDHSGNGTFVNTELVGKGKRRPLNNNSEIALSLSRNKVFVFFDLTVDDQSVYPKALRDEYIMSKTLGSGACGEVKLAFERKTCKKVAIKIISKRKFAIGSAREA

SEQ ID NO: 2758 - protein, 586 aa, Homo sapiens
MSRESDVEAQQSHGSSACSQPHGSVTQSQGSSSQSQGISSSSTSTMPNSSQSSHSSSGTLSSLETVSTQELYSIPEDQEPEDQEPEEPTPAPWARLWALQDGFANLETESGHVTQSDLELLLSSDPPASASQSAGIRGVRHHPRPVCSLKCVNDNYWFGRDKSCEYCFDEPLLKRTDKYRTYSKKHFRIFREVGPKNSYIAYIEDHSGNGTFVNTELVGKGKRRPLNNNSEIALSLSRNKVFVFFDLTVDDQSVYPKALRDEYIMSKTLGSGACGEVKLAFERKTCKKVAIKIISKRKFAIGSAREADPALNVETEIEILKKLNHPCIIKIKNFFDAEDYYIVLELMEGGELFDKVVGNKRLKEATCKLYFYQMLLAVQYLHENGIIHRDLKPENVLLSSQEEDCLIKITDFGHSKILGETSLMRTLCGTPTYLAPEVLVSVGTAGYNRAVDCWSLGVILFICLSGYPPFSEHRTQVSLKDQITSGKYNFIPEVWAEVSEKALDLVKKLLVVDPKARFTTEEALRHPWLQDEDMKRKFQDLLSEENESTALPQVLAQPSTSRKRPREGEAEGAETTKRPAVCAAVL

SEQ ID NO: 2759 - protein, 452 aa, Homo sapiens
MSRESDVEAQQSHGSSACSQPHGSVTQSQGSSSQSQGISSSSTSTMPNSSQSSHSSSGTLSSLETVSTQELYSIPEDQEPEDQEPEEPTPAPWARLWALQDGFANLVFVFFDLTVDDQSVYPKALRDEYIMSKTLGSGACGEVKLAFERKTCKKVAIKIISKRKFAIGSAREADPALNVETEIEILKKLNHPCIIKIKNFFDAEDYYIVLELMEGGELFDKVVGNKRLKEATCKLYFYQMLLAVQYLHENGIIHRDLKPENVLLSSQEEDCLIKITDFGHSKILGETSLMRTLCGTPTYLAPEVLVSVGTAGYNRAVDCWSLGVILFICLSGYPPFSEHRTQVSLKDQITSGKYNFIPEVWAEVSEKALDLVKKLLVVDPKARFTTEEALRHPWLQDEDMKRKFQDLLSEENESTALPQVLAQPSTSRKRPREGEAEGAETTKRPAVCAAVL

SEQ ID NO: 2760 - protein, 45 aa, Homo sapiens
SSDPPASASQSAGIRGVRHHPRPVCSLIETGFHRVSQDGLHLLTS

SEQ ID NO: 2761 - protein, 276 aa, Homo sapiens
  SITE 1: note = misc_feature - Xaa can be any naturally occurring amino acid
XIGSAREADPALNVETEIEILKKLNHPCIIKIKNFFDAEDYYIVLELMEGGELFDKVVGNKRLKEATCKLYFYQMLLAVQYLHENGIIHRDLKPENVLLSSQEEDCLIKITDFGHSKILGETSLMRTLCGTPTYLAPEVLVSVGTAGYNRAVDCWSLGVILFIWTQVSLKDQITSGKYNFIPEVWAEVSEKALDLVKKLLVVDPKARFTTEEALRHPWLQDEDMKRKFQDLLSEENESTALPQVLAQPSTSRKRPREGEAEGAETTKRPAVCAAVL

SEQ ID NO: 2762 - protein, 144 aa, Homo sapiens
  SITE 1: note = misc_feature - Xaa can be any naturally occurring amino acid
XIISKRKFAIGSAREADPALNVETEIEILKKLNHPCIIKIKNFFDAEDYYIVLELMEGGELFDKVVGNKRLKEATCKLYFYQMLLAVQDEDMKRKFQDLLSEENESTALPQVLAQPSTSRKRPREGEAEGAETTKRPAVCAAVL

SEQ ID NO: 2763 - protein, 38 aa, Homo sapiens
MRSAAVLALLLCAGQVTALPVNSPMNKGDTEMNGSFPF

SEQ ID NO: 2764 - protein, 457 aa, Homo sapiens
MRSAAVLALLLCAGQVTALPVNSPMNKGDTEVMKCIVEVISDTLSKPSPMPVSQECFETLRGDERILSILRHQNLLKELQDLALQGAKERAHQQKKHSGFEDELSEVLENQSSQAELKEAVEEPSSKDVMEKREDSKEAEKSGEATDGARPQALPEPMQESKAEGNNQAPGEEEEEEEEATNTHPPASLPSQKYPGPQAEGDSEGLSQGLVDREKGLSAEPGWQAKREEEEEEEEEAEAGEEAVPEEEGPTVVLNPHPSLGYKEIRKGESRSEALAVDGAGKPGAEEAQDPEGKGEQEHSQQKEEEEEMAVVPQGLFRGGKSGELEQEEERLSKEWEDSKRWSKMDQLAKELTAEKRLEGQEEEEDNRDSSMKLSFRARAYGFRGPGPQLRRGWRPSSREDSLEAGLPLQVRGYPEEKKEEEGSANRRPEDQELESLSAIEAELEKVAHQLQALRRG

SEQ ID NO: 2765 - protein, 306 aa, Homo sapiens
MRSAAVLALLLCAGQVTALPVNSPMNKGDTEVMKCIVEVISDTLSKPSPMPVSQECFETLRGDERILSILRHQNLLKELQDLALQGAKERAHQQKKHSGFEDELSEVLENQSSQAELKGRSEALAVDGAGKPGAEEAQDPEGKGEQEHSQQKEEEEEMAVVPQGLFRGGKSGELEQEEERLSKEWEDSKRWSKMDQLAKELTAEKRLEGQEEEEDNRDSSMKLSFRARAYGFRGPGPQLRRGWRPSSREDSLEAGLPLQVRGYPEEKKEEEGSANRRPEDQELESLSAIEAELEKVAHQLQALRRG

SEQ ID NO: 2766 - protein, 289 aa, Homo sapiens
MPVDNRNHNEGMVTRCIIEVLSNALSKSSAPPITPECRQVLKTSRKDVKDKETTENENTKFEVRLLRDPADASEAHESSSRGEAGAPGEEDIQGPTKADTEKWAEGGGHSRERADEPQWSLYPSDSQVSEEVKTRHSEKSQREDEEEEEGENYQKGERGEDSSEEKHLEEPGETQNAFLNERKQASAIKKEELVARSETHAAGHSQEKTHSREKSSQESGEETGSQENHPQESKGQPRSQEESEEGEEDATSEVDKRRTRPRHHHGRSRPDRSSQGGSLPSEEKGHPQE

SEQ ID NO: 2767 - protein, 677 aa, Homo sapiens
MQPTLLLSLLGAVGLAAVNSMPVDNRNHNEGMVTRCIIEVLSNALSKSSAPPITPECRQVLKTSRKDVKDKETTENENTKFEVRLLRDPADASEAHESSSRGEAGAPGEEDIQGPTKADTEKWAEGGGHSRERADEPQWSLYPSDSQVSEEVKTRHSEKSQREDEEEEEGENYQKGERGEDSSEEKHLEEPGETQNAFLNERKQASAIKKEELVARSETHAAGHSQEKTHSREKSSQESGEETGSQENHPQESKGQPRSQEESEEGEEDATSEVDKRRTRPRHHHGRSRPDRSSQGGSLPSEEKGHPQEESEESNVSMASLGEKRDHHSTHYRASEEEPEYGEEIKGYPGVQAPEDLEWERYRGRGSEEYRAPRPQSEESWDEEDKRNYPSLELDKMAHGYGEESEEERGLEPGKGRHHRGRGGEPRAYFMSDTREEKRFLGEGHHRVQENQMDKARRHPQGAWKELDRNYLNYGEEGAPGKWQQQGDLQDTKENREEARFQDKQYSSHHTAEKRKRLGELFNPYYDPLQWKSSHFERRDNMNDNFLEGEEENELTLNEKNFFPEYNYDWWEKKPFSEDVNWGYEKRNLARVPKLDLKRQYDRVAQLDQLLHYRKKSAEFPDFYDSEEPVSTHQEAENEKDRADQTVLTEDEKKELENLAAMDLELQKIAEKFSQRG

SEQ ID NO: 2768 - protein, 383 aa, Homo sapiens
MGVKASQTGFVVLVLLQCCSAYKLVCYYTSWSQYREGDGSCFPDALDRFLCTHIIYSFANISNDHIDTWEWNDVTLYGMLNTLKNRNPNLKTLLSVGGWNFGSQRFSKIASNTQSRRTFIKSVPPFLRTHGFDGLDLAWLYPGRRDKQHFTTLIKEMKAEFIKEAQPGKKQLLLSAALSAGKVTIDSSYDIAKISQHLDFISIMTYDFHGAWRGTTGHHSPLFRGQEDASPDRFSNTDYAVGYMLRLGAPASKLVMGIPTFGRSFTLASSETGVGAPISGPGIPGRFTKEAGTLAYYEICDFLRGATVHRILGQQVPYATKGNQWVGYDDQESVKSKVQYLKDRQLAGAMVWALDLDDFQGSFCGQDLRFPLTNAIKDALAAT

SEQ ID NO: 2769 - protein, 152 aa, Homo sapiens
  SITE 1: note = misc_feature - Xaa can be any naturally occurring amino acid
XLLLSAALSAGKVTIDSSYDIAKISQHLDFISIMTYDFHGAWRGTTGHHSPLFRGQEDASPDRFSNTICDFLRGATVHRILGQQVPYATKGNQWVGYDDQESVKSKVQYLKDRQLAGAMVWALDLDDFQGSFCGQDLRFPLTNAIKDALAAT

SEQ ID NO: 2770 - protein, 380 aa, Homo sapiens
MGATTMDQKSLWAGSAYKLVCYFTNWSQDRQEPGKFTPENIDPFLCSHLIYSFASIENNKVIIKDKSEVMLYQTINSLKTKNPKLKILLSIGGYLFGSKGFHPMVDSSTSRLEFINSIILFLRNHNFDGLDVSWIYPDQKENTHFTVLIHELAEAFQKDFTKSTKERLLLTAGVSAGRQMIDNSYQVEKLAKDLDFINLLSFDFHGSWEKPLITGHNSPLSKGWQDRGPSSYYNVEYAVGYWIHKGMPSEKVVMGIPTYGHSFTLASAETTVGAPASGPGAAGPITESSGFLAYYEICQFLKGAKITRLQDQQVPYAVKGNQWVGYDDVKSMETKVQFLKNLNLGGAMIWSIDMDDFTGKSCNQGPYPLVQAVKRSLGSL

SEQ ID NO: 2771 - protein, 182 aa, Homo sapiens
MGATTMDQKSLWAGVVVLLLLQGGSAYKLVCYFTNWSQDRQEPGKFTPENIDPFLCSHLIYSFASIENNKVIIKDKSEVMLYQTINSLKTKNPKLKILLSIGGYLFGSKGFHPMVDSSTSRLEFINSIILFLRNHNFDGLDELAEAFQKDFTKSTKERLLLTAGVSAGRQMIDNSYQVEKLA

SEQ ID NO: 2772 - protein, 201 aa, Homo sapiens
MGATTMDQKSLWAGVVVLLLLQGGSAYKLVCYFTNWSQDRQEPGKFTPENIDPFLCSHLIYSFASIENNKVIIKDKSEVMLYQTINSLKTKNPKLKILLSIGGYLFGSKGFHPMVDSSTSRLEFINSIILFLRNHNFDGLDVSWIYPDQKENTHFTVLIHELAEAFQKDFTKSTKERLLLTAGVSAGRQMIDNSYQVEKLA

SEQ ID NO: 2773 - protein, 221 aa, Homo sapiens
MGATTMDQKSLWAGVVVLLLLQGGSAYKLVCYFTNWSQDRQEPGKFTPENIDPFLCSHLIYSFASIENNKVIIKDKSEVMLYQTINSLKTKNPKLKILLSIGGYLFGSKGFHPMVDSSTSRLEFINSIILFLRNHNFDGLDVSWIYPDQKENTHFTVLIHELAEAFQKDFTKSTKERLLLTAGVSAGRQMIDNSYQVEKLAKDLDFINLLSFDFHGSWEKP

SEQ ID NO: 2774 - protein, 390 aa, Homo sapiens
MGATTMDQKSLWAGVVVLLLLQGGSAYKLVCYFTNWSQDRQEPGKFTPENIDPFLCSHLIYSFASIENNKVIIKDKSEVMLYQTINSLKTKNPKLKILLSIGGYLFGSKGFHPMVDSSTSRLEFINSIILFLRNHNFDGLDVSWIYPDQKENTHFTVLIHELAEAFQKDFTKSTKERLLLTAGVSAGRQMIDNSYQVEKLAKDLDFINLLSFDFHGSWEKPLITGHNSPLSKGWQDRGPSSYYNVEYAVGYWIHKGMPSEKVVMGIPTYGHSFTLASAETTVGAPASGPGAAGPITESSGFLAYYEICQFLKGAKITRLQDQQVPYAVKGNQWVGYDDVKSMETKVQFLKNLNLGGAMIWSIDMDDFTGKSCNQGPYPLVQAVKRSLGSL

SEQ ID NO: 2775 - protein, 390 aa, Homo sapiens; identical to SEQ ID NO: 2774

SEQ ID NO: 2776 - protein, 145 aa, Homo sapiens
MLYQTINSLKTKFHPMVDSSTSRLEFINSIILFLRNHNFDGLDVSWIYPDQKENTHFTVLIHELAEAFQKDFTKSTKERLLLTAGVSAGRQMIDNSYQVEKLAKDLDFINLLSFDFHGSWEKPLITGHNSPLSKGWQDRGPSSYY

SEQ ID NO: 2777 - protein, 122 aa, Homo sapiens
MLYQTINSLKTKNPKLKILLSIGGYLFGSKGFHPMVDSSTSRLEFINSIILFLRNHNFDGLDVSWIYPDQKENTHFTVLIHELAEAFQKDFTKSTKERLLLTAGVSAGRQMIDNSYQVEKLA

SEQ ID NO: 2778 - protein, 169 aa, Homo sapiens
MLYQTINSLKTKNPKLKILLSIGGYLFGSKGFHPMVDSSTSRLEFINSIILFLRNHNFDGLDVSWIYPDQKENTHFTVLIHELAEAFQKDFTKSTKERLLLTAGVSAGRQMIDNSYQVEKLAKDLDFINLLSFDFHGSWEKPLITGHNSPLSKGWQDRGPSSYYNVEYA

SEQ ID NO: 2779 - protein, 311 aa, Homo sapiens
MLYQTINSLKTKNPKLKILLSIGGYLFGSKGFHPMVDSSTSRLEFINSIILFLRNHNFDGLDVSWIYPDQKENTHFTVLIHELAEAFQKDFTKSTKERLLLTAGVSAGRQMIDNSYQVEKLAKDLDFINLLSFDFHGSWEKPLITGHNSPLSKGWQDRGPSSYYNVEYAVGYWIHKGMPSEKVVMGIPTYGHSFTLASAETTVGAPASGPGAAGPITESSGFLAYYEICQFLKGAKITRLQDQQVPYAVKGNQWVGYDDVKSMETKVQFLKNLNLGGAMIWSIDMDDFTGKSCNQGPYPLVQAVKRSLGSL

SEQ ID NO: 2780 - protein, 311 aa, Homo sapiens; identical to SEQ ID NO: 2779

SEQ ID NO: 2781 - protein, 183 aa, Homo sapiens
PDQKENTHFTVLIHELAEAFQKDFTKSTKERLLLTAGVSAGRQMIDNSYQVEKLAKDLDFINLLSFDFHGSWEKPLITGHNSPLSKGWQDRGPSSYYNVICQFLKGAKITRLQDQQVPYAVKGNQWVGYDDVKSMETKVQFLKNLNLGGAMIWSIDMDDFTGKSCNQGPYPLVQAVKRSLGSL

SEQ ID NO: 2782 - protein, 161 aa, Homo sapiens
  SITE 1: note = misc_feature - Xaa can be any naturally occurring amino acid
XFTNWSQDRQEPGKFTPENIDPFLCSHLIYSFASIENNKVIIKDKSEVMLYQTINSLKTKNPKLKILLSIGGYLFGSKGDLDFINLLSFDFHGSWEKPLITGHNSPLSKGWQDRGPSSYYNVEYAVGYWIHKGMPSEKVVMGIPTYGHSFTLASAETTVGA

SEQ ID NO: 2783 - protein, 42 aa, Homo sapiens
YEICQFLKGAKITRLQDQQVPYAVKGNQWVGYDDVKSMETKD

SEQ ID NO: 2784 - protein, 420 aa, Homo sapiens
ETSSSVHEQVADSGAQAVAFQSGGESSIVWNSQLKTLLAIGGWNFGTAPFTAMVSTPENRQTFITSVIKFLRQYEFDGLDFDWEYPGSRGSPPQDKHLFTVLVQEMREAFEQEAKQINKPRLMVTAAVAAGISNIQSGYEIPQLSQYLDYIHVMTYDLHGSWEGYTGENSPLYKYPTDTGSNAYLNVDYVMNYWKDNGAPAEKLIVGFPTYGHNFILSNPSNTGIGAPTSGAGPAGPYAKESGIWAYYEICTFLKNGATQGWDAPQEVPYAYQGNVWVGYDNIKSFDIKAQWLKHNKFGGAMVWAIDLDDFTGTFCNQGKFPLISTLKKALGLQSASCTAPAQPIEPITAAPSGSGNGSGSSSSGGSSGGSGFCAVRANGLYPVANNRNAFWHCVNGVTYQQNCQAGLVFDTSCDCCNWA

SEQ ID NO: 2785 - protein, 315 aa, Homo sapiens
MREAFEQEAKQINKPRLMVTAAVAAGISNIQSGYEIPQLSQYLDYIHVMTYDLHGSWEGYTGENSPLYKYPTDTGSNAYLNVDYVMNYWKDNGAPAEKLIVGFPTYGHNFILSNPSNTGIGAPTSGAGPAGPYAKESGIWAYYEICTFLKNGATQGWDAPQEVPYAYQGNVWVGYDNIKSFDIKAQWLKHNKFGGAMVWAIDLDDFTGTFCNQGKFPLISTLKKALGLQSASCTAPAQPIEPITAAPSGSGNGSGSSSSGGSSGGSGFCAVRANGLYPVANNRNAFWHCVNGVTYQQNCQAGLVFDTSCDCCNWA

SEQ ID NO: 2786 - protein, 315 aa, Homo sapiens; identical to SEQ ID NO: 2785

SEQ ID NO: 2787 - protein, 287 aa, Homo sapiens
MREAFEQEAKQINKPRLMVTAAVAAGISNIQSGYEIPQLSQYLDYIHVMTYDLHGSWEGYTGENSPLYKYPTDTGSNAYLNVDYVMNYWKDNGAPAEKLIVGFPTYGHNFILSNPSNTGIGAPTSGAGPAGPYAKESGIWAYYEICTFLKNGATQGWDAPQEVPYAYQGNVWVGYDNIKSFDIKAQWLKHNKFGGAMVWAIDLDDFTGTFCNQGKFPLISTLKKALGLQSASCTAPAQPIEPITAAPSGSGNGSGSSSSGGSSGGSGFCAVRANGLYPVANNRNAFW

SEQ ID NO: 2788 - protein, 315 aa, Homo sapiens; identical to SEQ ID NO: 2785

SEQ ID NO: 2789 - protein, 476 aa, Homo sapiens [sequence omitted]

SEQ ID NO: 2790 - protein, 476 aa, Homo sapiens [sequence omitted]

SEQ ID NO: 2791 - protein, 368 aa, Homo sapiens
MVSTPENRQTFITSVIKFLRQYEFDGLDFDWEYPGSRGSPPQDKHLFTVLVQEMREAFEQEAKQINKPRLMVTAAVAAGISNIQSGYEIPQLSQYLDYIHVMTYDLHGSWEGYTGENSPLYKYPTDTGSNAYLNVDYVMNYWKDNGAPAEKLIVGFPTYGHNFILSNPSNTGIGAPTSGAGPAGPYAKESGIWAYYEICTFLKNGATQGWDAPQEVPYAYQGNVWVGYDNIKSFDIKAQWLKHNKFGGAMVWAIDLDDFTGTFCNQGKFPLISTLKKALGLQSASCTAPAQPIEPITAAPSGSGNGSGSSSSGGSSGGSGFCAVRANGLYPVANNRNAFWHCVNGVTYQQNCQAGLVFDTSCDCCNWA

SEQ ID NO: 2792 - protein, 101 aa, Homo sapiens
MVSTPENRQTFITSVIKFLRQYEFDGLDFDWEYPGSRGSPPQDKHLFTVLVQMRKLKYREDLSNLPKITQLVGIITSSAVWPQSPLLLSITLGCPLLLRNA

SEQ ID NO: 2793 - protein, 69 aa, Homo sapiens
LKDHRPRMVWDSQASEHFFEYKKSRSGRHVVFYPTLKSLQVRLELARELGVGVSIWELGQGLDYFYDLL

SEQ ID NO: 2794 - protein, 26 aa, Homo sapiens
MRTLFNLLWLALACSPVHTTLSKSDA

SEQ ID NO: 2795 - protein, 84 aa, Homo sapiens
MRTLFNLLWLALACSPVHTTLSKSDAKKAASKTLLEKAGAQWRDLGSPQPLPPRFKRFSCFSLPSSWDYRVSFQISRCKTGVWW

SEQ ID NO: 2796 - protein, 84 aa, Homo sapiens
MRTLFNLLWLALACSPVHTTLSKSDAKKAASKTLLEKSQFSDKPVQDRGLVVTDLKAESVVLEHRSYCSAKARDRHFAGDVLGY

SEQ ID NO: 2797 - protein, 116 aa, Homo sapiens
MRTLFNLLWLALACSPVHTTLSKSDAKKAASKTLLEKSQFSDKPVQDRGLVVTDLKAESVVLEHRSYCSAKARDRHFAGDVLGYVTPWNSHGYDVTKVFGSKFTQISPVWLQLKRR

SEQ ID NO: 2798 - protein, 119 aa, Homo sapiens
MRTLFNLLWLALACSPVHTTLSKSDAKKAASKTLLEKSQFSDKPVQDRGLVVTDLKAESVVLEHRSYCSAKARDRHFAGDVLGYVTPWNSHGYDVTKVFGSKFTQISPVWLQLKRRGRE

SEQ ID NO: 2799 - protein, 224 aa, Homo sapiens
MRTLFNLLWLALACSPVHTTLSKSDAKKAASKTLLEKSQFSDKPVQDRGLVVTDLKAESVVLEHRSYCSAKARDRHFAGDVLGYVTPWNSHGYDVTKVFGSKFTQISPVWLQLKRRGREMFEARLLALLVIPPAITPGTDQLGMFTHKEFEQLAPVLDGFSLMTYDYSTAHQPGPNAPLSWVRACVQVLDPKSKWRSKILLGLNFYGMDYATSKDAREPVVGAR

SEQ ID NO: 2800 - protein, 132 aa, Homo sapiens
MRTLFNLLWLALACSPVHTTLSKSDAKKAASKTLLEKSQFSDKPVQDRGLVVTDLKAESVVLEHRSYCSAKARDRHFAGDVLGYVTPWNSHGYDVTKVFGSKFTQISPVWLQLKRRGREMFEVTGLHDVDQG

SEQ ID NO: 2801 - protein, 162 aa, Homo sapiens
MRTLFNLLWLALACSPVHTTLSKSDAKKAASKTLLEKSQFSDKPVQDRGLVVTDLKAESVVLEHRSYCSAKARDRHFAGDVLGYVTPWNSHGYDVTKVFGSKFTQISPVWLQLKRRGREMFEVTGLHDVDQGSHPSCLTVLAPQAEKSGGCELSGSMPRACT

SEQ ID NO: 2802 - protein, 393 aa, Homo sapiens
MRTLFNLLWLALACSPVHTTLSKSDAKKAASKTLLEKSQFSDKPVQDRGLVVTDLKAESVVLEHRSYCSAKARDRHFAGDVLGYVTPWNSHGYDVTKVFGSKFTQISPVWLQLKRRGREMFEVTGLHDVDQGWMRAVRKHAKGLHIVPRLLFEDWTYDDFRNVLDSEDEIEELSKTVVQVAKNQHFDGFVVEVWNQLLSQKRVGLIHMLTHLAEALHQARLLALLVIPPAITPGTDQLGMFTHKEFEQLAPVLDGFSLMTYDYSTAHQPGPNAPLSWVRACVQVLDPKSKWRSKILLGLNFYGMDYATSKDAREPVVGARYIQTLKDHRPRMVWDSQASEHFFEYKKSRSGRHVVFYPTLKSLQVRLELARELGVGVSIWELGQGLDYFYDLL

SEQ ID NO: 2803 - protein, 393 aa, Homo sapiens; identical to SEQ ID NO: 2802

SEQ ID NO: 2804 - protein, 393 aa, Homo sapiens; identical to SEQ ID NO: 2802

SEQ ID NO: 2805 - protein, 362 aa, Homo sapiens
MRTLFNLLWLALACSPVHTTLSKSDAKKAASKTLLEKSQFSDKPVQDRGLVVTDLKAESVVLEHRSYCSAKARDRHFAGDVLGYVTPWNSHGYDVTKVFGSKFTQISPVWLQLKRRGREMFEVTGLHDVDQGWMRAVRKHAKGLHIVPRLLFEDWTYDDFRNVLDSEDEIEELSKTVVQVAKNQHFDGFVVEVWNQLLSQKRVTDQLGMFTHKEFEQLAPVLDGFSLMTYDYSTAHQPGPNAPLSWVRACVQVLDPKSKWRSKILLGLNFYGMDYATSKDAREPVVGARYIQTLKDHRPRMVWDSQASEHFFEYKKSRSGRHVVFYPTLKSLQVRLELARELGVGVSIWELGQGLDYFYDLL

SEQ ID NO: 2806 - protein, 38 aa, Homo sapiens
MRTLFNLLWLALACSPVHTTLSKSDAKKAASKTLLEKV

SEQ ID NO: 2807 - protein, 418 aa, Homo sapiens
MRTLFNLLWLALACSPVHTTLSKSDAKKAASKTLLEKVKFCSCCPGWSAMARSWLTATSATQSQFSDKPVQDRGLVVTDLKAESVVLEHRSYCSAKARDRHFAGDVLGYVTPWNSHGYDVTKVFGSKFTQISPVWLQLKRRGREMFEVTGLHDVDQGWMRAVRKHAKGLHIVPRLLFEDWTYDDFRNVLDSEDEIEELSKTVVQVAKNQHFDGFVVEVWNQLLSQKRVGLIHMLTHLAEALHQARLLALLVIPPAITPGTDQLGMFTHKEFEQLAPVLDGFSLMTYDYSTAHQPGPNAPLSWVRACVQVLDPKSKWRSKILLGLNFYGMDYATSKDAREPVVGARYIQTLKDHRPRMVWDSQASEHFFEYKKSRSGRHVVFYPTLKSLQVRLELARELGVGVSIWELGQGLDYFYDLL

SEQ ID NO: 2808 - protein, 418 aa, Homo sapiens; identical to SEQ ID NO: 2807

SEQ ID NO: 2809 - protein, 84 aa, Homo sapiens
  SITE 1: note = misc_feature - Xaa can be any naturally occurring amino acid
XDAREPVVGARYIQTLKDHRPRMVWDSQASEHFFEYKKSRSGRHVVFYPTLKSLQVRLELARELGVGVSIWELGQGLDYFYDLL

SEQ ID NO: 2810 - protein, 108 aa, Homo sapiens
  SITE 1: note = misc_feature - Xaa can be any naturally occurring amino acid
XPKSKWRSKILLGLNFYGMDYATSKDAREPVVGARYIQTLKDHRPRMVWDSQASEHFFEYKKSRSGRHVVFYPTLKSLQVRLELARELGVGVSIWELGQGLDYFYDLL

SEQ ID NO: 2811 - protein, 72 aa, Homo sapiens
  SITE 1: note = misc_feature - Xaa can be any naturally occurring amino acid
XQLGMFTHKEFEQLAPVLDGFSLMTYDYSTAHQPGPNAPLSWVRACVQVLDPKSKWRSKILLGLNFYGTSRH

SEQ ID NO: 2812 - protein, 447 aa, Homo sapiens
MVRSVAWAGFMVLLMIPWGSAAKLVCYFTNWAQYRQGEARFLPKDLDPSLCTHLIYAFAGMTNHQLSTTEWNDETLYQEFNGLKKMFTDMVATANNRQTFVNSAIRFLRKYSFDGLDLDWEYPGSQGSPAVDKERFTTLVQDLANAFQQEAQTSGKERLLLSAAVPAGQTYVDAGYEVDKIAQNLDFVNLMAYDFHGSWEKVTGHNSPLYKRQEESGAAASLNVDAAVQQWLQKGTPASKLILGMPTYGRSFTLASSSDTRVGAPATGSGTPGPFTKEGGMLAYYEVCSWKGATKQRIQDQKVPYIFRDNQWVGFDDVESFKTKVSYLKQKGLGGAMVWALDLDDFAGFSCNQGRYPLIQTLRQELSLPYLPSGTPELEVPKPGQPSEPEHGPSPGQDTFCQGKADGLYPNPRERSSFYSCAAGRLFQQSCPTGLVFSNSCKCCTWN

SEQ ID NO: 2813 - protein, 466 aa, Homo sapiens
MVRSVAWAGFMVLLMIPWGSAAKLVCYFTNWAQYRQGEARFLPKDLDPSLCTHLIYAFAGMTNHQLSTTEWNDETLYQEFNGLKKMNPKLKTLLAIGGWNFGTQKFTDMVATANNRQTFVNSAIRFLRKYSFDGLDLDWEYPGSQGSPAVDKERFTTLVQDLANAFQQEAQTSGKERLLLSAAVPAGQTYVDAGYEVDKIAQNLDFVNLMAYDFHGSWEKVTGHNSPLYKRQEESGAAASLNVDAAVQQWLQKGTPASKLILGMPTYGRSFTLASSSDTRVGAPATGSGTPGPFTKEGGMLAYYEVCSWKGATKQRIQDQKVPYIFRDNQWVGFDDVESFKTKVSYLKQKGLGGAMVWALDLDDFAGFSCNQGRYPLIQTLRQELSLPYLPSGTPELEVPKPGQPSEPEHGPSPGQDTFCQGKADGLYPNPRERSSFYSCAAGRLFQQSCPTGLVFSNSCKCCTWN

SEQ ID NO: 2814 - protein, 387 aa, Homo sapiens
MVRSVAWAGFMVLLMIPWGSAAKLVCYFTNWAQYRQGEARFLPKDLDPSLCTHLIYAFAGMTNHQLSTTEWNDETLYQEFNGLKKMNPKLKTLLAIGGWNFGTQKFTDMVATANNRQTFVNSAIRFLRKYSFDGLDLDWEYPGSQGSPAVDKERFTTLVQDLANAFQQEAQTSGKERLLLSAAVPAGQTYVDAGYEVDKIAQNLDFVNLMAYDFHGSWEKVTGHNSPLYKRQEESGAAASLNVDAAVQQWLQKGTPASKLILGMPTYGRSFTLASSSDTRVGAPATGSGTPGPFTKEGGMLAYYEVCSWKGATKQRIQDQKVPYIFRDNQWVGFDDVESFKTKVSYLKQKGLGGAMVWALDLDDFAGFSCNQGRYPLIQTLRQELNG

SEQ ID NO: 2815 - protein, 361 aa, Homo sapiens
MVRSVAWAGFMVLLMIPWGSAAKLVCYFTNWAQYRQGEARFLPKDLDPSLCTHLIYAFAGMTNHQLSTTEWNDETLYQEFNGLKKMNPKLKTLLAIGGWNFGTQKFTDMVATANNRQTFVNSAIRFLRKYSFDGLDLDWEYPGSQGSPAVDKERFTTLVQDLANAFQQEAQTSGKERLLLSAAVPAGQTYVDAGYEVDKIAQNLDFVNLMAYDFHGSWEKVTGHNSPLYKRQEESGAAASLNVDAAVQQWLQKGTPASKLILGMPTYGRSFTLASSSDTRVGAPATGSGTPGPFTKEGGMLAYYEVCSWKGATKQRIQDQKVPYIFRDNQWVGFDDVESFKTKVMLTLRQGDCKMTDVQAA

SEQ ID NO: 2816 - protein, 66 aa, Homo sapiens
MEPLLLGRGLIVYLMFLLLKFSKAIEIPSSVQQVPTIIKQSKVQVAFPFDEYFQIECEAKGNPEPT

SEQ ID NO: 2817 - protein, 85 aa, Homo sapiens
MEPLLLGRGLIVYLMFLLLKFSKAIEIPSSVQQVPTIIKQSKVQVAFPFDEYFQIECEAKGNPEPTFSWTKDGNPFYFTDHRIIP

SEQ ID NO: 2818 - protein, 96 aa, Homo sapiens
MEPLLLGRGLIVYLMFLLLKFSKAIEIPSSVQQVPTIIKQSKVQVAFPFDEYFQIECEAKGNPEPTFSWTKDGNPFYFTDHRIIPSNNSGTFRIPN

SEQ ID NO: 2819 - protein, 181 aa, Homo sapiens
MEPLLLGRGLIVYLMFLLLKFSKAIEIPSSVQQVPTIIKQSKVQVAFPFDEYFQIECEAKGNPEPTFSWTKDGNPFYFTDHRIIPSNNSGTFRIPNEGHISHFQGKYRCFASNKLGIAMSEEIEFIVPSVPKFPKEKIDPLEVEEGDPIVLPCNPPKGLPPLHIYWMNIELEHIEQDERVY

SEQ ID NO: 2820 - protein, 1224 aa, Homo sapiens
MEPLLLGRGLIVYLMFLLLKFSKAIEIPSSVQQVPTIIKQSKVQVAFPFDEYFQIECEAKGNPEPTFSWTKDGNPFYFTDHRIIPSNNSGTFRIPNEGHISHFQGKYRCFASNKLGIAMSEEIEFIVPSVPKFPKEKIDPLEVEEGDPIVLPCNPPKGLPPLHIYWMNIELEHIEQDERVYMSQKGDLYFANVEEKDSRNDYCCFAAFPRLRTIVQKMPMKLTVNSLKHANDSSSSTEIGSKANSIKQRKPKLLLPPTESGSESSITILKGEILLLECFAEGLPTPQVDWNKIGGDLPKGRETKENYGKTLKIENVSYQDKGNYRCTASNFLGTATHDFHVIVEEPPRWTKKPQSAVYSTGSNGILLCEAEGEPQPTIKWRVNGSPVDNHPFAGDVVFPREISFTNLQPNHTAVYQCEASNVHGTILANANIDVVDVRPLIQTKDGENYATVVGYSAFLHCEFFASPEAVVSWQKVEEVKPLEGRRYHIYENGTLQINRTTEEDAGSYSCWVENAIGKTAVTANLDIRNATKLRVSPKNPRIPKLHMLELHCESKCDSHLKHSLKLSWSKDGEAFEINGTEDGRIIIDGANLTISNVTLEDQGIYCCSAHTALDSAADITQVTVLDVPDPPENLHLSERQNRSVRLTWEAGADHNSNISEYIVEFEGNKEEPGRWEELTRVQGKKTTVILPLAPFVRYQFRVIAVNEVGRSQPSQPSDHHETPPAAPDRNPQNIRVQASQPKEMIIKWEPLKSMEQNGPGLEYRVTWKPQGAPVEWEEETVTNHTLRVMTPAVYAPYDVKVQAINQLGSGPDPQSVTLYSGEDYPDTAPVIHGVDVINSTLVKVTWSTVPKDRVHGRLKGYQINWWKTKSLLDGRTHPKEVNILRFSGQRNSGMVPSLDAFSEFHLTVLAYNSKGAGPESEPYIFQTPEGVPEQPTFLKVIKVDKDTATLSWGLPKKLNGNLTGYLLQYQIINDTYEIGELNDINITTPSKPSWHLSNLNATTKYKFYLRACTSQGCGKPITEESSTLGEGSKGIGKISGVNLTQKTHPIEVFEPGAEHIVRLMTKNWGDNDSIFQDVIETRGREYAGLYDDISTQGWFIGLMCAIALLTLLLLTVCFVKRNRGGKYSVKEKEDLHPDPEIQSVKDETFGEYSDSDEKPLKGSLRSLNRDMQPTESADSLVEYGEGDHGLFSEDGSFIGAYAGSKEKGSVESNGSSTATFPLRA

SEQ ID NO: 2821 - protein, 1171 aa, Homo sapiens
MEPLLLGRGLIVYLMFLLLKFSKAIEIPSSVQQVPTIIKQSKVQVAFPFDEYFQIECEAKGNPEPTFSWTKDGNPFYFTDHRIIPSNNSGTFRIPNEGHISHFQGKYRCFASNKLGIAMSEEIEFIVPSVPKFPKEKIDPLEVEEGDPIVLPCNPPKGLPPLHIYWMNIELEHIEQDERVYMSQKGDLYFANVEEKDSRNDYCCFAAFPRLRTIVQKMPMKLTVNSLKHANDSSSSTEIGSKANSIKQRKPKLLLPPTESGSESSITILKGEILLLECFAEGLPTPQVDWNKIGGDLPKGRETKENYGKTLKIENVSYQDKGNYRCTASNFLGTATHDFHVIVEEPPRWTKKPQSAVYSTGSNGILLCEAEGEPQPTIKWRVNGSPVDNHPFAGDVVFPREISFTNLQPNHTAVYQCEASNVHGTILANANIDVVDVRPLIQTKDGENYATVVGYSAFLHCEFFASPEAVVSWQKVEEVKPLEGRRYHIYENGTLQINRTTEEDAGSYSCWVENAIGKTAVTANLDIRNATKLRVSPKNPRIPKLHMLELHCESKCDSHLKHSLKLSWSKDGEAFEINGTEDGRIIIDGANLTISNVTLEDQGIYCCSAHTALDSAADITQVTVLDVPDPPENLHLSERQNRSVRLTWEAGADHNSNISEYIVEFEGNKEEPGRWEELTRVQGKKTTVILPLAPFVRYQFRVIAVNEVGRSQPSQPSDHHETPPAAPDRNPQNIRVQASQPKEMIIKWEPLKSMEQNGPGLEYRVTWKPQGAPVEWEEETVTNHTLRVMTPAVYAPYDVKVQAINQLGSGPDPQSVTLYSGEDYPDTAPVIHGVDVINSTLVKVTWSTVPKDRVHGRLKGYQINWWKTKSLLDGRTHPKEVNILRFSGQRNSGMVPSLDAFSEFHLTVLAYNSKGAGPESEPYIFQTPEGVPEQPTFLKVIKVDKDTATLSWGLPKKLNGNLTGYLLQYQIINDTYEIGELNDINITTPSKPSWHLSNLNATTKYKFYLRACTSQGCGKPITEESSTLGEGKYAGLYDDISTQGWFIGLMCAIALLTLLLLTVCFVKRNRGGKYSVKEKEDLHPDPEIQSVKDETFGEYSDSDEKPLKGSLRSLNRDMQPTESADSLVEYGEGDHGLFSEDGSFIGAYAGSKEKGSVESNGSSTATFPLRA

SEQ ID NO: 2822 - protein, 1208 aa, Homo sapiens
MEPLLLGRGLIVYLMFLLLKFSKAIEIPSSVQQVPTIIKQSKVQVAFPFDEYFQIECEAKGNPEPTFSWTKDGNPFYFTDHRIIPSNNSGTFRIPNEGHISHFQGKYRCFASNKLGIAMSEEIEFIVPSVPKFPKEKIDPLEVEEGDPIVLPCNPPKGLPPLHIYWMNIELEHIEQDERVYMSQKGDLYFANVEEKDSRNDYCCFAAFPRLRTIVQKMPMKLTVNSSNSIKQRKPKLLLPPTESGSESSITILKGEILLLECFAEGLPTPQVDWNKIGGDLPKGRETKENYGKTLKIENVSYQDKGNYRCTASNFLGTATHDFHVIVEEPPRWTKKPQSAVYSTGSNGILLCEAEGEPQPTIKWRVNGSPVDNHPFAGDVVFPREISFTNLQPNHTAVYQCEASNVHGTILANANIDVVDVRPLIQTKDGENYATVVGYSAFLHCEFFASPEAVVSWQKVEEVKPLEGRRYHIYENGTLQINRTTEEDAGSYSCWVENAIGKTAVTANLDIRNATKLRVSPKNPRIPKLHMLELHCESKCDSHLKHSLKLSWSKDGEAFEINGTEDGRIIIDGANLTISNVTLEDQGIYCCSAHTALDSAADITQVTVLDVPDPPENLHLSERQNRSVRLTWEAGADHNSNISEYIVEFEGNKEEPGRWEELTRVQGKKTTVILPLAPFVRYQFRVIAVNEVGRSQPSQPSDHHETPPAAPDRNPQNIRVQASQPKEMIIKWEPLKSMEQNGPGLEYRVTWKPQGAPVEWEEETVTNHTLRVMTPAVYAPYDVKVQAINQLGSGPDPQSVTLYSGEDYPDTAPVIHGVDVINSTLVKVTWSTVPKDRVHGRLKGYQINWWKTKSLLDGRTHPKEVNILRFSGQRNSGMVPSLDAFSEFHLTVLAYNSKGAGPESEPYIFQTPEGVPEQPTFLKVIKVDKDTATLSWGLPKKLNGNLTGYLLQYQIINDTYEIGELNDINITTPSKPSWHLSNLNATTKYKFYLRACTSQGCGKPITEESSTLGEGSKGIGKISGVNLTQKTHPIEVFEPGAEHIVRLMTKNWGDNDSIFQDVIETRGREYAGLYDDISTQGWFIGLMCAIALLTLLLLTVCFVKRNRGGKYSVKEKEDLHPDPEIQSVKDETFGEYSDSDEKPLKGSLRSLNRDMQPTESADSLVEYGEGDHGLFSEDGSFIGAYAGSKEKGSVESNGSSTATFPLRA

SEQ ID NO: 2823 - protein, 93 aa, Homo sapiens
MPPAWSGESMDRGVVGLGSTKTQRGARAPPPQTAEGREGAPGAVVAMAPGSGARGAGDAGRGWSLLPLCASLFLSLFFFFWSVSVRGEAARRK

SEQ ID NO: 2824 - protein, 358 aa, Homo sapiens
  SITE 1: note = misc_feature - Xaa can be any naturally occurring amino acid
XSVTLYSGEDYPDTAPVIHGVDVINSTLVKVTWSTVPKDRVHGRLKGYQINWWKTKSLLDGRTHPKEVNILRFSGQRNSGMVPSLDAFSEFHLTVLAYNSKGAGPESEPYIFQTPEGVPEQPTFLKVIKVDKDTATLSWGLPKKLNGNLTGYLLQYQIINDTYEIGELNDINITTPSKPSWHLSNLNATTKYKFYLRACTSQGCGKPITEESSTLGEGKYAGLYDDISTQGWFIGLMCAIALLTLLLLTVCFVKRNRGGKYSVKEKEDLHPDPEIQSVKDETFGEYSDSDEKPLKGSLRSLNRDMQPTESADSLVEYGEGDHGLFSEDGSFIGAYAGSKEKGSVESNGSSTATFPLRA

SEQ ID NO: 2825 - protein, 23 aa, Homo sapiens
MALTLFDTDEYRPPVWKSYCFMA

SEQ ID NO: 2826 - protein, 459 aa, Homo sapiens
MALTLFDTDEYRPPVWKSYLYQLQQEAPHPRRITCTCEVENRPKYYGREFHGMISREAADQLLIVAEGSYLIRESQRQPGTYTLALRFGSQTRNFRLYYDGKHFVGEKRFESIHDLVTDGLITLYIETKAAEYIAKMTINPIYEHVGYTTLNREPAYKKHMPVLKETHDERDSTGQDGVSEKRLTSLVRRATLKENEQIPKYEKIHNFKVHTFRGPHWCEYCANFMWGLIAQGVKCADCGLNVHKQCSKMVPNDCKPDLKHVKKVYSCDLTTLVKAHTTKRPMVVDMCIREIESRGLNSEGLYRVSGFSDLIEDVKMAFDRDGEKADISVNMYEDINIITGALKLYFRDLPIPLITYDAYPKFIESAKIMDPDEQLETLHEALKLLPPAHCETLRYLMAHLKRVTLHEKENLMNAENLGIVFGPTLMRSPELDAMAALNDIRYQRLVVELLIKNEDILF

SEQ ID NO: 2827 - protein, 433 aa, Homo sapiens
MALTLFDTDEYRPPVWKSYLYQLQQEAPHPRRITCTCEVENRPKYYGREFHGMISREAADQLLIVAEGSYLIRESQRQPGTYTLALRFGSQTRNFRLYYDGKHFVGEKRFESIHDLVTDGLITLYIETKAAEYIAKMTINPIYEHVGYTTLNREPAYKKHMPVLKETHDERDSTGQDGVSEKRVHTFRGPHWCEYCANFMWGLIAQGVKCADCGLNVHKQCSKMVPNDCKPDLKHVKKVYSCDLTTLVKAHTTKRPMVVDMCIREIESRGLNSEGLYRVSGFSDLIEDVKMAFDRDGEKADISVNMYEDINIITGALKLYFRDLPIPLITYDAYPKFIESAKIMDPDEQLETLHEALKLLPPAHCETLRYLMAHLKRVTLHEKENLMNAENLGIVFGPTLMRSPELDAMAALNDIRYQRLVVELLIKNEDILF

SEQ ID NO: 2828 - protein, 22 aa, Homo sapiens
MALTLFDTDEYRPPVWKSYYIL

SEQ ID NO: 2829 - protein, 185 aa, Homo sapiens
MATMGLLMLLTLAASPHFLSICFHHVCVHTFRGPHWCEYCANFMWGLIAQGVKCADCGLNVHKQCSKMVPNDCKPDLKHVKKVYSCDLTTLVKAHTTKRPMVVDMCIREIESRGLNSEGLYRVSGFSDLIEDVKMAFDRDGEKADISVNMYEDINIITGALKLYFRDLPIPLITYDAYPKFIESA

SEQ ID NO: 2830 - protein, 275 aa, Homo sapiens
MATMGLLMLLTLAASPHFLSICFHHVHTFRGPHWCEYCANFMWGLIAQGVKCADCGLNVHKQCSKMVPNDCKPDLKHVKKVYSCDLTTLVKAHTTKRPMVVDMCIREIESRGLNSEGLYRVSGFSDLIEDVKMAFDRDGEKADISVNMYEDINIITGALKLYFRDLPIPLITYDAYPKFIESAKIMDPDEQLETLHEALKLLPPAHCETLRYLMAHLKRVTLHEKENLMNAENLGIVFGPTLMRSPELDAMAALNDIRYQRLVVELLIKNEDILF

SEQ ID NO: 2831 - protein, 334 aa, Homo sapiens
MPSKESWSGRKTNRAAVHKSKQEGRQQDLLIAALGMKLGSPKSSVTIWQPLKLFAYSQLTSLVRRATLKENEQIPKYEKIHNFKVHTFRGPHWCEYCANFMWGLIAQGVKCADCGLNVHKQCSKMVPNDCKPDLKHVKKVYSCDLTTLVKAHTTKRPMVVDMCIREIESRGLNSEGLYRVSGFSDLIEDVKMAFDRDGEKADISVNMYEDINIITGALKLYFRDLPIPLITYDAYPKFIESAKIMDPDEQLETLHEALKLLPPAHCETLRYLMAHLKRVTLHEKENLMNAENLGIVFGPTLMRSPELDAMAALNDIRYQRLVVELLIKNEDILF

SEQ ID NO: 2832 - protein, 165 aa, Homo sapiens
MPSKESWSGRKTNRAAVHKSKQEGRQQDLLIAALGMKLGSPKSSVTIWQPLKLFAYSQLTSLVRRATLKENEQIPKYEKIHNFKVHTFRGPHWCEYCANFMWGLIAQGVKCAVLEARKSKIKLAAGSVSDCGLNVHKQCSKMVPNDCKPDLKHVKKVYSCDLTTL

SEQ ID NO: 2833 - protein, 186 aa, Homo sapiens
MRGGRNRDRLTSLVRRATLKENEQIPKYEKIHNFKVHTFRGPHWCEYCANFMWGLIAQGVKCADCGLNVHKQCSKMVPNDCKPDLKHVKKVYSCDLTTLVKAHTTKRPMVVDMCIREIESRGLNSEGLYRVSGFSDLIEDVKMAFDRDGEKADISVNMYEDINIITGALKLYFRDLPIPLITYDAY

SEQ ID NO: 2834 - protein, 173 aa, Homo sapiens
MWGLIAQGVKCADCGLNVHKQCSKMVPNDCKPDLKHVKKVYSCDLTTLVKAHTTKRPMVVDMCIREIESRGLNSEGLYRVSGFSDLIEDVKMAFDRDGEKADISVNMYEDINIITGALKLYFRDLPIPLITYDAYPKFIESAKIMDPDEQLETLHEALKLLPPAHCETLRYLM

SEQ ID NO: 2835 - protein, 194 aa, Homo sapiens
MWGLIAQGVKCAVLEARKSKIKLAAGSVSDCGLNVHKQCSKMVPNDCKPDLKHVKKVYSCDLTTLVKAHTTKRPMVVDMCIREIESRGLNSEGLYRVSGFSDLIEDVKMAFDRDGEKADISVNMYEDINIITGALKLYFRDLPIPLITYDAYPKFIESAKIMDPDEQLETLHEALKLLPPAHCETLRYLMAHLK

SEQ ID NO: 2836 - protein, 613 aa, Homo sapiens
MAVVTLGEERPIGHLHLALRHLLEQHGDDFDWFFLVPDTTYTEAHGLARLTGHLSLASAAHLYLGRPQDFIGGEPTPGRYCHGGFGVLLSRMLLQQLRPHLEGCRNDIVSARPDEWLGRCILDATGVGCTGDHEGVHYSHLELSPGEPVQEGDPHFRSALTAHPVRDPVHMYQLHKAFARAELERTYQEIQELQWEIQNTSHLAVDGDQAAAWPVGIPAPSRPASRFEVLRWDYFTEQHAFSCADGSPRCPLRGADRADVADVLGTALEELNRRYHPALRLQKQQLVNGYRRFDPARGMEYTLDLQLEALTPQGGRRPLTRRVQLLRPLSRVEILPVPYVTEASRLTVLLPLAAAERDLAPGFLEAFATAALEPGDAAAALTLLLLYEPRQAQRVAHADVFAPVKAHVAELERRFPGARVPWLSVQTAAPSPLRLMDLLSKKHPLDTLFLLAGPDTVLTPDFLNRCRMHAISGWQAFFPMHFQAFHPAVAPPQGPGPPELGRDTGRFDRQAASEACFYNSDYVAARGRLAAASEQEEELLESLDVYELFLHFSSLHVLRAVEPALLQRYRAQTCSARLSEDLYHRCLQSVLEGLGSRTQLAMLLFEQEQGNST

SEQ ID NO: 2837 - protein, 775 aa, Homo sapiens
MRASLLLSVLRPAGPVAVGISLGFTLSLLSVTWVEEPCGPGPPQPGDSELPPRGNTNAARRPNSVQPGAEREKPGAGEGAGENWEPRVLPYHPAQPGQAAKKAVRTRYISTELGIRQRLLVAVLTSQTTLPTLGVAVNRTLGHRLERVVFLTGARGRRAPPGMAVVTLGEERPIGHLHLALRHLLEQHGDDFDWFFLVPDTTYTEAHGLARLTGHLSLASAAHLYLGRPQDFIGGEPTPGRYCHGGFGVLLSRMLLQQLRPHLEGCRNDIVSARPDEWLGRCILDATGVGCTGDHEGVHYSHLELSPGEPVQEGDPHFRSALTAHPVRDPVHMYQLHKAFARAELERTYQEIQELQWEIQNTSHLAVDGDQAAAWPVGIPAPSRPASRFEVLRWDYFTEQHAFSCADGSPRCPLRGADRADVADVLGTALEELNRRYHPALRLQKQQLVNGYRRFDPARGMEYTLDLQLEALTPQGGRRPLTRRVQLLRPLSRVEILPVPYVTEASRLTVLLPLAAAERDLAPGFLEAFATAALEPGDAAAALTLLLLYEPRQAQRVAHADVFAPVKAHVAELERRFPGARVPWLSVQTAAPSPLRLMDLLSKKHPLDTLFLLAGPDTVLTPDFLNRCRMHAISGWQAFFPMHFQAFHPAVAPPQGPGPPELGRDTGRFDRQAASEACFYNSDYVAARGRLAAASEQEEELLESLDVYELFLHFSSLHVLRAVEPALLQRYRAQTCSARLSEDLYHRCLQSVLEGLGSRTQLAMLLFEQEQGNST

SEQ ID NO: 2838 - protein, 298 aa, Homo sapiens
MRASLLLSVLRPAGPVAVGISLGFTLSLLSVTWVEEPCGPGPPQPGDSELPPRGNTNAARRPNSVQPGAEREKPGAGEGAGENWEPRVLPYHPAQPGQAAKKAVRTRYISTELGIRQRLLVAVLTSQTTLPTLGVAVNRTLGHRLERVVFLTGARGRRAPPGMAVVTLGEERPIGHLHLALRHLLEQHGDDFDWFFLVPDTTYTEAHGLARLTGHLSLASAAHLYLGRPQDFIGGEPTPGRYCHGGFGVLLSRMLLQQLRPHLEGCRNDIVSARPDEWLGRCILDATGVGCTGDHEVG

SEQ ID NO: 2839 - protein, 123 aa, Homo sapiens
CHGGFGYLLSRSLLLRLRPHLDGCRGDILSARPDEWLGRCLIDSLGVGCVSQHQGQQYRSFELAKNRDPEKEGSSAFLSAFAVHPVSEGTLMYRLHKRFSALELERAYSEIEQLQNCPKKAQG

SEQ ID NO: 2840 - protein, 90 aa, Homo sapiens
MLSLARPPLPPTGLRTRTRYIQTELGSRERLLVAVLTSRATLSTLAVAVNRTVAHHFPRLLYFTGQRGARAPAGMQVVSHGDERPAWLMS

SEQ ID NO: 2841 - protein, 764 aa, Homo sapiens
MLSLARPPLPPTGLRTSLSLLRVSWIQGEGEDPCVEAVGERGGPQNPDSRARLDQSDEDFKPRIVPYYRDPNKPYKKVLRTRYIQTELGSRERLLVAVLTSRATLSTLAVAVNRTVAHHFPRLLYFTGQRGARAPAGMQVVSHGDERPAWLMSETLRHLHTHFGADYDWFFIMQDDTYVQAPRLAALAGHLSINQDLYLGRAEEFIGAGEQARYCHGGFGYLLSRSLLLRLRPHLDGCRGDILSARPDEWLGRCLIDSLGVGCVSQHQGQQYRSFELAKNRDPEKEGSSAFLSAFAVHPVSEGTLMYRLHKRFSALELERAYSEIEQLQAQIRNLTVLTPEGEAGLSWPVGLPAPFTPHSRFEVLGWDYFTEQHTFSCADGAPKCPLQGASRADVGDALETALEQLNRRYQPRLRFQKQRLLNGYRRFDPARGMEYTLDLLLECVTQRGHRRALARRVSLLRPLSRVEILPMPYVTEATRVQLVLPLLVAEAAAAPAFLEAFAANVLEPREHALLTLLLVYGPREGGRGAPDPFLGVKAAAAELERRYPGTRLAWLAVRAEAPSQVRLMDVVSKKHPVDTLFFLTTVWTRPGPEVLNRCRMNAISGWQAFFPVHFQEFNPALSPQRSPPGPPGAGPDPPSPPGADPSRGAPIGGRFDRQASAEGCFYNADYLAARARLAGELAGQEEEEALEGLEVMDVFLRFSGLHLFRAVEPGLVQKFSLRDCSPRLSEELYHRCRLSNLEGLGGRAQLAMALFEQEQANST

SEQ ID NO: 2842 - protein, 772 aa, Homo sapiens
MRLSSLLALLRPALPLILGLSLGCSLSLLRVSWIQGEGEDPCVEAVGERGGPQNPDSRARLDQSDEDFKPRIVPYYRDPNKPYKKVLRTRYIQTELGSRERLLVAVLTSRATLSTLAVAVNRTVAHHFPRLLYFTGQRGARAPAGMQVVSHGDERPAWLMSETLRHLHTHFGADYDWFFIMQDDTYVQAPRLAALAGHLSINQDLYLGRAEEFIGAGEQARYCHGGFGYLLSRSLLLRLRPHLDGCRGDILSARPDEWLGRCLIDSLGVGCVSQHQGQQYRSFELAKNRDPEKEGSSAFLSAFAVHPVSEGTLMYRLHKRFSALELERAYSEIEQLQAQIRNLTVLTPEGEAGLSWPVGLPAPFTPHSRFEVLGWDYFTEQHTFSCADGAPKCPLQGASRADVGDALETALEQLNRRYQPRLRFQKQRLLNGYRRFDPARGMEYTLDLLLECVTQRGHRRALARRVSLLRPLSRVEILPMPYVTEATRVQLVLPLLVAEAAAAPAFLEAFAANVLEPREHALLTLLLVYGPREGGRGAPDPFLGVKAAAAELERRYPGTRLAWLAVRAEAPSQVRLMDVVSKKHPVDTLFFLTTVWTRPGPEVLNRCRMNAISGWQAFFPVHFQEFNPALSPQRSPPGPPGAGPDPPSPPGADPSRGAPIGGRFDRQASAEGCFYNADYLAARARLAGELAGQEEEEALEGLEVMDVFLRFSGLHLFRAVEPGLVQKFSLRDCSPRLSEELYHRCRLSNLEGLGGRAQLAMALFEQEQANST

SEQ ID NO: 2843 - protein, 86 aa, Homo sapiens
MPSLPAPPAPLLLLGLLLLGSRPARGAGPEPPVLPIRSEKEPLPVRGAAGCTFGGKVYALDETWHPDLGEPFGVMRCVLCACEAGP

SEQ ID NO: 2844 - protein, 955 aa, Homo sapiens
MPSLPAPPAPLLLLGLLLLGSRPARGAGPEPPVLPIRSEKEPLPVRGAAGCTFGGKVYALDETWHPDLGEPFGVMRCVLCACEAPQWGRRTRGPGRVSCKNIKPECPTPACGQPRQLPGHCCQTCPQERSSSERQPSGLSFEYPRDPEHRSYSDRGEPGAEERARGDGHTDFVALLTGPRSQAVARARVSLLRSSLRFSISYRRLDRPTRIRFSDSNGSVLFEHPAAPTQDGLVCGVWRAVPRLSLRLLRAEQLHVALVTLTHPSGEVWGPLIRHRALAAETFSAILTLEGPPQQGVGGITLLTLSDTEDSLHFLLLFRGLLEPRSGGLTQVPLRLQILHQGQLLRELQANVSAQEPGFAEVLPNLTVQEMDWLVLGELQMALEWAGRPGLRISGHIAARKSCDVLQSVLCGADALIPVQTGAAGSASLTLLGNGSLIYQVQVVGTSSEVVAMTLETKPQRRDQRTVLCHMAGLQPGGHTAVGICPGLGARGAHMLLQNELFLNVGTKDFPDGELRGHVAALPYCGHSARHDTLPVPLAGALVLPPVKSQAAGHAWLSLDTHCHLHYEVLLAGLGGSEQGTVTAHLLGPPGTPGPRRLLKGFYGSEAQGVVKDLEPELLRHLAKGMASLMITTKGSPRGELRGQVHIANQCEVGGLRLEAAGAEGVRALGAPDTASAAPPVVPGLPALAPAKPGGPGRPRDPNTCFFEGQQRPHGARWAPNYDPLCSLCTCQRRTVICDPVVCPPPSCPHPVQAPDQCCPVCPEKQDVRDLPGLPRSRDPGEGCYFDGDRSWRAAGTRWHPVVPPFGLIKCAVCTCKGGTGEVHCEKVQCPRLACAQPVRVNPTDCCKQCPVGSGAHPQLGDPMQADGPRGCRFAGQWFPESQSWHPSVPPFGEMSCITCRCGAGVPHCERDDCSLPLSCGSGKESRCCSRCTAHRRPAPETRTDPELEKEAEGS

SEQ ID NO: 2845 - protein, 915 aa, Homo sapiens
MPSLPAPPAPLLLLGLLLLGSRPARGAGPEPPVLPIRSEKEPLPVRGAAGCTFGGKVYALDETWHPDLGEPFGVMRCVLCACEAPQWGRRTRGPGRVSCKNIKPECPTPACGQPRQLPGHCCQTCPQERSSSERQPSGLSFEYPRDPEHRSYSDRGEPGAEERARGDGHTDFVALLTGPRSQAVARARVSLLRSSLRFSISYRRLDRPTRIRFSDSNGSVLFEHPAAPTQDGLVCGVWRAVPRLSLRLLRAEQLHVALVTLTHPSGEVWGPLIRHRALAAETFSAILTLEGPPQQGVGGITLLTLSDTEDSLHFLLLFRGLLEPRSGGLTQVPLRLQILHQGQLLRELQANVSAQEPGFAEVLPNLTVQEMDWLVLGELQMALEWAGRPGLRISGHIAARKSCDVLQSVLCGADALIPVQTGAAGSASLTLLGNGSLIYQAVGICPGLGARGAHMLLQNELFLNVGTKDFPDGELRGHVAALPYCGHSARHDTLPVPLAGALVLPPVKSQAAGHAWLSLDTHCHLHYEVLLAGLGGSEQGTVTAHLLGPPGTPGPRRLLKGFYGSEAQGVVKDLEPELLRHLAKGMASLMITTKGSPRGELRGQVHIANQCEVGGLRLEAAGAEGVRALGAPDTASAAPPVVPGLPALAPAKPGGPGRPRDPNTCFFEGQQRPHGARWAPNYDPLCSLCTCQRRTVICDPVVCPPPSCPHPVQAPDQCCPVCPEKQDVRDLPGLPRSRDPGEGCYFDGDRSWRAAGTRWHPVVPPFGLIKCAVCTCKGGTGEVHCEKVQCPRLACAQPVRVNPTDCCKQCPVGSGAHPQLGDPMQADGPRGCRFAGQWFPESQSWHPSVPPFGEMSCITCRCGAGVPHCERDDCSLPLSCGSGKESRCCSRCTAHRRPAPETRTDPELEKEAEGS

SEQ ID NO: 2846 - protein, 350 aa, Homo sapiens
MPSLPAPPAPLLLLGLLLLGSRPARGAGPEPPVLPIRSEKEPLPVRGAAGCTFGGKVYALDETWHPDLGEPFGVMRCVLCACEAPQWGRRTRGPGRVSCKNIKPECPTPACGQPRQLPGHCCQTCPQERSSSERQPSGLSFEYPRDPEHRSYSDRGEPGAEERARGDGHTDFVALLTGPRSQAVARARVSLLRSSLRFSISYRRLDRPTRIRFSDSNGSVLFEHPAAPTQDGLVCGVWRAVPRLSLRLLRAEQLHVALVTLTHPSGEVWGPLIRHRALAAETFSAILTLEGPPQQGVGGITLLTLSDTEDSLHFLLLFRGLLEPRSGDSTPGAATARTSGQCLSPGTRLC

SEQ ID NO: 2847 - protein, 954 aa, Homo sapiens
MPSLPAPPAPLLLLGLLLLGSRPARGAGPEPPVLPIRSEKEPLPVRGAAGCTFGGKVYALDETWHPDLGEPFGVMRCVLCACEAPQWGRRTRGPGRVSCKNIKPECPTPACGQPRQLPGHCCQTCPQERSSSERQPSGLSFEYPRDPEHRSYSDRGEPGAEERARGDGHTDFVALLTGPRSQAVARARVSLLRSSLRFSISYRRLDRPTRIRFSDSNGSVLFEHPAAPTQDGLVCGVWRAVPRLSLRLLRAEQLHVALVTLTHPSGEVWGPLIRHRALAAETFSAILTLEGPPQQGVGGITLLTLSDTEDSLHFLLLFRGLLEPRSGGLTQVPLRLQILHQGQLLRELQANVSAQEPGFAEVLPNLTVQEMDWLVLGELQMALEWAGRPGLRISGHIAARKSCDVLQSVLCGADALIPVQTGAAGSASLTLLGNGSLIYQVQVVGTSSEVVAMTLETKPQRRDQRTVLCHMAGLQPGGHTAVGICPGLGARGAHMLLQNELFLNVGTKDFPDGELRGHVAALPYCGHSARHDTLPVPLAGALVLPPVKSQAAGHAWLSLDTHCHLHYEVLLAGLGGSEQGTVTAHLLGPPGTPGPRRLLKGFYGSEAQGVVKDLEPELLRHLAKGMASLMITTKGSPRGELRGQVHIANQCEVGGLRLEAAGAEGVRALGAPDTASAAPPVVPGLPALAPAKPGGPGRPRDPNTCFFEGQQRPHGARWAPNYDPLCSLCTCQRRTVICDPVVCPPPSCPHPVQAPDQCCPVCPEKQDVRDLPGLPRSRDPGEGCYFDGDRSWRAAGTRWHPVVPPFGLIKCAVCTCKGGTGEVHCEKVQCPRLACAQPVRVNPTDCCKQCPVGSGAHPQLGDPMQADGPRGCRFAGQWFPESQSWHPSVPPFGEMSCITCRCGAGVPHCERDDCSLPLSCGSGKESRCCSRCTAHRRPPETRTDPELEKEAEGS

SEQ ID NO: 2848 - protein, 94 aa, Homo sapiens
MPSLPAPPAPLLLLGLLLLGSRPARGAGPEPPVLPIRSEKEPLPVRGAAGCTFGGKVYALDETWHPDLGEPFGVMRCVLCACEATGTLRPREMK

SEQ ID NO: 2849 - protein, 450 aa, Homo sapiens
MGGMKYIFSLLFFLLLEGGKTEQVKHSETYCMFQDKKYRVGERWHPYLEPYGLVYCVNCICSENGNVLCSRVRCPNVHCLSPVHIPHLCCPRCPDSLPPVNNKVTSKSCEYNGTTYQHGELFVAEGLFQNRQPNQCTQCSCSEGNVYCGLKTCPKLTCAFPVSVPDSCCRVCRGDGELSWEHSDGDIFRQPANREARHSYHRSHYDPPPSRQAGGLSRFPGARSHRGALMDSQQASGTIVQIVINNKHKHGQVCVSNGKTYSHGESWHPNLRAFGIVECVLCTCNVTKQECKKIHCPNRYPCKYPQKIDGKCCKVCPGKKAKELPGQSFDNKGYFCGEETMPVYESVFMEDGETTRKIALETERPPQVEVHVWTIRKGILQHFHIEKISKRMFEELPHFKLVTRTTLSQWKIFTEGEAQISQMCSSRVCRTELEDLVKVLYLERSEKGHC

SEQ ID NO: 2850 - protein, 456 aa, Homo sapiens
MRKKWKMGGMKYIFSLLFFLLLEGGKTEQVKHSETYCMFQDKKYRVGERWHPYLEPYGLVYCVNCICSENGNVLCSRVRCPNVHCLSPVHIPHLCCPRCPDSLPPVNNKVTSKSCEYNGTTYQHGELFVAEGLFQNRQPNQCTQCSCSEGNVYCGLKTCPKLTCAFPVSVPDSCCRVCRGDGELSWEHSDGDIFRQPANREARHSYHRSHYDPPPSRQAGGLSRFPGARSHRGALMDSQQASGTIVQIVINNKHKHGQVCVSNGKTYSHGESWHPNLRAFGIVECVLCTCNVTKQECKKIHCPNRYPCKYPQKIDGKCCKVCPGKKAKELPGQSFDNKGYFCGEETMPVYESVFMEDGETTRKIALETERPPQVEVHVWTIRKGILQHFHIEKISKRMFEELPHFKLVTRTTLSQWKIFTEGEAQISQMCSSRVCRTELEDLVKVLYLERSEKGHC

SEQ ID NO: 2851 - protein, 457 aa, Homo sapiens
MRKKWKMGGMKYIFSLLFFLLLEGGKTEQVKHSETYCMFQDKKYRVGERWHPYLEPYGLVYCVNCICSENGNVLCSRVRCPNVHCLSPVHIPHLCCPRCPDSLPPVNNKVTSKSCEYNGTTYQHGELFVAEGLFQNRQPNQCTQCSCSEGNVYCGLKTCPKLTCAFPVSVPDSCCRVCRGDGELSWEHSDGDIFRQPANREARHSYHRSHYDPPPSRQAGGLSRFPGARSHRGALMDSQQASGTIVQIVINNKHKHGQVCVSNGKTYSHGESWHPNLRAFGIVECVLCTCNVTKQECKKIHCPNRYPCKYPQKIDGKCCKVCPGKKAKEELPGQSFDNKGYFCGEETMPVYESVFMEDGETTRKIALETERPPQVEVHVWTIRKGILQHFHIEKISKRMFEELPHFKLVTRTTLSQWKIFTEGEAQISQMCSSRVCRTELEDLVKVLYLERSEKGHC

SEQ ID NO: 2852 - protein, 458 aa, Homo sapiens
MRKKWKMGGMKYIFSLLFFLLLEGGKTEQVKHSETYCMFQDKKYRVGERWHPYLEPYGLVYCVNCICSENGNVLCSRVRCPNVHCLSPVHIPHLCCPRCPEDSLPPVNNKVTSKSCEYNGTTYQHGELFVAEGLFQNRQPNQCTQCSCSEGNVYCGLKTCPKLTCAFPVSVPDSCCRVCRGDGELSWEHSDGDIFRQPANREARHSYHRSHYDPPPSRQAGGLSRFPGARSHRGALMDSQQASGTIVQIVINNKHKHGQVCVSNGKTYSHGESWHPNLRAFGIVECVLCTCNVTKQECKKIHCPNRYPCKYPQKIDGKCCKVCPGKKAKEELPGQSFDNKGYFCGEETMPVYESVFMEDGETTRKIALETERPPQVEVHVWTIRKGILQHFHIEKISKRMFEELPHFKLVTRTTLSQWKIFTEGEAQISQMCSSRVCRTELEDLVKVLYLERSEKGHC

SEQ ID NO: 2853 - protein, 378 aa, Homo sapiens
MRKKWKMGGMKYIFSLLFFLLLEGGKTEQVKHSETYCMFQDKKYRVGERWHPYLEPYGLVYCVNCICSENGNVLCSRVRCPNVHCLSPVHIPHLCCPRCPGDGELSWEHSDGDIFRQPANREARHSYHRSHYDPPPSRQAGGLSRFPGARSHRGALMDSQQASGTIVQIVINNKHKHGQVCVSNGKTYSHGESWHPNLRAFGIVECVLCTCNVTKQECKKIHCPNRYPCKYPQKIDGKCCKVCPGKKAKEELPGQSFDNKGYFCGEETMPVYESVFMEDGETTRKIALETERPPQVEVHVWTIRKGILQHFHIEKISKRMFEELPHFKLVTRTTLSQWKIFTEGEAQISQMCSSRVCRTELEDLVKVLYLERSEKGHC

SEQ ID NO: 2854 - protein, 142 aa, Homo sapiens
MALVGLPGPDMFCLFHGKRYSPGESWHPYLEPQGLMYCLRCTCSEGAHVSCYRLHCPPVHCPQPVTEPQQCCPKCVEPHTPSGLRAPPKSCQHNGTMYQHGEIFSAHELFPSRLPNQCVLCSCTMRQVSNRMKRTVCSRSMG

SEQ ID NO: 2855 - protein, 93 aa, Homo sapiens
MALVGLPGPDMFCLFHGKRYSPGESWHPYLEPQGLMYCLRCTCSENLTLPLDSGPHQSPASTTGPCTNTERSSVPMSCSPPACPTSVSSAAAQ

SEQ ID NO: 2856 - protein, 142 aa, Homo sapiens
MALVGLPGPDMFCLFHGKRYSPGESWHPYLEPQGLMYCLRCTCSENLTLPLDSGPHQSPASTTGPCTNTERSSVPMSCSPPACPTSVSSAAAQRARSTAASQPAPNQAAQHPSRCQTPAARPAKMRQVSNRMKRTVCSRSMG

SEQ ID NO: 2857 - protein, 451 aa, Homo sapiens
MVPEVRVLSSLLGLALLWFPLDSHARARPDMFCLFHGKRYSPGESWHPYLEPQGLMYCLRCTCSEGAHVSCYRLHCPPVHCPQPVTEPQQCCPKCVEPHTPSGLRAPPKSCQHNGTMYQHGEIFSAHELFPSRLPNQCVLCSCTEGQIYCGLTTCPEPGCPAPLPLPDSCCQACKDEASEQSDEEDSVQSLHGVRHPQDPCSSDAGRKRGPGTPAPTGLSAPLSFIPRHFRPKGAGSTTVKIVLKEKHKKACVHGGKTYSHGEVWHPAFRAFGPLPCILCTCEDGRQDCQRVTCPTEYPCRHPEKVAGKCCKICPEDKADPGHSEISSTRCPKAPGRVLVHTSVSPSPDNLRRFALEHEASDLVEIYLWKLVKDEETEAQRGEVPGPRPHSQNLPLDSDQESQEARLPERGTALPTARWPPRRSLERLPSPDPGAEGHGQSRQSDQDITKT

SEQ ID NO: 2858 - protein, 429 aa, Homo sapiens
MVPEVRVLSSLLGLALLWFPLDSHARARPDMFCLFHGKRYSPGESWHPYLEPQGLMYCLRCTCSEGAHVSCYRLHCPPVHCPQPVTEPQQCCPKCVEPHTPSGLRAPPKSCQHNGTMYQHGEIFSAHELFPSRLPNQCVLCSCTEGQIYCGLTTCPEPGCPAPLPLPDSCCQACKDEASEQSDEEDSVQSLHGVRHPQDPCSSDAGRKRGPGTPAPTGLSAPLSFIPRHFRPKGAGSTTVKIVLKEKHKKACVHGGKTYSHGEVWHPAFRAFGPLPCILCTCEDGRQDCQRVTCPTEYPCRHPEKVAGKCCKICPEDKADPGHSEISSTRCPKAPGRVLVHTSVSPSPDNLRRFALEHEASDLVEIYLWKLVKGIFHLTQIKKVRKQDFQKEAQHFRLLAGPHEGHWNVFLAQTLELKVTASPDKVTKT

SEQ ID NO: 2859 - protein, 308 aa, Homo sapiens
MVPEVRVLSSLLGLALLWFPLDSHARARPDMFCLFHGKRYSPGESWHPYLEPQGLMYCLRCTCSEGAHVSCYRLHCPPVHCPQPVTEPQQCCPKCVEPHTPSGLRAPPKSCQHNGTMYQHGEIFSAHELFPSRLPNQCVLCSCTEGQIYCGLTTCPEPGCPAPLPLPDSCCQACKDEASEQSDEEDSVQSLHGVRHPQDPCSSDAGRKRGPGTPAPTGLSAPLSFIPRHFRPKGAGSTTVKIVLKEKHKKEDKADPGHSEISSTRCPKAPGRVLVHTSVSPSPDNLRRFALEHEASDLVEIYLWKLVK

SEQ ID NO: 2860 - protein, 281 aa, Homo sapiens [sequence omitted]

SEQ ID NO: 2861 - protein, 91 aa, Homo sapiens
  SITE 1: note = misc_feature - Xaa can be any naturally occurring amino acid
XGDRSRISKENRQKKTGFTVEATGRQGRGMTGNLPLDSDQESQEARLPERGTALPTARWPPRRSLERLPSPDPGAEGHGQSRQSDQDITKT

SEQ ID NO: 2862 - protein, 177 aa, Homo sapiens
  SITE 1: note = misc_feature - Xaa can be any naturally occurring amino acid
XSSDAGRKRGPGTPAPTGLSAPLSFIPRHFRPKGAGSTTVKIVLKEKHKKACVHGGKTYSHGEVWHPAFRAFGPLPCILCTCEDGRQDCQRVTCPTEYPCRHPEKVAGKCCKICPEDKADPGHSEISSTRCPKAPGRVLVHTSVSPSPDNLRRFALEHEASDLVEIYLWKLVTGTSS

SEQ ID NO: 2863 - protein, 507 aa, Homo sapiens
MAGGEEAKRPPPRAPGDPLSSPSPTALPQGGSHTETEDRLFKHLFRGYNRWARPVPNTSDVVIVRFGLSIAQLIDVDEKNQMMTTNVWLKQEWSDYKLRWNPTDFGNITSLRVPSEMIWIPDIVLYNNADGEFAVTHMTKAHLFSTGTVHWVPPAIYKSSCSIDVTFFPFDQQNCKMKFGSWTYDKAKIDLEQMEQTVDLKDYWESGEWAIVNATGTYNSKKYDCCAEIYPDVTYAFVIRRLPLFYTINLIIPCLLISCLTVLVFYLPSDCGEKITLCISVLLSLTVFLLLITEIIPSTSLVIPLIGEYLLFTMIFVTLSIVITVFVLNVHHRSPSTHTMPHWVRGALLGCVPRWLLMNRPPPPVELCHPLRLKLSPSYHWLESNVDAEEREVVVEEEDRWACAGHVAPSVGTLCSHGHLHSGASGPKAEALLQEGELLLSPHMQKALEGVHYIADHLRSEDADSSVKEDWKYVAMVIDRIFLWLFIIVCFLGTIGLFLPPFLAGMI

SEQ ID NO: 2864 - protein, 19 aa, Homo sapiens
MGPSCPVFLSFTKLSLWWL

SEQ ID NO: 2865 - protein, 50 aa, Homo sapiens
MGPSCPVFLSFTKLSLWWLLLTPAGGEEAKRPPPRAPGDPLSSPSPTALP

SEQ ID NO: 2866 - protein, 81 aa, Homo sapiens
MGPSCPVFLSFTKLSLWWLLLTPAGGEEAKRPPPRAPGDPLSSPSPTALPQGGSHTETEDRLFKHLFRGYNRWARPVPNTS

SEQ ID NO: 2867 - protein, 514 aa, Homo sapiens
MGPSCPVFLSFTKLSLWWLLLTPAGGEEAKRPPPRAPGDPLSSPSPTALPQGGSHTETEDRLFKHLFRGYNRWARPVPNTSDVDEKNQMMTTNVWLKQEWSDYKLRWNPTDFGNITSLRVPSEMIWIPDIVLYNNADGEFAVTHMTKAHLFSTGTVHWVPPAIYKSSCSIDVTFFPFDQQNCKMKFGSWTYDKAKIDLEQMEQTVDLKDYWESGEWAIVNATGTYNSKKYDCCAEIYPDVTYAFVIRRLPLFYTINLIIPCLLISCLTVLVFYLPSDCGEKITLCISVLLSLTVFLLLITEIIPSTSLVIPLIGEYLLFTMIFVTLSIVITVFVLNVHHRSPSTHTMPHWVRGALLGCVPRWLLMNRPPPPVELCHPLRLKLSPSYHWLESNVDAEEREVVVEEEDRWACAGHVAPSVGTLCSHGHLHSGASGPKAEALLQEGELLLSPHMQKALEGVHYIADHLRSEDADSSVKEDWKYVAMVIDRIFLWLFIIVCFLGTIGLFLPPFLAGMI

SEQ ID NO: 2868 - protein, 108 aa, Homo sapiens
MGPSCPVFLSFTKLSLWWLLLTPAGGEEAKRPPPRAPGDPLSSPSPTALPQGGSHTETEDRLFKHLFRGYNRWARPVPNTSDVVIVRFGLSIAQLIDVDEKNQMMTTN

SEQ ID NO: 2869 - protein, 529 aa, Homo sapiens
MGPSCPVFLSFTKLSLWWLLLTPAGGEEAKRPPPRAPGDPLSSPSPTALPQGGSHTETEDRLFKHLFRGYNRWARPVPNTSDVVIVRFGLSIAQLIDVDEKNQMMTTNVWLKQEWSDYKLRWNPTDFGNITSLRVPSEMIWIPDIVLYNNADGEFAVTHMTKAHLFSTGTVHWVPPAIYKSSCSIDVTFFPFDQQNCKMKFGSWTYDKAKIDLEQMEQTVDLKDYWESGEWAIVNATGTYNSKKYDCCAEIYPDVTYAFVIRRLPLFYTINLIIPCLLISCLTVLVFYLPSDCGEKITLCISVLLSLTVFLLLITEIIPSTSLVIPLIGEYLLFTMIFVTLSIVITVFVLNVHHRSPSTHTMPHWVRGALLGCVPRWLLMNRPPPPVELCHPLRLKLSPSYHWLESNVDAEEREVVVEEEDRWACAGHVAPSVGTLCSHGHLHSGASGPKAEALLQEGELLLSPHMQKALEGVHYIADHLRSEDADSSVKEDWKYVAMVIDRIFLWLFIIVCFLGTIGLFLPPFLAGMI

SEQ ID NO: 2870 - protein, 154 aa, Homo sapiens
MGPSCPVFLSFTKLSLWWLLLTPAGGEEAKRPPPRAPGDPLSSPSPTALPQGGSHTETEDRLFKHLFRGYNRWARPVPNTSDVVIVRFGLSIAQLIDVDEKNQMMTTNVWLKQEWSDYKLRWNPTDFGNITSLRVPSEMIWIPDIVLYNNRTAR

SEQ ID NO: 2871 - protein, 133 aa, Homo sapiens
MGPSCPVFLSFTKLSLWWLLLTPAGGEEAKRPPPRAPGDPLSSPSPTALPQGGSHTETEDRLFKHLFRGYNRWARPVPNTSDVVIVRFGLSIAQLIDVVRLSSHRWPEEGDPRPPTAFPLLLPLPQPCPHAQQ

SEQ ID NO: 2872 - protein, 160 aa, Homo sapiens
MAARGSGPRALRLLLLVQLVAGRCGLAGAAGGAQRGLSEPSSIAKHEDSLLKDLFQDYERWVRPVEHLNDKIKIKFGLAISQLVDVDEKNQLMTTNVWLKQEWIDVKLRWNPDDYGGIKVIRVPSDSVWTPDIVLFDNADGRFEGTSTKTVIRLLKIGNS

SEQ ID NO: 2873 - protein, 468 aa, Homo sapiens
MAARGSGPRALRLLLLVQLVAGRCGLAGAAGGAQRGLSEPSSIAKHEDSLLKDLFQDYERWVRPVEHLNDKIKIKFGLAISQLVDVDEKNQLMTTNVWLKQEWIDVKLRWNPDDYGGIKVIRVPSDSVWTPDIVLFDNADGRFEGTSTKTVIRYNGTVTWTPPANYKSSCTIDVTFFPFDLQNCSMKFGSWTYDGSQVDIILEDQDVDKRDFFDNGEWEIVSATGSKGNRTDSCCWYPYVTYSFVIKRLPLFYTLFLIIPCIGLSFLTVLVFYLPSNEGEKICLCTSVLVSLTVFLLVIEEIIPSSSKVIPLIGEYLVFTMIFVTLSIMVTVFAINIHHRSSSTHNAMAPLVRKIFLHTLPKLLCMRSHVDRYFTQKEETESGSGPKSSRNTLEAALDSIRYITRHIMKENDVREVVEDWKFIAQVLDRMFLWTFLFVSIVGSLGLFVPVIYKWANILIPVHIGNANK

SEQ ID NO: 2874 - protein, 182 aa, Homo sapiens
  SITE 1: note = misc_feature - Xaa can be any naturally occurring amino acid
XRPVEHLNDKIKIKFGLAISQLVDVDEKNQLMTTNVWLKQEWIDVKLRWNPDDYGGIKVIRVPSDSVWTPDIVLFDNADGRFEGTSTKTVIRYNGTVTWTPPANYKSSCTIDVTFFPFDLQNCSMKFGSWTYDGSQVDIILEDQDVDKRDFFDNGEWEIVSATGSKGNRTDSCCWLLKIGNS

SEQ ID NO: 2875 - protein, 56 aa, Homo sapiens
  SITE 1: note = misc_feature - Xaa can be any naturally occurring amino acid
XTLSIMVTVFAINIHHRSSSTHNAMAPLVRKIFLHTLPKLLCMRSHVDRLLKIGNS

SEQ ID NO: 2876 - protein, 429 aa, Homo sapiens
MSTKVYLDLEWTDYRLSWDPAEHDGIDSLRITAESVWLPDVVLLNNNDGNFDVALDISVVVSSDGSVRWQPPGIYRSSCSIQVTYFPFDWQNCTMVFSSYSYDSSEVSLQTGLGPDGQGHQEIHIHEGTFIENGQWEIIHKPSRLIQPPGDPRGGREGQRQEVIFYLIIRRKPLFYLVNVIAPCILITLLAIFVFYLPPDAGEKMGLSIFALLTLTVFLLLLADKVPETSLSVPIIIKYLMFTMVLVTFSVILSVVVLNLHHRSPHTHQMPLWVRQIFIHKLPLYLRLKRPKPERDLMPEPPHCSSPGSGWGRGTDEYFIRKPPSDFLFPKPNRFQPELSAPDLRRFIDGPNRAVALLPELREVVSSISYIARQLQEQEDHDALKEDWQFVAMVVDRLFLWTFIIFTSVGTLVIFLDATYHLPPPDPFP

SEQ ID NO: 2877 - protein, 380 aa, Homo sapiens
MSTKVYLDLEWTDYRLSWDPAEHDGIDSLRITAESVWLPDVVLLNNNDGNFDVALDISVVVSSDGSVRWQPPGIYRSSCSIQVTYFPFDWQNCTMVFSSYSYDSSEVSLQTGLGPDGQGHQEIHIHEGTFIENGQWEIIHKPSRLIQPPGDPRGGREGQRQEVIFYLIIRRKPLFYLVNVIAPCILITLLAIFVFYLPPDAVILSVVVLNLHHRSPHTHQMPLWVRQIFIHKLPLYLRLKRPKPERDLMPEPPHCSSPGSGWGRGTDEYFIRKPPSDFLFPKPNRFQPELSAPDLRRFIDGPNRAVALLPELREVVSSISYIARQLQEQEDHDALKEDWQFVAMVVDRLFLWTFIIFTSVGTLVIFLDATYHLPPPDPFP

SEQ ID NO: 2878 - protein, 158 aa, Homo sapiens
MTPGALLMLLGALGAPLAPGVRGSEAEGRLREKLFSGYDSSVRPAREVGDRVRVSVGLILAQLISLNEKDEEMSTKVYLDLAVLECGGSSHPPASGGTSTSAEITAEWTDYRLSWDPAEHDGIDSLRITAESVWLPDVVLLNNNDGNFDVALDISVVV

SEQ ID NO: 2879 - protein, 501 aa, Homo sapiens
MTPGALLMLLGALGAPLAPGVRGSEAEGRLREKLFSGYDSSVRPAREVGDRVRVSVGLILAQLISLNEKDEEMSTKVYLDLEWTDYRLSWDPAEHDGIDSLRITAESVWLPDVVLLNNNDGNFDVALDISVVVSSDGSVRWQPPGIYRSSCSIQVTYFPFDWQNCTMVFSSYSYDSSEVSLQTGLGPDGQGHQEIHIHEGTFIENGQWEIIHKPSRLIQPPGDPRGGREGQRQEVIFYLIIRRKPLFYLVNVIAPCILITLLAIFVFYLPPDAGEKMGLSIFALLTLTVFLLLLADKVPETSLSVPIIIKYLMFTMVLVTFSVILSVVVLNLHHRSPHTHQMPLWVRQIFIHKLPLYLRLKRPKPERDLMPEPPHCSSPGSGWGRGTDEYFIRKPPSDFLFPKPNRFQPELSAPDLRRFIDGPNRAVALLPELREVVSSISYIARQLQEQEDHDALKEDWQFVAMVVDRLFLWTFIIFTSVGTLVIFLDATYHLPPPDPFP

SEQ ID NO: 2880 - protein, 37 aa, Homo sapiens
MVVDRLFLWTFIIFTSVGTLVIFLDATYHLPPPDPFP

SEQ ID NO: 2881 - protein, 316 aa, Homo sapiens
  SITE 1: note = misc_feature - Xaa can be any naturally occurring amino acid
XPAREVGDRVRVSVGLILAQLISLNEKDEEMSTKVYLDLEWTDYRLSWDPAEHDGIDSLRITAESVWLPDVVLLNNNDGNFDVALDISVVVSSDGSVRWQPPGIYRSSCSIQVTYFPFDWQNCTMVFSSYSYDSSEVSLQTGLGPDGQGHQEIHIHEGTFIGEKMGLSIFALLTLTVFLLLLADKVPETSLSVPIIIKYLMFTMVLVTFSVILSVVVLNLHHRSPHTHQMPLWVRQIFIHKLPLYLRLKRPKPERDLMPEPPHCSSPGSGWGRGTDEYFIRKPPSDFLFPKPNRFQPELSAPDLRRFIDGPNRAVA

SEQ ID NO: 2882 - protein, 172 aa, Homo sapiens
MEGPVLTLGLLAALAVCGSWGLNEEERLIRHLFQEKGYNKELRPVAHKEESVDVALALTLSNLISLGWTDNRLKWNAEEFGNISVLRLPPDMVWLPEIVLENNNDGSFQISYSCNVLVYHYGFVYWLPPAIFRSSCPISVTYFPFDWQNCSLKFSSLKYTAKEITLSLKQDA

SEQ ID NO: 2883 - protein, 502 aa, Homo sapiens
MEGPVLTLGLLAALAVCGSWGLNEEERLIRHLFQEKGYNKELRPVAHKEESVDVALALTLSNLISLGWTDNRLKWNAEEFGNISVLRLPPDMVWLPEIVLENNNDGSFQISYSCNVLVYHYGFVYWLPPAIFRSSCPISVTYFPFDWQNCSLKFSSLKYTAKEITLSLKQDAKENRTYPVEWIIIDPEGFTENGEWEIVHRPARVNVDPRAPLDSPSRQDITFYLIIRRKPLFYIINILVPCVLISFMVNLVFYLPADSGEKTSVAISVLLAQSVFLLLISKRLPATSMAIPLIGKFLLFGMVLVTMVVVICVIVLNIHFRTPSTHVLSEGVKKLFLETLPELLHMSRPAEDGPSPGALVRRSSSLGYISKAEEYFLLKSRSDLMFEKQSERHGLARRLTTARRPPASSEQAQQELFNELKPAVDGANFIVNHMRDQNNYNEEKDSWNRVARTVDRLCLFVVTPVMVVGTAWIFLQGVYNQPPPQPFPGDPYSYNVQDKRFI

SEQ ID NO: 2884 - protein, 108 aa, Homo sapiens
MEGPVLTLGLLAALAVCGSWGLNEEERLIRHLFQEKGYNKELRPVAHKEESVDVALALTLSNLISLKEVEETLTTNVWIEHGWTDNRLKWNAEEFGNISVLRLPPDMQ

SEQ ID NO: 2885 - protein, 235 aa, Homo sapiens
MEGPVLTLGLLAALAVCGSWGLNEEERLIRHLFQEKGYNKELRPVAHKEESVDVALALTLSNLISLKEVEETLTTNVWIEHGWTDNRLKWNAEEFGNISVLRLPPDMVWLPEIVLENNNDGSFQISYSCNVLVYHYGFVYWLPPAIFRSSCPISVTYFPFDWQNCSLKFRERGVGDSPPAGQGQRGPQSPSGQPQPPGHHLLPHHPPQAPLLHHQHPGALRAHLLHGQPGLLPTG

SEQ ID NO: 2886 - protein, 171 aa, Homo sapiens
MEGPVLTLGLLAALAVCGSWGLNEEERLIRHLFQEKGYNKELRPVAHKEESVDVALALTLSNLISLKEVEETLTTNVWIEHGWTDNRLKWNAEEFGNISVLRLPPDMVWLPEIVLENNNDGSFQISYSCNVLVYHYGFVYWLPPAIFRSSCPISVTYFPFDWQNCSLKFRW

SEQ ID NO: 2887 - protein, 517 aa, Homo sapiens
MEGPVLTLGLLAALAVCGSWGLNEEERLIRHLFQEKGYNKELRPVAHKEESVDVALALTLSNLISLKEVEETLTTNVWIEHGWTDNRLKWNAEEFGNISVLRLPPDMVWLPEIVLENNNDGSFQISYSCNVLVYHYGFVYWLPPAIFRSSCPISVTYFPFDWQNCSLKFSSLKYTAKEITLSLKQDAKENRTYPVEWIIIDPEGFTENGEWEIVHRPARVNVDPRAPLDSPSRQDITFYLIIRRKPLFYIINILVPCVLISFMVNLVFYLPADSGEKTSVAISVLLAQSVFLLLISKRLPATSMAIPLIGKFLLFGMVLVTMVVVICVIVLNIHFRTPSTHVLSEGVKKLFLETLPELLHMSRPAEDGPSPGALVRRSSSLGYISKAEEYFLLKSRSDLMFEKQSERHGLARRLTTARRPPASSEQAQQELFNELKPAVDGANFIVNHMRDQNNYNEEKDSWNRVARTVDRLCLFVVTPVMVVGTAWIFLQGVYNQPPPQPFPGDPYSYNVQDKRFI

SEQ ID NO: 2888 - protein, 411 aa, Homo sapiens
MQCSWKAVLLLALASIAIQYTAIRTFTAKSFHTCPGLAEAGLAERLCEESPTFAYNLSRKTHILILATTRSGSSFVGQLFNQHLDVFYLFEPLYHVQNTLIPRFTQGKSPADRRVMLGASRDLLRSLYDCDLYFLENYIKPPPVNHTTDRIFRRGASRVLCSRPVCDPPGPADLVLEEGDCVRKCGLLNLTVAAEACRERSHVAIKTVRVPEVNDLRALVEDPRLNLKVIQLVRDPRGILASRSETFRDTYRLWRLWYGTGRKPYNLDVTQLTTVCEDFSNSVSTGLMRPPWLKGKYMLVRYEDLARNPMKKTEEIYGFLGIPLDSHVARWIQNNTRGDPTLGKHKYGTVRNSAATAEKWRFRLSYDIVAFAQNACQQVLAQLGYKIAASEEELKNPSVSLVEERDFRPFS

SEQ ID NO: 2889 - protein, 33 aa, Homo sapiens
MHHQWLLLAACFWVIFMFMVASKFITLTFKDPD

SEQ ID NO: 2890 - protein, 64 aa, Homo sapiens
MHHQWLLLAACFWVIFMFMVASKFITLTFKDPDVYSAKQEFLFLTTMPEVRKLPEEKHIPEELK

SEQ ID NO: 2891 - protein, 85 aa, Homo sapiens
MHHQWLLLAACFWVIFMFMVASKFITLTFKDPDVYSAKQEFLFLTTMPEVRKLPEEKHIPEELKPTGKELPDSQLVQPLVYMERL

SEQ ID NO: 2892 - protein, 133 aa, Homo sapiens
MHHQWLLLAACFWVIFMFMVASKFITLTFKDPDVYSAKQEFLFLTTMPEVRKLPEEKHIPEELKPTGKELPDSQLVQPLVYMERLELIRNVCRDDALKNLSHTPVSKFVLDRIFVCDKHKILFCQTPKVGNTQ

SEQ ID NO: 2893 - protein, 141 aa, Homo sapiens
MHHQWLLLAACFWVIFMFMVASKFITLTFKDPDVYSAKQEFLFLTTMPEVRKLPEEKHIPEELKPTGKELPDSQLVQPLVYMERLELIRNVCRDDALKNLSHTPVSKFVLDRIFVCDKHKILFCQTPKVGNTQWKKVLIVL

SEQ ID NO: 2894 - protein, 356 aa, Homo sapiens
MHHQWLLLAACFWVIFMFMVASKFITLTFKDPDVYSAKQEFLFLTTMPEVRKLPEEKHIPEELKPTGKELPDSQLVQPLVYMERLELIRNVCRDDALKNLSHTPVSKFVLDRIFVCDKHKILFCQTPKVGNTQWKKVLIVLNGAFSSIEEIPENVVHDHEKNGLPRLSSFSDAEIQKRLKTYFKFFIVRDPFERLISAFKDKFVHNPRFEPWYRHEIAPGIIRKYRRNRTETRGIQFEDFVRYLGDPNHRWLDLQFGDHIIHWVTYVELCAPCEIMYSVIGHHETLEDDAPYILKEAGIDHLVSYPTIPPGITVYNRTKVEHYFLGISKRDIRRLYARFEGDFKLFGYQKPDFLLN

SEQ ID NO: 2895 - protein, 356 aa, Homo sapiens; identical to SEQ ID NO: 2894

SEQ ID NO: 2896 - protein, 142 aa, Homo sapiens
MQRKAGKKEHVQLRDKRNQEPQFRGNTARKCEPQAAEGRVSEWLRCDNMHHQWLLLAACFWVIFMFMVASKFITLTFKDPDVYSAKQEFLFLTTMPEVRKLPEEKHIPEELKPTGKELPDSQLVQPLVYMERLELIRNVCRD

SEQ ID NO: 2897 - protein, 347 aa, Homo sapiens
MKPALLEVMRMNRICRMVLATCLGSFILVIFYFQIMRRNPFGVDICCRKGSRSPLQELYNPIQLELSNTAVLHQMRRDQVTDTCRANSATSRKRRVLTPNDLKHLVVDEDHELIYCYVPKVACTNWKRLMMVLTGRGKYSDPMEIPANEAHVSANLKTLNQYSIPEINHRLKSYMKFLFVREPFERLVSAYRNKFTQKYNISFHKRYGTKIIKRQRKNATQEALRKGDDVKFEEFVAYLIDPHTQREEPFNEHWQTVYSLCHPCHIHYDLVGKYETLEEDSNYVLQLAGVGSYLKFPTYAKSTRTTDEMTTEFFQNISSEHQTQLYEVYKLDFLMFNYSVPSYLKLE

SEQ ID NO: 2898 - protein, 72 aa, Homo sapiens
MKPALLEVMRMNRICRMVLATCLGSFILVIFYFQIMRRNPFGVDICCRKGSRSPLQELYNPIQVSFKHSVSM

SEQ ID NO: 2899 - protein, 352 aa, Homo sapiens
MKPALLEVMRMNRICRMVLATCLGSFILVIFYFQSMLHPVMRRNPFGVDICCRKGSRSPLQELYNPIQLELSNTAVLHQMRRDQVTDTCRANSATSRKRRVLTPNDLKHLVVDEDHELIYCYVPKVACTNWKRLMMVLTGRGKYSDPMEIPANEAHVSANLKTLNQYSIPEINHRLKSYMKFLFVREPFERLVSAYRNKFTQKYNISFHKRYGTKIIKRQRKNATQEALRKGDDVKFEEFVAYLIDPHTQREEPFNEHWQTVYSLCHPCHIHYDLVGKYETLEEDSNYVLQLAGVGSYLKFPTYAKSTRTTDEMTTEFFQNISSEHQTQLYEVYKLDFLMFNYSVPSYLKLE

SEQ ID NO: 2900 - protein, 77 aa, Homo sapiens
MKPALLEVMRMNRICRMVLATCLGSFILVIFYFQSMLHPVMRRNPFGVDICCRKGSRSPLQELYNPIQVSFKHSVSM

SEQ ID NO: 2901 - protein, 158 aa, Homo sapiens
MRRNPFGVDICCRKGSRSPLQELYNPIQLELSNTAVLHQMRRDQVTDTCRANSATSRKRRVLTPNDLKHLVVDEDHELIYCYVPKVACTNWKRLMMVLTGRGKYSDPMEIPANEAHVSANLKTLNQYSIPEINHRLKSYMKFLFVREPFERLVSAYRN

SEQ ID NO: 2902 - protein, 225 aa, Homo sapiens [sequence omitted]

SEQ ID NO: 2903 - protein, 341 aa, Homo sapiens
MGRRCCRRRVLAAACLGAALLLLCAAPRSLRPAFGNRALGSSWLGGEKRSPLQKLYDLDQDPRSTLAKVHRQRRDLLNSACSRHSRRQRLLQPEDLRHVLVDDAHGLLYCYVPKVACTNWKRVLLALSGQARGDPRAISAQEAHAPGRLPSLADFSPAEINRRLRAYLAFLFVREPFERLASAYRNKLARPYSAAFQRRYGARIVQRLRPRALPDARARGHDVRFAEFLAYLLDPRTRREEPFNEHWERAHALCHPCRLRYDVVGKFETLAEDAAFVLGLAGASDLSFPGPPRPRGAAASRDLAARLFRDISPFYQRRLFDLYKMDFLLFNYSAPSYLRLL

SEQ ID NO: 2904 - protein, 386 aa, Homo sapiens
MLLPKKMKLLLFLVSQMAILALFFHMYSHNISSLSMKAQPERMHVLVLSSWRSGSSFVGQLFGQHPDVFYLMEPAWHVWMTFKQSTAWMLHMAVRDLIRAVFLCDMSVFDAYMEPGPRRQSSLFQWENSRALCSAPACDIIPQDEIIPRAHCRLLCSQQPFEVVEKACRSYSHVVLKEVRFFNLQSLYPLLKDPSLNLHIVHLVRDPRAVFRSRERTKGDLMIDSRIVMGQHEQKLKKEDQPYYVMQVICQSQLEIYKTIQSLPKALQERYLLVRYEDLARAPVAQTSRMYEFVGLEFLPHLQTWVHNITRGKGMGDHAFHTNARDALNVSQAWRWSLPYEKVSRLQKACGDAMNLLGYRHVRSEQEQRNLLLDLLSTWTVPEQIH

SEQ ID NO: 2905 - protein, 386 aa, Homo sapiens; identical to SEQ ID NO: 2904

SEQ ID NO: 2906 - protein, 411 aa, Homo sapiens
MGMRARVPKVAHSTRRPPAARMWLPRFSSKTVTVLLLAQTTCLLLFIISRPGPSSPAGGEDRVHVLVLSSWRSGSSFLGQLFSQHPDVFYLMEPAWHVWTTLSQGSAATLHMAVRDLMRSIFLCDMDVFDAYMPQSRNLSAFFNWATSRALCSPPACSAFPRGTISKQDVCKTLCTRQPFSLAREACRSYSHVVLKEVRFFNLQVLYPLLSDPALNLRIVHLVRDPRAVLRSREAAGPILARDNGIVLGTNGKWVEADPHLRLIREVCRSHVRIAEAATLKPPPFLRGRYRLVRFEDLAREPLAEIRALYAFTGLTLTPQLEAWIHNITHGSGIGKPIEAFHTSSRNARNVSQAWRHALPFTKILRVQEVCAGALQLLGYRPVYSADQQRDLTLDLVLPRGPDHFSWASPD

SEQ ID NO: 2907 - protein, 99 aa, Homo sapiens
MSRHLPWICDQRCSSPSSPGRWPPAARMWLPRFSSKTVTVLLLAQTTCLLLFIISRPGPSSPAGGEDRVHVLVLSSWRSGSSFLGQLFSQHPDVFYLME

SEQ ID NO: 2908 - protein, 395 aa, Homo sapiens
MWLPRVSSTAVTALLLAQTFLLLFLVSRPGPSSPAGGEARVHVLVLSSWRSGSSFVGQLFNQHPDVFYLMEPAWHVWTTLSQGSAATLHMAVRDLVRSVFLCDMDVFDAYLPWRRNLSDLFQWAVSRALCSPPACSAFPRGAISSEAVCKPLCARQSFTLAREACRSYSHVVLKEVRFFNLQVLYPLLSDPALNLRIVHLVRDPRAVLRSREQTAKALARDNGIVLGTNGTWVEADPGLRVVREVCRSHVRIAEAATLKPPPFLRGRYRLVRFEDLAREPLAEIRALYAFTGLSLTPQLEAWIHNITHGSGPGARREAFKTSSRNALNVSQAWRHALPFAKIRRVQELCAGALQLLGYRPVYSEDEQRNLALDLVLPRGLNGFTWASSTASHPRN

SEQ ID NO: 2909 - protein, 395 aa, Homo sapiens; identical to SEQ ID NO: 2908

SEQ ID NO: 2910 - protein, 486 aa, Homo sapiens
MKGRRRRRREYCKFALLLVLYTLVLLLVPSVLDGGRDGDKGAEHCPGLQRSLGVWSLEAAAAGEREQGAEARAAEEGGANQSPRFPSNLSGAVGEAVSREKQHIYVHATWRTGSSFLGELFNQHPDVFYLYEPMWHLWQALYPGDAESLQGALRDMLRSLFRCDFSVLRLYAPPGDPAARAPDTANLTTAALFRWRTNKVICSPPLCPGAPRARAEVGLVEDTACERSCPPVAIRALEAECRKYPVVVIKDVRLLDLGVLVPLLRDPGLNLKVVQLFRDPRAVHNSRLKSRQGLLRESIQVLRTRQRGDRFHRVLLAHGVGARPGGQSRALPAAPRADFFLTGALEVICEAWLRDLLFARGAPAWLRRRYLRLRYEDLVRQPRAQLRRLLRFSGLRALAALDAFALNMTRGAAYGADRPFHLSARDAREAVHAWRERLSREQVRQVEAACAPAMRLLAYPRSGEEGDAEQPREGETPLEMDADGAT

SEQ ID NO: 2911 - protein, 178 aa, Homo sapiens
MTLRPGTMRLACMFSSILLFGAAGLLLFISLQDPTELAPQQVPGIKFNIRPRQPHHDLPPGGSQDGDLKEPTERVTRDLSSGAPRGRNLPAPDQPQPPLQRGTRLRLRQRRRRLLIKKMPAAATIPANSSDAPFIRPGPGTLDGRWVSLHRSQQERKRVMQEACAKYRASSSRRAVTP

SEQ ID NO: 2912 - protein, 424 aa, Homo sapiens
MTLRPGTMRLACMFSSILLFGAAGLLLFISLQDPTELAPQQVPGIKFNIRPRQPHHDLPPGGSQDGDLKEPTERVTRDLSSGAPRGRNLPAPDQPQPPLQRGTRLRLRQRRRRLLIKKMPAAATIPANSSDAPFIRPGPGTLDGRWVSLHRSQQERKRVMQEACAKYRASSSRRAVTPRHVSRIFVEDRHRVLYCEVPKAGCSNWKRVLMVLAGLASSTADIQHNTVHYGSALKRLDTFDRQGILHRLSTYTKMLFVREPFERLVSAFRDKFEHPNSYYHPVFGKAILARYRANASREALRTGSGVRFPEFVQYLLDVHRPVGMDIHWDHVSRLCSPCLIDYDFVGKFESMEDDANFFLSLIRAPRNLTFPRFKDRHSQEARTTARIAHQYFAQLSALQRQRTYDFYYMDYLMFNYSKPFADLY

SEQ ID NO: 2913 - protein, 424 aa, Homo sapiens; identical to SEQ ID NO: 2912

SEQ ID NO: 2914 - protein, 424 aa, Homo sapiens; identical to SEQ ID NO: 2912

SEQ ID NO: 2915 - protein, 53 aa, Homo sapiens
EDVEVGRCVRRFAGVQCVWSYEDKRVRKPLLCNELKRCLSPNGKLSLCSSDGL

SEQ ID NO: 2916 - protein, 802 aa, Homo sapiens
MAARGRRAWLSVLLGLVLGFVLASRLVLPRASELKRAGPRRRASPEGCRSGQAAASQAGGARGDARGAQLWPPGSDPDGGPRDRNFLFVGVMTAQKYLQTRAVAAYRTWSKTIPGKVQFFSSEGSDTSVPIPVVPLRGVDDSYPPQKKSFMMLKYMHDHYLDKYEWFMRADDDVYIKGDRLENFLRSLNSSEPLFLGQTGLGTTEEMGKLALEPGENFCMGGPGVIMSREVLRRMVPHIGKCLREMYTTHEDVEVGRCVRRFAGVQCVWSYEMQQLFYENYEQNKKGYIRDLHNSKIHQAITLHPNKNPPYQYRLHSYMLSRKISELRHRTIQLHREIVLMSKYSNTEIHKEDLQLGIPPSFMRFQPRQREEILEWEFLTGKYLYSAVDGQPPRRGMDSAQREALDDIVMQVMEMINANAKTRGRIIDFKEIQYGYRRVNPMYGAEYILDLLLLYKKHKGKKMTVPVRRHAYLQQTFSKIQFVEHEELDAQELAKRINQESGSLSFLSNSLKKLVPFQLPGSKSEHKEPKDKKINILIPLSGRFDMFVRFMGNFEKTCLIPNQNVKLVVLLFNSDSNPDKAKQVELMRDYRIKYPKADMQILPVSGEFSRALALEVGSSQFNNESLLFFCDVDLVFTTEFLQRCRANTVLGQQIYFPIIFSQYDPKIVYSGKVPSDNHFAFTQKTGFWRNYGFGITCIYKGDLVRVGGFDVSIQGWGLEDVDLFNKVVQAGLKTFRSQEVGVVHVHHPVFCDPNLDPKQYKMCLGSKASTYGSTQQLAEMWLEKNDPSYSKSSNNNGSVRTA

SEQ ID NO: 2917 - protein, 882 aa, Homo sapiens
MAVRSRRPWMSVALGLVLGFTAASWLIAPRVAELSERKRRGSSLCSYYGRSAAGPRAGAQQPLPQPQSRPRQEQSPPPARQDLQGPPLPEAAPGITSFRSSPWQQPPPLQQRRRGREPEGATGLPGAPAAEGEPEEEDGGAAGQRRDGRPGSSHNGSGDGGAAAPSARPRDFLYVGVMTAQKYLGSRALAAQRTWARFIPGRVEFFSSQQPPNAGQPPPPLPVIALPGVDDSYPPQKKSFMMIKYMHDHYLDKYEWFMRADDDVYIKGDKLEEFLRSLNSSKPLYLGQTGLGNIEELGKLGLEPGENFCMGGPGMIFSREVLRRMVPHIGECLREMYTTHEDVEVGRCVRRFGGTQCVWSYEMQQLFHENYEHNRKGYIQDLHNSKIHAAITLHPNKRPAYQYRLHNYMLSRKISELRYRTIQLHRESALMSKLSNTEVSKEDQQLGVIPSFNHFQPRERNEVIEWEFLTGKLLYSAAENQPPRQSLSSILRTALDDTVLQVMEMINENAKSRGRLIDFKEIQYGYRRVNPMHGVEYILDLLLLYKRHKGRKLTVPVRRHAYLQQLFSKPFFRETEELDVNSLVESINSETQSFSFISNSLKILSSFQGAKEMGGHNEKKVHILVPLIGRYDIFLRFMENFENMCLIPKQNVKLVIILFSRDSGQDSSKHIELIKGYQNKYPKAEMTLIPMKGEFSRGLGLEMASAQFDNDTLLLFCDVDLIFREDFLQRCRDNTIQGQQVYYPIIFSQYDPKVTNGGNPPTDDYFIFSKKTGFWRDYGYGITCIYKSDLLGAGGFDTSIQGWGLEDVDLYNKVILSGLRPFRSQEVGVVHIFHPVHCDPNLDPKQYKMCLGSKASTFASTMQLAELWLEKHLGVRYNRTLS

SEQ ID NO: 2918 - protein, 65 aa, Homo sapiens
HILYGKIIHLEKPFAVLVKHTPGDQDCDELGRETGTRYLVTALIKDKILFKTRPKPIITSVPKKV

SEQ ID NO: 2919 - protein, 524 aa, Homo sapiens
MKEPRIFPRERPTPWTRAPLPPRGRLDGSLGPQGGPVLNTGHPLGVNSDPFLMAAGSLGGNLTPFPRNPSPFPASSGSLASNPAPFPAGARDPSMASFPRGMNPTGTGAVSFPRPGGLLGPGPGPGPTLNPRTGALPGPGPLSNPRLGGLPGPGPMSNPRAGGLLGAGPDPRGGGPMGPGSGPNLRAGVLLTSGNGPPNPRPVGLGPGPNPNLRSGFLGTNPAPRSGVFPGPGLGPNPRPSGLGPGPNLDARAGGLLGTGSGLNLRMAGPQGLDLAPILRAAGLLGANSASFSQASGNMGTSPSSMARVPGPMGPNSGPSSRGIGLPGPNPSPMSRAPGPIGPNSAHFSRPVGPMGVNANPFPRGAGSSAFSQSSGTLASNPATFQRSAGLQGSNPTIFPRASGPLGPNPANFPRATGLQGPSPTTFPRSTGPLGPGQVTFPRPAAGHLGPSPAGPVGINPAPFTRPTGTLGLNPASFPRMNGPAGKSFVPFPRVGSLPGTNPAAFPRPGGPMAAMYPNGMLPP

SEQ ID NO: 2920 - protein, 12 aa, Homo sapiens
MVQIVISRESLC

SEQ ID NO: 2921 - protein, 12 aa, Homo sapiens
MVQIVISRESLC

SEQ ID NO: 2922 - protein, 121 aa, Homo sapiens
MVQIVISSARAGGLAEWVLMELQGEIEARYSTGLAGNLLGDLHYTTEGIPVLIVGHHILYGKIIHLEKPFAVLVKHTPGDQDCDELGRETGTRYLVTALIKDKILFKTRPKPIITSVPKKV

SEQ ID NO: 2923 - protein, 121 aa, Homo sapiens; identical to SEQ ID NO: 2922

SEQ ID NO: 2924 - protein, 58 aa, Homo sapiens
MVQIVISSARAGGLAEWVLMELQGEIEARYSTGLAGNLLGDLHYTTEGYIGLQVPVHM

SEQ ID NO: 2925 - protein, 75 aa, Homo sapiens
MVQIVISSARAGGLAEWVLMELQGEIEARYSTGLAGNLLGDLHYTTELHQAHWLQIQHLSRLVLVTQVWLLFQEG

SEQ ID NO: 2926 - protein, 99 aa, Homo sapiens
MVQIVISSARAGGLAEWVLMELQGEIEARYSTGLAGNLLGDLHYTTEVRGLFFPCLMPQESKLHQGGAPRTQSEDCLRFVIQGLANLRCSLLVLPLPLQ

SEQ ID NO: 2927 - protein, 144 aa, Homo sapiens
  SITE 1: note = misc_feature - Xaa can be any naturally occurring amino acid
XAVLAAAATAAGGSVVARWPRGAALGGRHCSARAGGLAEWVLMELQGEIEARYSTGLAGNLLGDLHYTTEGIPVLIVGHHILYGKIIHLEKPFAVLVKHTPGDQDCDELGRETGTRYLVTALIKDKILFKTRPKPIITSVPKKV

SEQ ID NO: 2928 - protein, 104 aa, Homo sapiens
  SITE 1: note = misc_feature - Xaa can be any naturally occurring amino acid
XSARGGGDGGGRFGCRPLAARRRARRPPLQGIPVLIVGHHILYGKIIHLEKPFAVLVKHTPGDQDCDELGRETGTRYLVTALIKDKILFKTRPKPIITSVPKKV

SEQ ID NO: 2929 - protein, 1184 aa, Homo sapiens
MVGTKAWVFSFLVLEVTSVLGRQTMLTQSVRRVQPGKKNPSIFAKPADTLESPGEWTTWFNIDYPGGKGDYERLDAIRFYYGDRVCARPLRLEARTTDWTPAGSTGQVVHGSPREGFWCLNREQRPGQNCSNYTVRFLCPPGSLRRDTERIWSPWSPWSKCSAACGQTGVQTRTRICLAEMVSLCSEASEEGQHCMGQDCTACDLTCPMGQVNADCDACMCQDFMLHGAVSLPGGAPASGAAIYLLTKTPKLLTQTDSDGRFRIPGLCPDGKSILKITKVKFAPIVLTMPKTSLKAATIKAEFVRAETPYMVMNPETKARRAGQSVSLCCKATGKPRPDKYFWYHNDTLLDPSLYKHESKLVLRKLQQHQAGEYFCKAQSDAGAVKSKVAQLIVIASDETPCNPVPESYLIRLPHDCFQNATNSFYYDVGRCPVKTCAGQQDNGIRCRDAVQNCCGISKTEEREIQCSGYTLPTKVAKECSCQRCTETRSIVRGRVSAADNGEPMRFGHVYMGNSRVSMTGYKGTFTLHVPQDTERLVLTFVDRLQKFVNTTKVLPFNKKGSAVFHEIKMLRRKKPITLEAMETNIIPLGEVVGEDPMAELEIPSRSFYRQNGEPYIGKVKASVTFLDPRNISTATAAQTDLNFINDEGDTFPLRTYGMFSVDFRDEVTSEPLNAGKVKVHLDSTQVKMPEHISTVKLWSLNPDTGLWEEEGDFKFENQRRNKREDRTFLVGNLEIRERRLFNLDVPESRRCFVKVRAYRSERFLPSEQIQGVVISVINLEPRTGFLSNPRAWGRFDSVITGPNGACVPAFCDDQSPDAYSAYVLASLAGEELQAVESSPKFNPNAIGVPQPYLNKLNYRRTDHEDPRVKKTAFQISMAKPRPNSAEESNGPIYAFENLRACEEAPPSAAHFRFYQIEGDRYDYNTVPFNEDDPMSWTEDYLAWWPKPMEFRACYIKVKIVGPLEVNVRSRNMGGTHRQTVGKLYGIRDVRSTRDRDQPNVSAACLEFKCSGMLYDQDRVDRTLVKVIPQGSCRRASVNPMLHEYLVNHLPLAVNNDTSEYTMLAPLDPLGHNYGIYTVTDQDPRTAKEIALGRCFDGTSDGSSRIMKSNVGVALTFNCVERQVGRQSAFQYLQSTPAQSPAAGTVQGRVPSRRQQRASRGGQRQGGVVASLRFPRVAQQPLIN

SEQ ID NO: 2930 - protein, 1162 aa, Homo sapiens
MASLLPLLCLCVVAAHLAGARDATPTEEPMATALGLERRSVYTGQPSPALEDWEARAVPAEASEWTSWFNVDHPGGDGDFESLAAIRFYYGPARVCPRPLALEARTTDWALPSAVGERVHLNPTRGFWCLNREQPRGRRCSNYHVRFRCPLEASWGAWGPWGPCSGSCGPGRRLRRRHCPSPAGDACPGRPLEAQKCVRPRCPGCSLDTCECPDHILLGSVVTPSGQPLLGARVSLRDQPGTVATSDAHGTFRVPGVCADSRANIRAQMDGFSAGEAQAQANGSISVVTIILDKLEKPYLVKHPESRVREAGQNVTFCCKASGTPMPKKYSWFHNGTLLDRRAHGYGAHLELRGLRPDQAGIYHCKAWNEAGAVRSGTARLTVLAPGQPACDPRPREYLIKLPEDCGQPGSGPAYLDVGLCPDTRCPSLAGSSPRCGDASSRCCSVRRLERREIHCPGYVLPVKVVAECGCQKCLPPRGLVRGRVVAADSGEPLRFARILLGQEPIGFTAYQGDFTIEVPPSTQRLVVTFVDPSGEFMDAVRVLPFDPRGAGVYHEVKAMRKKAPVILHTSQSNTIPLGELEDEAPLGELVLPSGAFRRADGKPYSGPVEARVTFVDPRDLTSAASAPSDLRFVDSDGELAPLRTYGMFSVDLRAPGSAEQLQVGPVAVRVAASQIHMPGHVEALKLWSLNPETGLWEEESGFRREGSSGPRVRREERVFLVGNVEIRERRLFNLDVPERRRCFVKVRAYANDKFTPSEQVEGVVVTLVNLEPAPGFSANPRAWGRFDSAVTGPNGACLPAFCDADRPDAYTALVTATLGGEELEPAPSLPRPLPATVGVTQPYLDRLGYRRTDHDDPAFKRNGFRINLAKPRPGDPAEANGPVYPWRSLRECQGAPVTASHFRFARVEADKYEYNVVPFREGTPASWTGDLLAWWPNPQEFRACFLKVKIQGPQEYMVRSHNAGGSHPRTRGQLYGLRDARSVRDPERPGTSAACVEFKCSGMLFDQRQVDRTLVTIMPQGSCRRVAVNGLLRDYLTRHPPPVPAEDPAAFSMLAPLDPLGHNYGVYTVTDQSPRLAKEIAIGRCFDGSSDGFSREMKADAGTAVTFQCREPPAGRPSLFQRLLESPATALGDIRREMSEAAQAQARASGPLRTRRGRVRQ

SEQ ID NO: 2931 - protein, 1156 aa, Homo sapiens
MASLLPLLCLCVVAAHLAGARDATPTEEPMATALGLERRSVYTGQPSPALEDWEEASEWTSWFNVDHPGGDGDFESLAAIRFYYGPARVCPRPLALEARTTDWALPSAVGERVHLNPTRGFWCLNREQPRGRRCSNYHVRFRCPLEASWGAWGPWGPCSGSCGPGRRLRRRHCPSPAGDACPGRPLEAQKCVRPRCPGCSLDTCECPDHILLGSVVTPSGQPLLGARVSLRDQPGTVATSDAHGTFRVPGVCADSRANIRAQMDGFSAGEAQAQANGSISVVTIILDKLEKPYLVKHPESRVREAGQNVTFCCKASGTPMPKKYSWFHNGTLLDRRAHGYGAHLELRGLRPDQAGIYHCKAWNEAGAVRSGTARLTVLAPGQPACDPRPREYLIKLPEDCGQPGSGPAYLDVGLCPDTRCPSLAGSSPRCGDASSRCCSVRRLERREIHCPGYVLPVKVVAECGCQKCLPPRGLVRGRVVAADSGEPLRFARILLGQEPIGFTAYQGDFTIEVPPSTQRLVVTFVDPSGEFMDAVRVLPFDPRGAGVYHEVKAMRKKAPVILHTSQSNTIPLGELEDEAPLGELVLPSGAFRRADGKPYSGPVEARVTFVDPRDLTSAASAPSDLRFVDSDGELAPLRTYGMFSVDLRAPGSAEQLQVGPVAVRVAASQIHMPGHVEALKLWSLNPETGLWEEESGFRREGSSGPRVRREERVFLVGNVEIRERRLFNLDVPERRRCFVKVRAYANDKFTPSEQVEGVVVTLVNLEPAPGFSANPRAWGRFDSAVTGPNGACLPAFCDADRPDAYTALVTATLGGEELEPAPSLPRPLPATVGVTQPYLDRLGYRRTDHDDPAFKRNGFRINLAKPRPGDPAEANGPVYPWRSLRECQGAPVTASHFRFARVEADKYEYNVVPFREGTPASWTGDLLAWWPNPQEFRACFLKVKIQGPQEYMVRSHNAGGSHPRTRGQLYGLRDARSVRDPERPGTSAACVEFKCSGMLFDQRQVDRTLVTIMPQGSCRRVAVNGLLRDYLTRHPPPVPAEDPAAFSMLAPLDPLGHNYGVYTVTDQSPRLAKEIAIGRCFDGSSDGFSREMKADAGTAVTFQCREPPAGRPSLFQRLLESPATALGDIRREMSEAAQAQARASGPLRTRRGRVRQ

SEQ ID NO: 2932 - protein, 113 aa, Homo sapiens
MDNVQPKIKHRPFCFSVKGHVKMLRLALTVTSMTFFIIAQAPEPYIVITGFEVTVILFFILLYVLRLDRLMKWLFWPLLDIINSLVTTVFMLIVSVLALIPETTTLTVGGGLF

SEQ ID NO: 2933 - protein, 152 aa, Homo sapiens
MDNVQPKIKHRPFCFSVKGHVKMLRLALTVTSMTFFIIAQAPEPYIVITGFEVTVILFFILLYVLRLDRLMKWLFWPLLDIINSLVTTVFMLIVSVLALIPETTTLTVGGGVFALVTAVCCLADGALIYRKLLFNPSGPYQKKPVHEKKEVL

SEQ ID NO: 2934 - protein, 120 aa, Homo sapiens
MDNVQPKIKHRPFCFSVKGHVKMLRLALTVTSMTFFIIAQAPEPYIVITGFEVTVILFFILLYVLRLDRLMKWLFWPLLVFALVTAVCCLADGALIYRKLLFNPSGPYQKKPVHEKKEVL

SEQ ID NO: 2935 - protein, 99 aa, Homo sapiens
MDNVQPKIKHRPFCFSVKGHVKMLRLDIINSLVTTVFMLIVSVLALIPETTTLTVGGGVFALVTAVCCLADGALIYRKLLFNPSGPYQKKPVHEKKEVL

SEQ ID NO: 2936 - protein, 33 aa, Homo sapiens
MDNVQPKIKHRPFCFSVKGHVKMLRLHCLVVFM

SEQ ID NO: 2937 - protein, 67 aa, Homo sapiens
MDNVQPKIKHRPFCFSVKGHVKMLRLVFALVTAVCCLADGALIYRKLLFNPSGPYQKKPVHEKKEVL

SEQ ID NO: 2938 - protein, 69 aa, Homo sapiens
MAGPFSRLLSARPGLRLLALAGAGSLAAGFLLRPEPVRAASERRRLYPPRLFPSSIRSVVSWEERTEQI

SEQ ID NO: 2939 - protein, 148 aa, Homo sapiens
MAGPFSRLLSARPGLRLLALAGAGSLAAGFLLRPEPVRAASERRRLYPPSAEYPDLRKHNNCMASHLTPAVYARLCDKTTPTGWTLDQCIQTGVDNPGHPFIKTVGMVAGDEETYEVFADLFDPVIQERHNGYDPRTMKHTTDLDASK

SEQ ID NO: 2940 - protein, 417 aa, Homo sapiens
MAGPFSRLLSARPGLRLLALAGAGSLAAGFLLRPEPVRAASERRRLYPPSAEYPDLRKHNNCMASHLTPAVYARLCDKTTPTGWTLDQCIQTGVDNPGHPFIKTVGMVAGDEETYEVFADLFDPVIQERHNGYDPRTMKHTTDLDASKIRSGYFDERYVLSSRVRTGRSIRGLSLPPACTRAERREVERVVVDALSGLKGDLAGRYYRLSEMTEAEQQQLIDDHFLFDKPVSPLLTAAGMARDWPDARGIWHNNEKSFLIWVNEEDHTRVISMEKGGNMKRVFERFCRGLKEVERLIQERGWEFMWNERLGYILTCPSNLGTGLRAGVHIKLPLLSKDSRFPKILENLRLQKRGTGGVDTAATGGVFDISNLDRLGKSEVELVQLVIDGVNYLIDCERRLERGQDIRIPTPVIHTKH

SEQ ID NO: 2941 - protein, 417 aa, Homo sapiens; identical to SEQ ID NO: 2940

SEQ ID NO: 2942 - protein, 298 aa, Homo sapiens
MAGPFSRLLSARPGLRLLALAGAGSLAAGFLLRPEPVRAASERRRLYPPSAEYPDLRKHNNCMASHLTPAVYARLCDKTTPTGWTLDQCIQTGVDNPGHPFIKTVGMVAGDEETYEVFADLFDPVIQERHNGYDPRTMKHTTDLDASKIRSGYFDERYVLSSRVRTGRSIRGLSLPPACTRAERREVERVVVDALSGLKGDLAGRYYRLSEMTEAEQQQLIDDHFLFDKPVSPLLTAAGMARDWPDARGIWHNNEKSFLIWVNEEDHTRVISMEKGGNMKRVFERFCRGLKEVVVGIK

SEQ ID NO: 2943 - protein, 222 aa, Homo sapiens
MAGPFSRLLSARPGLRLLALAGAGSLAAGFLLRPEPVRAASERRRLYPPSQTWPTGQLPGNCTRSRRLCPPSMVTGYPLPSAEYPDLRKHNNCMASHLTPAVYARLCDKTTPTGWTLDQCIQTGVDNPGHPFIKTVGMVAGDEETYEVFADLFDPVIQERHNGYDPRTMKHTTDLDASKIRSGYFDERYVLSSRVRTGRSIRGLSLPPACTRAERREVERVV

SEQ ID NO: 2944 - protein, 58 aa, Homo sapiens
MAGPFSRLLSARPGLRLLALAGAGSLAAGFLLRPEPVRAASERRRLYPPRYLLTCLTL

SEQ ID NO: 2945 - protein, 103 aa, Homo sapiens
MAGPFSRLLSARPGLRLLALAGAGSLAAGFLLRPEPVRAASERRRLYPPSAEYPDLRKHNNCMASHLTPAVYARLCDKTTPTGWTLDQCIQTGVDNPGHPFIK

SEQ ID NO: 2946 - protein, 129 aa, Homo sapiens
MAGPFSRLLSARPGLRLLALAGAGSLAAGFLLRPEPVRAASERRRLYPPSAEYPDLRKHNNCMASHLTPAVYARLCDKTTPTGWTLDQCIQTGVDNPGHPFIKTVGMVAGDEETYEVFADLFDPVIQER

SEQ ID NO: 2947 - protein, 241 aa, Homo sapiens
MAGPFSRLLSARPGLRLLALAGAGSLAAGFLLRPEPVRAASERRRLYPPSAEYPDLRKHNNCMASHLTPAVYARLCDKTTPTGWTLDQCIQTGVDNPGHPFIKTVGMVAGDEETYEVFADLFDPVIQERHNGYDPRTMKHTTDLDASKIRSGYFDERYVLSSRVRTGRSIRGLSLPPACTRAERREVERVVVDALSGLKGDLAGRYYRLSEMTEAEQQQLIDDHFLFDKPVSPLLTAAGMA

SEQ ID NO: 2948 - protein, 417 aa, Homo sapiens; identical to SEQ ID NO: 2940

SEQ ID NO: 2949 - protein, 298 aa, Homo sapiens; identical to SEQ ID NO: 2942

SEQ ID NO: 2950 - protein, 417 aa, Homo sapiens; identical to SEQ ID NO: 2940

SEQ ID NO: 2951 - protein, 298 aa, Homo sapiens; identical to SEQ ID NO: 2942

SEQ ID NO: 2952 - protein, 96 aa, Homo sapiens
MAGPFSRLLSARPGLRLLALAGAGSLAAGFLLRPEPVRAASERRRLYPPSQTWPTGQLPGNCTRSRRLCPPSMVTGYPLPSAEYPDLRKHNNCMAS

SEQ ID NO: 2953 - protein, 203 aa, Homo sapiens
MAGPFSRLLSARPGLRLLALAGAGSLAAGFLLRPEPVRAASERRRLYPPSQTWPTGQLPGNCTRSRRLCPPSMVTGYPLPSAEYPDLRKHNNCMASHLTPAVYARLCDKTTPTGWTLDQCIQTGVDNPGHPFIKTVGMVAGDEETYEVFADLFDPVIQERHNGYDPRTMKHTTDLDASKIRSGYFDERYVLSSRVRTGRSIRG

SEQ ID NO: 2954 - protein, 914 aa, Homo sapiens
MGPFKSSVFILILHLLEGALSNSLIQLNNNGYEGIVVAIDPNVPEDETLIQQIKDMVTQASLYLLEATGKRFYFKNVAILIPETWKTKADYVRPKLETYKNADVLVAESTPPGNDEPYTEQMGNCGEKGERIHLTPDFIAGKKLAEYGPQGRAFVHEWAHLRWGVFDEYNNDEKFYLSNGRIQAVRCSAGITGTNVVKKCQGGSCYTKRCTFNKVTGLYEKGCEFVLQSRQTEKASIMFAQHVDSIVEFCTEQNHNKEAPNKQNQKCNLRSTWEVIRDSEDFKKTTPMTTQPPNPTFSLLQIGQRIVCLVLDKSGSMATGNRLNRLNQAGQLFLLQTVELGSWVGMVTFDSAAHVQNELIQINSGSDRDTLAKRLPAAASGGTSICSGLRSAFTVIRKKYPTDGSEIVLLTDGEDNTISGCFNEVKQSGAIIHTVALGPSAAQELEELSKMTGGLQTYASDQVQNNGLIDAFGALSSGNGAVSQRSIQLESKGLTLQNSQWMNGTVIVDSTVGKDTLFLITWTMQPPQILLWDPSGQKQGGFVVDKNTKMAYLQIPGIAKVGTWKYSLQASSQTLTLTVTSRASNATLPPITVTSKTNKDTSKFPSPLVVYANIRQGASPILRASVTALIESVNGKTVTLELLDNGAGADATKDDGVYSRYFTTYDTNGRYSVKVRALGGVNAARRRVIPQQSGALYIPGWIENDEIQWNPPRPEINKDDVQHKQVCFSRTSSGGSFVASDVPNAPIPDLFPPGQITDLKAEIHGGSLINLTWTAPGDDYDHGTAHKYIIRISTSILDLRDKFNESLQVNTTALIPKEANSEEVFLFKPENITFENGTDLFIAIQAVDKVDLKSEISNIARVSLFIPPQTPPETPSPDETSAPCPNIHINSTIPGIHILKIMWKWIGELQLSIA

SEQ ID NO: 2955 - protein, 914 aa, Homo sapiens; identical to SEQ ID NO: 2954

SEQ ID NO: 2956 - protein, 225 aa, Homo sapiens
MDLRAGDSWGMLACLCTVLWHLPAVPALNRTGDPGPGPSIQKTYDLTRYLEHQLRSLAGTYLNYLGPPFNEPDFNPPRLGAETLPRATVDLEVWRSLNDKLRLTQNYEAYSHLLCYLRGLNRQAATAELRRSLAHFCTSLQGLLGSIAGVMAALGYPLPQPLPGTEPTWTPGPAHSDFLQKMDDFWLLKELQTWLWRSAKDFNRLKKKMQPPAAAVTLHLGAHGF

SEQ ID NO: 2957 - protein, 215 aa, Homo sapiens
MLACLCTVLWHLPAVPALNRTGDPGPGPSIQKTYDLTRYLEHQLRSLAGTYLNYLGPPFNEPDFNPPRLGAETLPRATVDLEVWRSLNDKLRLTQNYEAYSHLLCYLRGLNRQAATAELRRSLAHFCTSLQGLLGSIAGVMAALGYPLPQPLPGTEPTWTPGPAHSDFLQKMDDFWLLKELQTWLWRSAKDFNRLKKKMQPPAAAVTLHLGAHGF

SEQ ID NO: 2958 - protein, 170 aa, Homo sapiens
MSMAVETFGFFMATVGLLMLGVTLPNSYWRVSTVHGNVITTNTIFENLWFSCATDSLGVYNCWEFPSMLALSGIAGLRCTNIGGLELSRKAKLAATAGALHILAGICGMVAISWYAFNITRDFFDPLYPGTKYELGPALYLGWSASLISILGGLCLCSACCCGSDEDPAA

SEQ ID NO: 2959 - protein, 148 aa, Homo sapiens
MSMAVETFGFFMATVGLLMLGVTLPNSYWRVSTVHGNVITTNTIFENLWFSCATDSLGVYNCWEFPSMLALSGICGMVAISWYAFNITRDFFDPLYPGTKYELGPALYLGWSASLISILGGLCLCSACCCGSDEDPAASARRPYQAPV

SEQ ID NO: 2960 - protein, 128 aa, Homo sapiens
MSMAVETFGFFMATVGLLMLGVTLPNSYWRVSTVHGNVITTNTIFENLWFSCATDSLGVYNCWEFPSMLALSGSTDSPASLSGGTGLLVRLMSIKGPCEGRRLASCRLSVRCKEAVCVQGIFRPAGHS

SEQ ID NO: 2961 - protein, 228 aa, Homo sapiens
MSMAVETFGFFMATVGLLMLGVTLPNSYWRVSTVHGNVITTNTIFENLWFSCATDSLGVYNCWEFPSMLALSGYIQACRALMITAILLGFLGLLLGIAGLRCTNIGGLELSRKAKLAATAGALHILAGICGMVAISWYAFNITRDFFDPLYPGTKYELGPALYLGWSASLISILGGLCLCSACCCGSDEDPAASARRPYQAPVSVMPVATSDQEGDSSFGKYGRNAYV

SEQ ID NO: 2962 - protein, 228 aa, Homo sapiens; identical to SEQ ID NO: 2961

SEQ ID NO: 2963 - protein, 106 aa, Homo sapiens
  SITE 1: note = misc_feature - Xaa can be any naturally occurring amino acid
XGNVITTNTIFENLWFSCATDSLGVYNCWEFPSMLALSGYIQACRALMITAILLGFLGLLLGIAGLRCTNIGGLELSRKAKLAATAGALHILADLLAANQPIGSVS

SEQ ID NO: 2964 - protein, 140 aa, Homo sapiens
MANSGLQLLGFSMALLGWVGLVACTAIPQWQMSSYAGDNIITAQAMYKGLWMDCVTQSTGMMSCKIGLAGHSSPNGGLPGAGLPGHVCGHDGHEVHALWGRRQSEEGPYSHGWRHNFHRGRSCRLGSLLLVWPSDCHRLL

SEQ ID NO: 2965 - protein, 129 aa, Homo sapiens
MANSGLQLLGFSMALLGWVGLVACTAIPQWQMSSYAGDNIITAQAMYKGLWMDCVTQSTGMMSCKMYDSVLALSAALQATRALMVVSLVLGFLAMFVATMGMKCTRCGGDDKVKKARIAMGGGIIFIVA

SEQ ID NO: 2966 - protein, 211 aa, Homo sapiens
MANSGLQLLGFSMALLGWVGLVACTAIPQWQMSSYAGDNIITAQAMYKGLWMDCVTQSTGMMSCKMYDSVLALSAALQATRALMVVSLVLGFLAMFVATMGMKCTRCGGDDKVKKARIAMGGGIIFIVAGLAALVACSWYGHQIVTDFYNPLIPTNIKYEFGPAIFIGWAGSALVILGGALLSCSCPGNESKAGYRVPRSYPKSNSSKEYV

SEQ ID NO: 2967 - protein, 211 aa, Homo sapiens; identical to SEQ ID NO: 2966

SEQ ID NO: 2968 - protein, 145 aa, Homo sapiens
MANSGLQLLGFSMALLGWVGLVACTAIPQWQMSSYAGDNIITAQAMYKGLWMDCVTQSTGMMSCKMYDSVLALSAALQATRALMVVSLVLGFLAMFVATMGMKCTRCGGDDKVKKARIAMGGGIIFIVAGMSLALPSLLAGQGLP

SEQ ID NO: 2969 - protein, 194 aa, Homo sapiens
MPEGTVGLPARRPQCFLRAEMANSGLQLLGFSMALLGWVGLVACTAIPQWQMSSYAGDNIITAQAMYKGLWMDCVTQSTGMMSCKMYDSVLALSAALQATRALMVVSLVLGFLAMFVATMGMKCTRCGGDDKVKKARIAMGGGIIFIVAGLAALVACSWYGHQIVTDFYNPLIPTNIKYEFGPAIFIGWAGSAL

SEQ ID NO: 2970 - protein, 100 aa, Homo sapiens
MVVSLVLGFLAMFVATMGMKCTRCGGDDKVKKARIAMGGGIIFIVAGLAALVACSWYGHQIVTDFYNPLIPTNIKYEFGPAIFIGWAGSALVILGGALLS

SEQ ID NO: 2971 - protein, 72 aa, Homo sapiens
FVSLGLMCFGALIGLCACICRSLYPTIATGILHLLAGLCTLGSVSCYVAGIELLHQKLELPDNPSTIKNVSP

SEQ ID NO: 2972 - protein, 155 aa, Homo sapiens
KSIWDEFISDEADEKTYNDALFRYNGTVGLWRRCITIPKNMHWYSPPERTESFDVVTKCVSFTLTEQFMEKFVDPGNHNSGIDLLRTYLWRCQFLLPFVSLGLMCFGALIGLCACICRSLYPTIATGILHLLAAQYYKERFTIMTLQSWETYHKI

SEQ ID NO: 2973 - protein, 138 aa, Homo sapiens
MAASIGTDFWYEYRSPVQENSSDLNKSIWDEFISDEADEKTYNDALFRYNGTVGLWRRCITIPKNMHWYSPPERTESFDVVTKCVSFTLTEQFMEKFVDPGNHNSGIDLLRTYLWRCQFLLPFVSLGLMCFGALIGLC

SEQ ID NO: 2974 - protein, 223 aa, Homo sapiens
MAASIGTDFWYEYRSPVQENSSDLNKSIWDEFISDEADEKTYNDALFRYNGTVGLWRRCITIPKNMHWYSPPERTESFDVVTKCVSFTLTEQFMEKFVDPGNHNSGIDLLRTYLWRCQFLLPFVSLGLMCFGALIGLCACICRSLYPTIATGILHLLAGLCTLGSVSCYVAGIELLHQKLELPDNVSGEFGWSFCLACVSAPLQFMASALFIWAAHTNRKEYT

SEQ ID NO: 2975 - protein, 89 aa, Homo sapiens
MDNRFATAFVIACVLSLISTIYMAASIGTDFWYEYRSPVQENSSDLNKSIWDEFISDEADEKTYNDALFRYNGTVGLWRRCITIPKNMH

SEQ ID NO: 2976 - protein, 145 aa, Homo sapiens
MDNRFATAFVIACVLSLISTIYMAASIGTDFWYEYRSPVQENSSDLNKSIWDEFISDEADEKTYNDALFRYNGTVGLWRRCITIPKNMHWYSPPERTESFDVVTKCVSFTLTEQFMEKFVDPGNHNSGIDLLRTYLWRCQFLLPF

SEQ ID NO: 2977 - protein, 172 aa, Homo sapiens
MDNRFATAFVIACVLSLISTIYMAASIGTDFWYEYRSPVQENSSDLNKSIWDEFISDEADEKTYNDALFRYNGTVGLWRRCITIPKNMHWYSPPERTESFDVVTKCVSFTLTEQFMEKFVDPGNHNSGIDLLRTYLWRCQFLLPFVSLGLMCFGALIGLCACICRSLYPTIA

SEQ ID NO: 2978 - protein, 177 aa, Homo sapiens
MDNRFATAFVIACVLSLISTIYMAASIGTDFWYEYRSPVQENSSDLNKSIWDEFISDEADEKTYNDALFRYNGTVGLWRRCITIPKNMHWYSPPERTESFDVVTKCVSFTLTEQFMEKFVDPGNHNSGIDLLRTYLWRCQFLLPFVSLGLMCFGALIGLCACICRSLYPTIATGILH

SEQ ID NO: 2979 - protein, 180 aa, Homo sapiens
MDNRFATAFVIACVLSLISTIYMAASIGTDFWYEYRSPVQENSSDLNKSIWDEFISDEADEKTYNDALFRYNGTVGLWRRCITIPKNMHWYSPPERTESFDVVTKCVSFTLTEQFMEKFVDPGNHNSGIDLLRTYLWRCQFLLPFVSLGLMCFGALIGLCACICRSLYPTIATGILHLLA

SEQ ID NO: 2980 - protein, 213 aa, Homo sapiens
MDNRFATAFVIACVLSLISTIYMAASIGTDFWYEYRSPVQENSSDLNKSIWDEFISDEADEKTYNDALFRYNGTVGLWRRCITIPKNMHWYSPPERTESFDVVTKCVSFTLTEQFMEKFVDPGNHNSGIDLLRTYLWRCQFLLPFVSLGLMCFGALIGLCACICRSLYPTIATGILHLLAGLCTLGSVSCYVAGIELLHQKLELPDNVSGEFG

SEQ ID NO: 2981 - protein, 237 aa, Homo sapiens
MDNRFATAFVIACVLSLISTIYMAASIGTDFWYEYRSPVQENSSDLNKSIWDEFISDEADEKTYNDALFRYNGTVGLWRRCITIPKNMHWYSPPERTESFDVVTKCVSFTLTEQFMEKFVDPGNHNSGIDLLRTYLWRCQFLLPFVSLGLMCFGALIGLCACICRSLYPTIATGILHLLAGLCTLGSVSCYVAGIELLHQKLELPDNVSGEFGWSFCLACVSAPLQFMASALFIWAA

SEQ ID NO: 2982 - protein, 239 aa, Homo sapiens
MDNRFATAFVIACVLSLISTIYMAASIGTDFWYEYRSPVQENSSDLNKSIWDEFISDEADEKTYNDALFRYNGTVGLWRRCITIPKNMHWYSPPERTESFDVVTKCVSFTLTEQFMEKFVDPGNHNSGIDLLRTYLWRCQFLLPFVSLGLMCFGALIGLCACICRSLYPTIATGILHLLAGLCTLGSVSCYVAGIELLHQKLELPDNVSGEFGWSFCLACVSAPLQFMASALFIWAAHT

SEQ ID NO: 2983 - protein, 245 aa, Homo sapiens
MDNRFATAFVIACVLSLISTIYMAASIGTDFWYEYRSPVQENSSDLNKSIWDEFISDEADEKTYNDALFRYNGTVGLWRRCITIPKNMHWYSPPERTESFDVVTKCVSFTLTEQFMEKFVDPGNHNSGIDLLRTYLWRCQFLLPFVSLGLMCFGALIGLCACICRSLYPTIATGILHLLAGLCTLGSVSCYVAGIELLHQKLELPDNVSGEFGWSFCLACVSAPLQFMASALFIWAAHTNRKEYT

SEQ ID NO: 2984 - protein, 253 aa, Homo sapiens
MDNRFATAFVIACVLSLISTIYMAASIGTDFWYEYRSPVQENSSDLNKSIWDEFISDEADEKTYNDALFRYNGTVGLWRRCITIPKNMHWYSPPERTESFDVVTKCVSFTLTEQFMEKFVDPGNHNSGIDLLRTYLWRCQFLLPFVSLGLMCFGALIGLCACICRSLYPTIATGILHLLAGLCTLGSVSCYVAGIELLHQKLELPDNVSGEFGWSFCLACVSAPLQFMASALFIWAAHTNRKEYTLMKAYRVA

SEQ ID NO: 2985 - protein, 253 aa, Homo sapiens; identical to SEQ ID NO: 2984

SEQ ID NO: 2986 - protein, 253 aa, Homo sapiens; identical to SEQ ID NO: 2984

SEQ ID NO: 2987 - protein, 253 aa, Homo sapiens; identical to SEQ ID NO: 2984

SEQ ID NO: 2988 - protein, 253 aa, Homo sapiens; identical to SEQ ID NO: 2984

SEQ ID NO: 2989 - protein, 253 aa, Homo sapiens; identical to SEQ ID NO: 2984

SEQ ID NO: 2990 - protein, 210 aa, Homo sapiens
MDNRFATAFVIACVLSLISTIYMAASIGTDFWYEYRSPVQENSSDLNKSIWDEFISDEADEKTYNDALFRYNGTVGLWRRCITIPKNMHWYSPPERTESFDVVTKCVSFTLTEQFMEKFVDPGNHNSGIDLLRTYLWRCQFLLPFVSLGLMCFGALIGLCACICRSLYPTIATGILHLLAVTKESMLPAGAESKHTATPAHACVQTGKPK

SEQ ID NO: 2991 - protein, 106 aa, Homo sapiens
MDNRFATAFVIACVLSLISTIYMAASIGTDFWYEYRSPVQENSSDLNKSIWDEFISDEADEKTYNDALFRYNGTVGLWRRCITIPKNMHWYSPPERTGNCSCSRVI

SEQ ID NO: 2992 - protein, 100 aa, Homo sapiens
MEKFVDPGNHNSGIDLLRTYLWRCQFLLPFVSLGLMCFGALIGLCACICRSLYPTIATGILHLLAGLCTLGSVSCYVAGIELLHQKLELPDNVSGEFGWS

SEQ ID NO: 2993 - protein, 122 aa, Homo sapiens
MEKFVDPGNHNSGIDLLRTYLWRCQFLLPFVSLGLMCFGALIGLCACICRSLYPTIATGILHLLAGLCTLGSVSCYVAGIELLHQKLELPDNVSGEFGWSFCLACVSAPLQFMASALFIWAA

SEQ ID NO: 2994 - protein, 87 aa, Homo sapiens
MGESFDVVTKCVSFTLTEQFMEKFVDPGNHNSGIDLLRTYLWRCQFLLPFVSLGLMCFGALIGLCACICRSLYPTIATGILHLLAEN

SEQ ID NO: 2995 - protein, 158 aa, Homo sapiens
MGESFDVVTKCVSFTLTEQFMEKFVDPGNHNSGIDLLRTYLWRCQFLLPFVSLGLMCFGALIGLCACICRSLYPTIATGILHLLAGLCTLGSVSCYVAGIELLHQKLELPDNVSGEFGWSFCLACVSAPLQFMASALFIWAAHTNRKEYTLMKAYRVA

SEQ ID NO: 2996 - protein, 276 aa, Homo sapiens
MGGDRLENKTSVSVASWSSLNARMDNRFATAFVIACVLSLISTIYMAASIGTDFWYEYRSPVQENSSDLNKSIWDEFISDEADEKTYNDALFRYNGTVGLWRRCITIPKNMHWYSPPERTESFDVVTKCVSFTLTEQFMEKFVDPGNHNSGIDLLRTYLWRCQFLLPFVSLGLMCFGALIGLCACICRSLYPTIATGILHLLAGLCTLGSVSCYVAGIELLHQKLELPDNVSGEFGWSFCLACVSAPLQFMASALFIWAAHTNRKEYTLMKAYRVA

SEQ ID NO: 2997 - protein, 317 aa, Homo sapiens
MQAAWLLGALVVPQLLGFGHGARGAEREWEGGWGGAQEEEREREALMLKHLQEALGLPAGRGDENPAGTVEGKEDWEMEEDQGEEEEEEATPTPSSGPSPSPTPEDIVTYILGRLAGLDAGLHQLHVRLHALDTRVVELTQGLRQLRNAAGDTRDAVQALQEAQGRAEREHGRLEDSECMTPPPSLPGPAHRLPEGAAPGPQVLPALARLRSSGGGAGAVHGAGREPGAAGRPPADGGAHSVPARGARSLQLARVAGRARSARRGPLPLRKRPARVLLRLASLTPPRARRPAQRLAASAQPGPAQRWHARELRGAGL

SEQ ID NO: 2998 - protein, 323 aa, Homo sapiens
MQAAWLLGALVVPQLLGFGHGARGAEREWEGGWGGAQEEEREREALMLKHLQEALGLPAGRGDENPAGTVEGKEDWEMEEDQGEEEEEEATPTPSSGPSPSPTPEDIVTYILGRLAGLDAGLHQLHVRLHALDTRVVELTQGLRQLRNAAGDTRDAVQALQEAQGRAEREHGRLEGCLKGLRLGHKCFLLSRDFEAQAAAQARCTARGGSLAQPADRQQMEALTRYLRAALAPYNWPVWLGVHDRRAEGLYLFENGQRVSFFAWHRSPRPELGAQPSASPHPLSPDQPNGGTLENCVAQASDDGSWWDHDCQRRLYYVCEFPF

SEQ ID NO: 2999 - protein, 245 aa, Homo sapiens
MQAAWLLGALVVPQLLGFGHGARGAEREWEGGWGGAQEEEREREALMLKHLQEALGLPAGRGDENPAGTVEGKEDWEMEEDQGEEEEEEATPTPSSGPSPSPTPEDIVTYILGRLAGLDAGLHQLHVRLHALDTRVVELTQGLRQLRNAAGDTRDAVQALQEAQGRAEREHGRLEGCLKGLRLGHKCFLLSRDFEAQPSASPHPLSPDQPNGGTLENCVAQASDDGSWWDHDCQRRLYYVCEFPF

SEQ ID NO: 3000 - protein, 118 aa, Homo sapiens
LAKGRIQARRMKMQRIAALLDLPIQPTTEVLGFGLGSSTSTQHLPFRFYDQGRRGSSDPTVQRSVFASVDKVPALLTAAVERQPRWPLPSLLVPWLTDCCGGLCLLIYRRFSRIVFKI

SEQ ID NO: 3001 - protein, 906 aa, Homo sapiens
MFGRSRSWVGGGHGKTSRNIHSLDHLKYLYHVLTKNTTVTEQNRNLLVETIRSITEILIWGDQNDSSVFDFFLEKNMFVFFLNILRQKSGRYVCVQLLQTLNILFENISHETSLYYLLSNNYVNSIIVHKFDFSDEEIMAYYISFLKTLSLKLNNHTVHFFYNEHTNDFALYTEAIKFFNHPESMVRIAVRTITLNVYKVDNQAMLHYIRDKTAVPYFSNLVWFIGSHVIELDDCVQTDEEHRNRGKLSDLVAEHLDHLHYLNDILIINCEFLNDVLTDHLLNRLFLPLYVYSLENQDKGGERPKISLPVSLYLLSQVFLIIHHAPLVNSLAEVILNGDLSEMYAKTEQDIQRSSAKPSIRCFIKPTETLERSLEMNKHKGKRRVQKRPNYKNVGEEEDEEKGPTEDAQEDAEKAKEIEMVIMERSKLSELAASTSVQEQNTTDEEKSAAATCSESTQWSRPFLDMVYHALDSPDDDYHALFVLCLLYAMSHNKGMDPEKLERIQLPVPNAAEKTTYNHPLAERLIRIMNNAAQPDGKIRLATLELSCLLLKQQVLMSAGCIMKDVHLACLEGAREESVHLVRHFYKGEDIFLDMFEDEYRSMTMKPMNVEYLMMDASILLPPTGTPLTGIDFVKRLPCGDVEKTRRAIRVFFMLRSLSLQLRGEPETQLPLTREEDLIKTDDVLDLNNSDLIACTVITKDGGMVQRFLAVDIYQMSLVEPDVSRLGWGVVKFAGLLQDMQVTGVEDDSRALNITIHKPASSPHSKPFPILQATFIFSDHIRCIIAKQRLAKGRIQARRMKMQRIAALLDLPIQPTTEVLGFGLGSSTSTQHLPFRFYDQGRRGSSDPTVQRSVFASVDKVPGEPAPRPAPQLVHHGGRSRSFSLWSLCELPFLSQKPRRLAAPAS

SEQ ID NO: 3002 - protein, 1053 aa, Homo sapiens
MFGRSRSWVGGGHGKTSRNIHSLDHLKYLYHVLTKNTTVTEQNRNLLVETIRSITEILIWGDQNDSSVFDFFLEKNMFVFFLNILRQKSGRYVCVQLLQTLNILFENISHETSLYYLLSNNYVNSIIVHKFDFSDEEIMAYYISFLKTLSLKLNNHTVHFFYNEHTNDFALYTEAIKFFNHPESMVRIAVRTITLNVYKVSLDNQAMLHYIRDKTAVPYFSNLVWFIGSHVIELDDCVQTDEEHRNRGKLSDLVAEHLDHLHYLNDILIINCEFLNDVLTDHLLNRLFLPLYVYSLENQDKGGERPKISLPVSLYLLSQVFLIIHHAPLVNSLAEVILNGDLSEMYAKTEQDIQRSSAKPSIRCFIKPTETLERSLEMNKHKGKRRVQKRPNYKNVGEEEDEEKGPTEDAQEDAEKAKGTEGGSKGIKTSGESEEIEMVIMERSKLSELAASTSVQEQNTTDEEKSAAATCSESTQWSRPFLDMVYHALDSPDDDYHALFVLCLLYAMSHNKGMDPEKLERIQLPVPNAAEKTTYNHPLAERLIRIMNNAAQPDGKIRLATLELSCLLLKQQVLMSAGCIMKDVHLACLEGAREESVHLVRHFYKGEDIFLDMFEDEYRSMTMKPMNVEYLMMDASILLPPTGTPLTGIDFVKRLPCGDVEKTRRAIRVFFMLRSLSLQLRGEPETQLPLTREEDLIKTDDVLDLNNSDLIACTVITKDGGMVQRFLAVDIYQMSLVEPDVSRLGWGVVKFAGLLQDMQVTGVEDDSRALNITIHKPASSPHSKPFPILQATFIFSDHIRCIIAKQRLAKGRIQARRMKMQRIAALLDLPIQPTTEVLGFGLGSSTSTQHLPFRFYDQGRRGSSDPTVQRSVFASVDKVPGFAVAQCINQHSSPSLSSQSPPSASGSPSGSGSTSHCDSGGTSSSSTPSTAQSPADAPMSPELPKPHLPDQLVIVNETEADSKPSKNVARSAAVETASLSPSLVPARQPTISLLCEDTADTLSVESLTLVPPVDPHSLRSLTGMPPLSTPAAACTEPVGEEAACAEPVGTAED

SEQ ID NO: 3003 - protein, 60 aa, Homo sapiens
  SITE 1: note = misc_feature - Xaa can be any naturally occurring amino acid
XEVLGFGLGSSTSTQHLPFRFYDQGRRGSSDPTVQRSVFASVDKVPDPSLCSCISYMCQS

SEQ ID NO: 3004 - protein, 152 aa, Homo sapiens
  SITE 1: note = misc_feature - Xaa can be any naturally occurring amino acid
XKGRIQARRMKMQRIAALLDLPIQPTTEVLGFGLGSSTSTQHLPFRFYDQGRRGSSDPTVQRSVFASVDKVPGFAVAQCINQHSSPSLSSQSPPSASGSPSGSGSTSHCDSGGTSSSSTPSTAQSPAVRSGRKGRRRVFSLSEADSHGGHWV

SEQ ID NO: 3005 - protein, 128 aa, Homo sapiens
  SITE 1: note = misc_feature - Xaa can be any naturally occurring amino acid
XMQVTGVEDDSRALNITIHKPASSPHSKPFPILQATFIFSDHIRCIIAKQRLAKGRIQARRMKMQRIAALLDLPIQPTTEVLGFGLGSSTSTQHLPFRFYDQGRRGSSDPTVQRSVFASVDKVPGFQG

SEQ ID NO: 3006 - protein, 446 aa, Homo sapiens
MLHPETSPGRGHLLAVLLALLGTAWAEVWPPQLQEQAPMAGALNRKESFLLLSLHNRLRSWVQPPAADMRRLDWSDSLAQLAQARAALCGTPTPSLASGLWRTLQVGWNMQLLPAGLVSFVEVVSLWFAEGQRYSHAAGECARNATCTHYTQLVWATSSQLGCGRHLCSAGQAAIEAFVCAYSPRGNWEVNGKTIVPYKKGAWCSLCTASVSGCFKAWDHAGGLCEVPRNPCRMSCQNHGRLNISTCHCHCPPGYTGRYCQVRCSLQCVHGRFREEECSCVCDIGYGGAQCATKVHFPFHTCDLRIDGDCFMVSSEADTYYRARMKCQRKGGVLAQIKSQKVQDILAFYLGRLETTNEVIDSDFETRNFWIGLTYKTAKDSFRWATGEHQAFTSFAFGQPDNHGFGNCVELQASAAFNWNDQRCKTRNRYICQFAQEHISRWGPGS

SEQ ID NO: 3007 - protein, 446 aa, Homo sapiens; identical to SEQ ID NO: 3006

SEQ ID NO: 3008 - protein, 455 aa, Homo sapiens
MLHPETSPGRGHLLAVLLALLGTAWAEVWPPQLQEQAPMAGALNRKESFLLLSLHNRLRSWVQPPAADMRRLDWSDSLAQLAQARAALCGTPTPSLASGLWRTLQVGWNMQLLPAGLVSFVEVVSLWFAEGQRYSHAAGECARNATCTHYTQLVWATSSQLGCGRHLCSAGQAAIEAFVCAYSPRGNWEVNGKTIVPYKKGAWCSLCTASVSGCFKAWDHAGGLCEVPRNPCRMSCQNHGRLNISTCHCHCPPGYTGRYCQVRCSLQCVHGRFREEECSCVCDIGYGGAQCATKVHFPFHTCDLRIDGDCFMVSSEADTYYRARMKCQRKGGVLAQIKSQKVQDILAFYLGRLETTNEVIDSDFETRNFWIGLTYKTAKDSFRWATGEHQAFTSFAFGQPDNHGLVWLSAAMGFGNCVELQASAAFNWNDQRCKTRNRYICQFAQEHISRWGPGS

SEQ ID NO: 3009 - protein, 446 aa, Homo sapiens; identical to SEQ ID NO: 3006

SEQ ID NO: 3010 - protein, 446 aa, Homo sapiens; identical to SEQ ID NO: 3006

SEQ ID NO: 3011 - protein, 66 aa, Homo sapiens
MRRLLVWATSSQLGCGRHLCSAGQAAIEAFVCAYSPRGNWEVNGKTIVPYKKGAWCSLCTASVSGC

SEQ ID NO: 3012 - protein, 455 aa, Homo sapiens
MLHPETSPGRGHLLAVLLALLGTTWAEVWPPQLQEQAPMAGALNRKESFLLLSLHNRLRSWVQPPAADMRRLDWSDSLAQLAQARAALCGIPTPSLASGLWRTLQVGWNMQLLPAGLASFVEVVSLWFAEGQRYSHAAGECARNATCTHYTQLVWATSSQLGCGRHLCSAGQTAIEAFVCAYSPGGNWEVNGKTIIPYKKGAWCSLCTASVSGCFKAWDHAGGLCEVPRNPCRMSCQNHGRLNISTCHCHCPPGYTGRYCQVRCSLQCVHGRFREEECSCVCDIGYGGAQCATKVHFPFHTCDLRIDGDCFMVSSEADTYYRARMKCQRKGGVLAQIKSQKVQDILAFYLGRLETTNEVIDSDFETRNFWIGLTYKTAKDSFRWATGEHQAFTSFAFGQPDNHGLVWLSAAMGFGNCVELQASAAFNWNDQRCKTRNRYICQFAQEHISRWGPGS

SEQ ID NO: 3013 - protein, 446 aa, Homo sapiens
MLHPETSPGRGHLLAVLLALLGTTWAEVWPPQLQEQAPMAGALNRKESFLLLSLHNRLRSWVQPPAADMRRLDWSDSLAQLAQARAALCGIPTPSLASGLWRTLQVGWNMQLLPAGLASFVEVVSLWFAEGQRYSHAAGECARNATCTHYTQLVWATSSQLGCGRHLCSAGQTAIEAFVCAYSPRGNWEVNGKTIIPYKKGAWCSLCTASVSGCFKAWDHAGGLCEVPRNPCRMSCQNHGRLNISTCHCHCPPGYTGRYCQVRCSLQCVHGRFREEECSCVCDIGYGGAQCATKVHFPFHTCDLRIDGDCFMVSSEADTYYRARMKCQRKGGVLAQIKSQKVQDILAFYLGRLETTNEVIDSDFETRNFWIGLTYKTAKDSFRWATGEHQAFTSFAFGQPDNHGFGNCVELQASAAFNWNDQRCKTRNRYICQFAQEHISRWGPGS

SEQ ID NO: 3014 - protein, 303 aa, Homo sapiens [sequence omitted]

SEQ ID NO: 3015 - protein, 446 aa, Homo sapiens; identical to SEQ ID NO: 3013

SEQ ID NO: 3016 - protein, 119 aa, Homo sapiens
MLHPETSPGRGHLLAVLLALLGTAWAEVWPPQLQEQAPMAGALNRKESFLLLSLHNRLRSWVQPPAADMRRLDWSDSLAQLAQARAALCGIPTPSLASGLWRTLQVGWNMQLLPAGLAS

SEQ ID NO: 3017 - protein, 446 aa, Homo sapiens
MLHPETSPGRGHLLAVLLALLGTAWAEVWPPQLQEQAPMAGALNRKESFLLLSLHNRLRSWVQPPAADMRRLDWSDSLAQLAQARAALCGIPTPSLASGLWRTLQVGWNMQLLPAGLASFVEVVSLWFAEGQRYSHAAGECARNATCTHYTQLVWATSSQLGCGRHLCSAGQAAIEAFVCAYSPRGNWEVNGKTIVPYKKGAWCSLCTASVSGCFKAWDHAGGLCEVPRNPCRMSCQNHGRLNISTCHCHCPPGYTGRYCQVRCSLQCVHGRFREEECSCVCDIGYGGAQCATKVHFPFHTCDLRIDGDCFMVSSEADTYYRARMKCQRKGGVLAQIKSQKVQDILAFYLGRLETTNEVIDSDFETRNFWIGLTYKTAKDSFRWATGEHQAFTSFAFGQPDNHGFGNCVELQASAAFNWNNQRCKTRNRYICQFAQEHISRWGPGS

SEQ ID NO: 3018 - protein, 455 aa, Homo sapiens
MLHPETSPGRGHLLAVLLALLGTAWAEVWPPQLQEQAPMAGALNRKESFLLLSLHNRLRSWVQPPAADMRRLDWSDSLAQLAQARAALCGIPTPSLASGLWRTLQVGWNMQLLPAGLASFVEVVSLWFAEGQRYSHAAGECARNATCTHYTQLVWATSSQLGCGRHLCSAGQAAIEAFVCAYSPRGNWEVNGKTIVPYKKGAWCSLCTASVSGCFKAWDHAGGLCEVPRNPCRMSCQNHGRLNISTCHCHCPPGYTGRYCQVRCSLQCVHGRFREEECSCVCDIGYGGAQCATKVHFPFHTCDLRIDGDCFMVSSEADTYYRARMKCQRKGGVLAQIKSQKVQDILAFYLGRLETTNEVIDSDFETRNFWIGLTYKTAKDSFRWATGEHQAFTSFAFGQPDNHGLVWLSAAMGFGNCVELQASAAFNWNNQRCKTRNRYICQFAQEHISRWGPGS

SEQ ID NO: 3019 - protein, 446 aa, Homo sapiens; identical to SEQ ID NO: 3017

SEQ ID NO: 3020 - protein, 446 aa, Homo sapiens; identical to SEQ ID NO: 3017

SEQ ID NO: 3021 - protein, 446 aa, Homo sapiens; identical to SEQ ID NO: 3017

SEQ ID NO: 3022 - protein, 134 aa, Homo sapiens
MLHPETSPGRGHLLAVLLALLGTAWAEVWPPQLQEQAPMAGALNRKESFLLLSLHNRLRSWVQPPAADMRRLLVWATSSQLGCGRHLCSAGQAAIEAFVCAYSPRGNWEVNGKTIVPYKKGAWCSLCTASVSGC

SEQ ID NO: 3023 - protein, 86 aa, Homo sapiens
MQRWTLWAAAFLTLHSAQAFPQTDISISPALPELPLPSLCPLFWMEFKGHCYRFFPLNKTWAEADLYCSEFSVGRKSAKLASIHSL

SEQ ID NO: 3024 - protein, 186 aa, Homo sapiens
MQRWTLWAAAFLTLHSAQAFPQTDISISPALPELPLPSLCPLFWMEFKGHCYRFFPLNKTWAEADLYCSEFSVGRKSAKLASIHSWEENVFVYDLVNSCVPGIPADVWTGLHDHRQEGQFEWTDGSSYDYSYWDGSQPDDGVHADPEEEDCVQIWYRPTSALRSWNDNTCSRKFPFVCKIPSLTIH

SEQ ID NO: 3025 - protein, 136 aa, Homo sapiens
MQRWTLWAAAFLTLHSAQAFPQTDISISPALPELPLPSLCPLFWMEFKGHCYRFFPLNKTWAEADLYCSEFSVGRKSAKLASIHSWEENVFVYDLVNSCVPGIPADVWTGLHDHRQVRKQWPLGPLGSSSQDSILI

SEQ ID NO: 3026 - protein, 65 aa, Homo sapiens
MQRWTLWAAAFLTLHSAQAFPQTDISISPVCFLSAPSPARAAPAFPVPPVLDGVQRPLLSILPSQ

SEQ ID NO: 3027 - protein, 80 aa, Homo sapiens
MILKLILSLKNFLRRYKCSSDHWIGLKMAKNRTGQWVDGATFTKSFGMRGSEGCAYLSDDGAATARCYTERKWICRKRIH

SEQ ID NO: 3028 - protein, 149 aa, Homo sapiens
MMTKHKKCFIIVGVLITTNIITLIVKLTRDSQSLCPYDWIGFQNKCYYFSKEEGDWNSSKYNCSTQHADLTIIDNIEEMNFLRRYKCSSDHWIGLKMAKNRTGQWVDGATFTKSFGMRGSEGCAYLSDDGAATARCYTERKWICRKRIH

SEQ ID NO: 3029 - protein, 206 aa, Homo sapiens
MAQQACPRAMAKNGLVICILVITLLLDQTTSHTSRLKARKHSKRRVRDKDGDLKTQIEKLWTEVNALKEIQALQTVCLRGTKVHKKCYLASEGLKHFHEANEDCISKGGILVIPRNSDEINALQDYGKRSLPGVNDFWLGINDMVTEGKFVDVNGIAISFLNWDRAQPNGGKRENCVLFSQSAQGKWSDEACRSSKRYICEFTIPQ

SEQ ID NO: 3030 - protein, 50 aa, Homo sapiens
MAQQACPRAMAKNGLVICILVITLLLDQTTSHTSRLKARKHSKRRVRGIC

SEQ ID NO: 3031 - protein, 202 aa, Homo sapiens
MELWGAYLLLCLFSLLTQVTTEPPTQKPKKIVNAKKDVVNTKMFEELKSRLDTLAQEVALLKEQQALQTVCLKGTKVHMKCFLAFTQTKTFHEASEDCISRGGTLGTPQTGSENDALYEYLRQSVGNEAEIWLGLNDMAAEGTWVDMTGARIAYKNWETEITAQPDGGKTENCAVLSGAANGKWFDKRCRDQLPYICQFGIV

SEQ ID NO: 3032 - protein, 160 aa, Homo sapiens
MFEELKSRLDTLAQEVALLKEQQALQTVCLKGTKVHMKCFLAFTQTKTFHEASEDCISRGGTLGTPQTGSENDALYEYLRQSVGNEAEIWLGLNDMAAEGTWVDMTGARIAYKNWETEITAQPDGGKTENCAVLSGAANGKWFDKRCRDQLPYICQFGIV

SEQ ID NO: 3033 - protein, 179 aa, Homo sapiens
MHFQAFWLCLGLLFISINAEFMDDDVETEDFEENSEEIDVNESELSSEIKYKTPQPIGEVYFAETFDSGRLAGWVLSKAKKDDMDEEISIYDGRWEIEELKENQVPGDRGLVLKSRAKHHAISAVLAKPFIFADKPLIVQYEVNFQDGIDCGGAYIKLLADTDDLILENFYDKTSYIIM

SEQ ID NO: 3034 - protein, 610 aa, Homo sapiens
MHFQAFWLCLGLLFISINAEFMDDDVETEDFEENSEEIDVNESELSSEIKYKTPQPIGEVYFAETFDSGRLAGWVLSKAKKDDMDEEISIYDGRWEIEELKENQVPGDRGLVLKSRAKHHAISAVLAKPFIFADKPLIVQYEVNFQDGIDCGGAYIKLLADTDDLILENFYDKTSYIIMFGPDKCGEDYKLHFIFRHKHPKTGVFEEKHAKPPDVDLKKFFTDRKTHLYTLVMNPDDTFEVLVDQTVVNKGSLLEDVVPPIKPPKEIEDPNDKKPEEWDERAKIPDPSAVKPEDWDESEPAQIEDSSVVKPAGWLDDEPKFIPDPNAEKPDDWNEDTDGEWEAPQILNPACRIGCGEWKPPMIDNPKYKGVWRPPLVDNPNYQGIWSPRKIPNPDYFEDDHPFLLTSFSALGLELWSMTSDIYFDNFIICSEKEVADHWAADGWRWKIMIANANKPGVLKQLMAAAEGHPWLWLIYLVTAGVPIALITSFCWPRKVKKKHKDTEYKKTDICIPQTKGVLEQEEKEEKAALEKPMDLEEEKKQNDGEMLEKEEESEPEEKSEEEIEIIEGQEESNQSNKSGSEDEMKEADESTGSGDGPIKSVRKRRVRKD

SEQ ID NO: 3035 - protein, 610 aa, Homo sapiens; identical to SEQ ID NO: 3034

SEQ ID NO: 3036 - protein, 277 aa, Homo sapiens
GCSLMAQEVDTAQGAEMRRGAGAARGRASWCWALALLWLAVVPGWSRVSGIPSRRHWPVPYKRFDFRPKPDPYCQAKYTFCPTGSPIPVMEGDDDIEVFRLQAPVWEFKYGDLLGHLKIMHDAIGFRSTLTGKNYTMEWYELFQLGNCTFPHLRPEMDAPFWCNQGAACFFEGIDDVHWKENGTLVQVATISGFHHVGQDSIELRTSSDPPILASQSAGITDVSHCTRPTIRILPQRGTLYYLSLALLPGWSTVVRPRLTATSASRIQTIFLPQPPK

SEQ ID NO: 3037 - protein, 204 aa, Homo sapiens
GSTGCSLMAQEVDTAQGAEMRRGAGAARGRASWCWALALLWLAVVPGWSRVSGIPSRRHWPVPYKRFDFRPKPDPYCQAKYTFCPTGSPIPVMEGDDDIEVFRLQAPVWEFKYGDLLGHLKIMHDAIGFRSTLTGKNYTMEWYELFQLGNCTFPHLRPEMDAPFWCNQGAACFFEGIDDVHWKENGTLVQVATISDGETEAQRG

SEQ ID NO: 3038 - protein, 271 aa, Homo sapiens
LMAQEVDTAQGAEMRRGAGAARGRASWCWALALLWLAVVPGWSRVSGIPSRRHWPVPYKRFDFRPKPDPYCQAKYTFCPTGSPIPVMEGDDDIEVFRLQAPVWEFKYGDLLGHLKIMHDAIGFRSTLTGKNYTMEWYELFQLGNCTFPHLRPEMDAPFWCNQGAACFFEGIDDVHWKENGTLVQVATISGFHHVGQDSIELRTSSDPPILASQSAGITDVSHCTRPTIRILPQRGTLYYLLWTKTFLLCSLQFSWDFQNIATPYFNLLPKP

SEQ ID NO: 3039 - protein, 358 aa, Homo sapiens
MAQEVDTAQGAEMRRGAGAARGRASWCWALALLWLAVVPGWSRVSGIPSRRHWPVPYKRFDFRPKPDPYCQAKYTFCPTGSPIPVMEGDDDIEVFRLQAPVWEFKYGDLLGHLKIMHDAIGFRSTLTGKNYTMEWYELFQLGNCTFPHLRPEMDAPFWCNQGAACFFEGIDDVHWKENGTLVQVATISGNMFNQMAKWVKQDNETGIYYETWNVKASPEKGAETWFDSYDCSKFVLRTFNKLAEFGAEFKNIETNYTRIFLYSGEPTYLGNETSVFGPTGNKTLGLAIKRFYYPFKPHLPTKEFLLSLLQIFDAVIVHKQFYLFYNFEYWFLPMKFPFIKITYEEIPLPIRNKTLSGL

SEQ ID NO: 3040 - protein, 36 aa, Homo sapiens
MEGDDDIEVFRLQAPVWEFKYGDLLGHLLLYLAPGR

SEQ ID NO: 3041 - protein, 407 aa, Homo sapiens
MRRNLRLGPSSGADAQGQGAPRPGLAAPRMLLPPASQASRGSGSTGCSLMAQEVDTAQGAEMRRGAGAARGRASWCWALALLWLAVVPGWSRVSGIPSRRHWPVPYKRFDFRPKPDPYCQAKYTFCPTGSPIPVMEGDDDIEVFRLQAPVWEFKYGDLLGHLKIMHDAIGFRSTLTGKNYTMEWYELFQLGNCTFPHLRPEMDAPFWCNQGAACFFEGIDDVHWKENGTLVQVATISGNMFNQMAKWVKQDNETGIYYETWNVKASPEKGAETWFDSYDCSKFVLRTFNKLAEFGAEFKNIETNYTRIFLYSGEPTYLGNETSVFGPTGNKTLGLAIKRFYYPFKPHLPTKEFLLSLLQIFDAVIVHKQFYLFYNFEYWFLPMKFPFIKITYEEIPLPIRNKTLSGL

SEQ ID NO: 3042 - protein, 125 aa, Homo sapiens
  SITE 1: note = misc_feature - Xaa can be any naturally occurring amino acid
XGRASWCWALALLWLAVVPGWSRVSGIPSRRHWPVPYKRFDFRPKPDPYCQAKYTFCPTGSPIPVMEGDDDIEVFRLQAPVWEFKYGDLLGHLVTWTHGCVTVAFIHVLSLHRKLCMMPLDSEVH

SEQ ID NO: 3043 - protein, 304 aa, Homo sapiens
  SITE 1: note = misc_feature - Xaa can be any naturally occurring amino acid
XGYKRFDFRPKPDPYCQAKYTFCPTGSPIPVMEGDDDIEVFRLQAPVWEFKYGDLLGHLKIMHDAIGFRSTLTGKNYTMEWYELFQLGNCTFPHLRPEMDAPFWCNQGAACFFEGIDDVHWKENGTLVQVATISGNMFNQMAKWVKQDNETGIYYETWNVKASPEKGAETWFDSYDCSKFVLRTFNKLAEFGAEFKNIETNYTRIFLYSGEPTYLGNETSVFGPTGNKTLGLAIKRFYYPFKPHLPTKEFLLSLLQIFDAVIVHKQFYLFYNFEYWFLPMKFPFIKITYEEIPLPIRNKTLSGL

SEQ ID NO: 3044 - protein, 216 aa, Homo sapiens
  SITE 1: note = misc_feature - Xaa can be any naturally occurring amino acid
XLPPASQASRGSGSTGCSLMAQEVDTAQGAEMRRGAGAARGRASWCWALALLWLAVVPGWSRVSGIPSRRHWPVPYKRFDFRPKPDPYCQAKYTFCPTGSPIPVMEGDDDIEVFRLQAPVWEFKYGDLLGHLKIMHDAIGFRSTLTGKNYTMEWYELFQLGNCTFPHLRPEMDAPFWCNQGAACFFEGIDDVHWKENGTLVQVATISDGETEAQRG

SEQ ID NO: 3045 - protein, 249 aa, Homo sapiens
  SITE 1: note = misc_feature - Xaa can be any naturally occurring amino acid
XMAQEVDTAQGAEMRRGAGAARGRASWCWALALLWLAVVPGWSRVSGIPSRRHWPVPYKRFDFRPKPDPYCQAKYTFCPTGSPIPVMEGDDDIEVFRLQAPVWEFKYGDLLGHLKIMHDAIGFRSTLTGKNYTMEWYELFQLGNCTFPHLRPEMDAPFWCNQGAACFFEGIDDVHWKENGTLVQVATISGFHHVGQDSIELRTSSDPPILASQSAGITDVSHCTRPTIRILPQRGTLYYLRWVLLCCPG

SEQ ID NO: 3046 - protein, 205 aa, Homo sapiens
  SITE 1: note = misc_feature - Xaa can be any naturally occurring amino acid
XQASRGSGSTGCSLMAQEVDTAQGAEMRRGAGAARGRASWCWALALLWLAVVPGWSRVSGIPSRRHWPVPYKRFDFRPKPDPYCQAKYTFCPTGSPIPVMEGDDDIEVFRLQAPVWEFKYGDLLGHLKIMHDAIGFRSTLTGKNYTMEWYELFQLGNCTFPHLRPEMDAPFWCNQGAACFFEGIDDVHWKENGTLVQVATISGKL

SEQ ID NO: 3047 - protein, 210 aa, Homo sapiens
  SITE 1: note = misc_feature - Xaa can be any naturally occurring amino acid
XSLMAQEVDTAQGAEMRRGAGAARGRASWCWALALLWLAVVPGWSRVSGIPSRRHWPVPYKRFDFRPKPDPYCQAKYTFCPTGSPIPVMEGDDDIEVFRLQAPVWEFKYGDLLGHLKIMHDAIGFRSTLTGKNYTMEWYELFQLGNCTFPHLRPEMDAPFWCNQGAACFFEGIDDVHWKENGTLVQVATISEISCALKNGIKLAELGFLL

SEQ ID NO: 3048 - protein, 112 aa, Homo sapiens
MEKILILLLVALSVAYAAPGPRGIIINLENGELCMNSAQCKSNCCQHSSALGLARCTSMASENSECSVKTLYGIYYKCPCERGLTCEGDKTIVGSITNTNFGICHDAGRSKQ

SEQ ID NO: 3049 - protein, 71 aa, Homo sapiens
MEKILILLLVALSVAYAAPGPRGIIINLTLYGIYYKCPCERGLTCEGDKTIVGSITNTNFGICHDAGRSKQ

SEQ ID NO: 3050 - protein, 98 aa, Homo sapiens
MILLPQPPKKLGLQENGELCMNSAQCKSNCCQHSSALGLARCTSMASENSECSVKTLYGIYYKCPCERGLTCEGDKTIVGSITNTNFGICHDAGRSKQ

SEQ ID NO: 3051 - protein, 42 aa, Homo sapiens
GCCQRAPDNCESHCAEKGSEGSLCQTQLPATPCFLPSNTVRT

SEQ ID NO: 3052 - protein, 121 aa, Homo sapiens
MMLPQWLLLLFLLFFFLFLLTRGSLSPTKYNLLELKESCIRNQDCETGCCQRAPDNCESHCAEKGSEGSLCQTQVFFGQYRACPCLRNLTCIYSKNEKWLSIAYGRCQKIGRQKLAKKMFF

SEQ ID NO: 3053 - protein, 100 aa, Homo sapiens
MAAALALVAGVLSGAVLPLWSALPQYKKKITDRCFHHSECYSGCCLMDLDSGGAFCAPRARITMICLPQTKGATNIICPCRMGLTCISKDLMCSRRCHMI

SEQ ID NO: 3054 - protein, 153 aa, Homo sapiens
MAAALALVAGVLSGAVLPLWSALPQYKKKITDRCFHHSECYSGCCLMDLDSGGAFCAPRARITMICLPQWLELFKGRDRIIFIYEAPTPSLVSAHNQGSYQHHLPLPDGLDVHIQGLDVFPPVPYDLEEDAGWSLLPWGHRPWLPPTCSKSSS

SEQ ID NO: 3055 - protein, 633 aa, Homo sapiens
MPSCGACTCGAAAVRLITSSLASAQRGISGGRIHMSVLGRLGTFETQILQRAPLRSFTETPAYFASKDGISKDGSGDGNKKSASEGSSKKSGSGNSGKGGNQLRCPKCGDLCTHVETFVSSTRFVKCEKCHHFFVVLSEADSKKSIIKEPESAAEAVKLAFQQKPPPPPKKIYNYLDKYVVGQSFAKKVLSVAVYNHYKRIYNNIPANLRQQAEVEKQTSLTPRELEIRRREDEYRFTKLLQIAGISPHGNALGASMQQQVNQQIPQEKRGGEVLDSSHDDIKLEKSNILLLGPTGSGKTLLAQTLAKCLDVPFAICDCTTLTQAGYVGEDIESVIAKLLQDANYNVEKAQQGIVFLDEVDKIGSVPGIHQLRDVGGEGVQQGLLKLLEGTIVNVPEKNSRKLRGETVQVDTTNILFVASGAFNGLDRIISRRKNEKYLGFGTPSNLGKGRRAAAAADLANRSGESNTHQDIEEKDRLLRHVEARDLIEFGMIPEFVGRLPVVVPLHSLDEKTLVQILTEPRNAVIPQYQALFSMDKCELNVTEDALKAIARLALERKTGARGLRSIMEKLLLEPMFEVPNSDIVCVEVDKEVVEGKKEPGYIRAPTKESSEEEYDSGVEEEGWPRQADAANS

SEQ ID NO: 3056 - protein, 268 aa, Homo sapiens
MPSCGACTCGAAAVRLITSSLASAQRGISGGRIHMSVLGRLGTFETQILQRAPLRSFTETPAYFASKDGISKDGSGDGNKKSASEGSSKKSGSGNSGKGGNQLRCPKCGDLCTHVETFVSSTRFVKCEKCHHFFVVLSEADSKKSIIKEPESAAEAVKLAFQQKPPPPPKKIYNYLDKYVVGQSFAKKVLSVAVYNHYKRIYNNIPANLRQQAEVEKQTSLTPRELEIRRREDEYRFTKLLQIAGISPHGNALGASMQQQVKLCWHKP

SEQ ID NO: 3057 - protein, 130 aa, Homo sapiens
MSVLGRLGTFETQILQRAPLRSFTETPAYFASKDGISKDGSGDGNKKSASEGSSKKSGSGNSGKGGNQLRCPKCGDLCTHVETFVSSTRFVKCEKCHHFFVVLSEADSKKSIIKEPESAAEAVKLAFQQK

SEQ ID NO: 3058 - protein, 129 aa, Homo sapiens
MENDNTVLLNPPLFALDKDAPLRYAGEICGFRLHGSGVPFEAVILDKATGEGLIRAKEPVDCEAQKEHTFTIQAYDCGEGPDGANTKKSHKATVHVRVNDVNEFAPVFVERLYRAAVTEGKLYDRILRV

SEQ ID NO: 3059 - protein, 142 aa, Homo sapiens
MENDNTVLLNPPLFALDKDAPLRYAGEICGFRLHGSGVPFEAVILDKATGEGLIRAKEPVDCEAQKEHTFTIQAYDCGEGPDGANTKKSHKATVHVRVNDVNEFAPVFVERLYRAAVTEGKLYDRILRVEAIDGDCSPQYSQ

SEQ ID NO: 3060 - protein, 154 aa, Homo sapiens
MENDNTVLLNPPLFALDKDAPLRYAGEICGFRLHGSGVPFEAVILDKATGEGLIRAKEPVDCEAQKEHTFTIQAYDCGEGPDGANTKKSHKATVHVRVNDVNEFAPVFVERLYRAAVTEGKLYDRILRVEAIDGDCSPQYSQICYYEILTPNTP

SEQ ID NO: 3061 - protein, 134 aa, Homo sapiens
MTLLLLPLLLASLLASCSCNKANKHKPWIEAEYQGIVMENDNTVLLNPPLFALDKDAPLRYAGEICGFRLHGSGVPFEAVILDKATGEGLIRAKEPVDCEAQKEHTFTIQAYDCGEGPDGANTKKSHKATVHVR

SEQ ID NO: 3062 - protein, 956 aa, Homo sapiens
MTLLLLPLLLASLLASCSCNKANKHKPWIEAEYQGIVMENDNTVLLNPPLFALDKDAPLRYAGEICGFRLHGSGVPFEAVILDKATGEGLIRAKEPVDCEAQKEHTFTIQAYDCGEGPDGANTKKSHKATVHVRVNDVNEFAPVFVERLYRAAVTEGKLYDRILRVEAIDGDCSPQYSQICYYEILTPNTPFLIDNDGNIENTEKLQYSGERLYKFTVTAYDCGKKRAADDAEVEIQVKPTCKPSWQGWNKRIEYAPGAGSLALFPGIRLETCDEPLWNIQATIELQTSHVAKGCDRDNYSERALRKLCGAATGEVDLLPMPGPNANWTAGLSVHYSQDSSLIYWFNGTQAVQVPLGGPSGLGSGPQDSLSDHFTLSFWMKHGVTPNKGKKEEETIVCNTVQNEDGFSHYSLTVHGCRIAFLYWPLLESARPVKFLWKLEQVCDDEWHHYALNLEFPTVTLYTDGISFDPALIHDNGLIHPPRREPALMIGACWTEEKNKEKEKGDNSTDTTQGDPLSIHHYFHGYLAGFSVRSGRLESREVIECLYACREGLDYRDFESLGKGMKVHVNPSQSLLTLEGDDVETFNHALQHVAYMNTLRFATPGVRPLRLTTAVKCFSEESCVSIPEVEGYVVVLQPDAPQILLSGTAHFARPAVDFEGTNGVPLFPDLQITCSISHQVEAKKDESWQGTVTDTRMSDEIVHNLDGCEISLVGDDLDPERESLLLDTTSLQQRGLELTNTSAYLTIAGVESITVYEEILRQARYRLRHGAALYTRKFRLSCSEMNGRYSSNEFIVEVNVLHSMNRVAHPSHVLSSQQFLHRGHQPPPEMAGHSLASSHRNSMIPSAATLIIVVCVGFLVLMVVLGLVRIHSLHRRVSGAGGPPGASSDPKDPDLFWDDSALTIIVNPMESYQNRQSCVTGAVGGQQEDEDSSDSEVADSPSSDERRIIETPPHRY

SEQ ID NO: 3063 - protein, 968 aa, Homo sapiens
MVLGCELSGSTRVVVGVEALLTGASSPLPGVGPANKHKPWIEAEYQGIVMENDNTVLLNPPLFALDKDAPLRYAGEICGFRLHGSGVPFEAVILDKATGEGLIRAKEPVDCEAQKEHTFTIQAYDCGEGPDGANTKKSHKATVHVRVNDVNEFAPVFVERLYRAAVTEGKLYDRILRVEAIDGDCSPQYSQICYYEILTPNTPFLIDNDGNIENTEKLQYSGERLYKFTVTAYDCGKKRAADDAEVEIQVKPTCKPSWQGWNKRIEYAPGAGSLALFPGIRLETCDEPLWNIQATIELQTSHVAKGCDRDNYSERALRKLCGAATGEVDLLPMPGPNANWTAGLSVHYSQDSSLIYWFNGTQAVQVPLGGPSGLGSGPQDSLSDHFTLSFWMKHGVTPNKGKKEEETIVCNTVQNEDGFSHYSLTVHGCRIAFLYWPLLESARPVKFLWKLEQVCDDEWHHYALNLEFPTVTLYTDGISFDPALIHDNGLIHPPRREPALMIGACWTEEKNKEKEKGDNSTDTTQGDPLSIHHYFHGYLAGFSVRSGRLESREVIECLYACREGLDYRDFESLGKGMKVHVNPSQSLLTLEGDDVETFNHALQHVAYMNTLRFATPGVRPLRLTTAVKCFSEESCVSIPEVEGYVVVLQPDAPQILLSGTAHFARPAVDFEGTNGVPLFPDLQITCSISHQVEAKKDESWQGTVTDTRMSDEIVHNLDGCEISLVGDDLDPERESLLLDTTSLQQRGLELTNTSAYLTIAGVESITVYEEILRQARYRLRHGAALYTRKFRLSCSEMNGRYSSNEFIVEVNVLHSMNRVAHPSHVLSSQQFLHRGHQPPPEMAGHSLASSHRNSMIPSAATLIIVVCVGFLVLMVVLGLVRIHSLHRRVSGAGGPPGASSDPKDPDLFWDDSALTIIVNPMESYQNRQSCVTGAVGGQQEDEDSSDSEVADSPSSDERRIIETPPHRY

SEQ ID NO: 3064 - protein, 176 aa, Homo sapiens
MVVITNKHKPWIEAEYQGIVMENDNTVLLNPPLFALDKDAPLRYAGEICGFRLHGSGVPFEAVILDKATGEGLIRAKEPVDCEAQKEHTFTIQAYDCGEGPDGANTKKSHKATVHVRVNDVNEFAPVFVERLYRAAVTEGKLYDRILRVEAIDGDCSPQYSQICYYEILTPNTPFL

SEQ ID NO: 3065 - protein, 297 aa, Homo sapiens
MEACKDSRIGGMMKTLLLFVGLLLTWESGQVLGDQTVSDNELQEMSNQGSKYVNKEIQNAVNGVKQIKTLIEKTNEERKTLLSNLEEAKKKKEDALNETRESETKLKELPGVCNETMMALWEECKPCLKQTCMKFYARVCRSGSGLVGRQLEEFLNQSSPFYFWMNGDRIDSLLENDRQQTHMLDVMQDHFSRASSIIDELFQDRFFTREPQDTYHYLPFSLPHRRPHFFFPKSRIVRSLMPFSPYEPLNFHAMFQPFLEMIHEAQQAMDIHFHSPAFQHPPTEFIREGDDDRTVCR

SEQ ID NO: 3066 - protein, 32 aa, Homo sapiens
MMKTLLLFVGLLLTWESGQVLGDQTVSDNELQ

SEQ ID NO: 3067 - protein, 82 aa, Homo sapiens
MMKTLLLFVGLLLTWESGQVLGDQTVSDNELQEMSNQGSKYVNKEIQNAVNGVKQIKTLIEKTNEERKTLLSNLEEAKKKKE

SEQ ID NO: 3068 - protein, 82 aa, Homo sapiens; identical to SEQ ID NO: 3067

SEQ ID NO: 3069 - protein, 129 aa, Homo sapiens
MMKTLLLFVGLLLTWESGQVLGDQTVSDNELQEMSNQGSKYVNKEIQNAVNGVKQIKTLIEKTNEERKTLLSNLEEAKKKKEDALNETRESETKLKELPGVCNETMMALWEECKPCLKQTCMKFYARVC

SEQ ID NO: 3070 - protein, 136 aa, Homo sapiens
MMKTLLLFVGLLLTWESGQVLGDQTVSDNELQEMSNQGSKYVNKEIQNAVNGVKQIKTLIEKTNEERKTLLSNLEEAKKKKEDALNETRESETKLKELPGVCNETMMALWEECKPCLKQTCMKFYARVCRSGSGLV

SEQ ID NO: 3071 - protein, 139 aa, Homo sapiens
MMKTLLLFVGLLLTWESGQVLGDQTVSDNELQEMSNQGSKYVNKEIQNAVNGVKQIKTLIEKTNEERKTLLSNLEEAKKKKEDALNETRESETKLKELPGVCNETMMALWEECKPCLKQTCMKFYARVCRSGSGLVGRQ

SEQ ID NO: 3072 - protein, 204 aa, Homo sapiens
MMKTLLLFVGLLLTWESGQVLGDQTVSDNELQEMSNQGSKYVNKEIQNAVNGVKQIKTLIEKTNEERKTLLSNLEEAKKKKEDALNETRESETKLKELPGVCNETMMALWEECKPCLKQTCMKFYARVCRSGSGLVGRQLEEFLNQSSPFYFWMNGDRIDSLLENDRQQTHMLDVMQDHFSRASSIIDELFQDRFFTREPQDTY

SEQ ID NO: 3073 - protein, 449 aa, Homo sapiens
MMKTLLLFVGLLLTWESGQVLGDQTVSDNELQEMSNQGSKYVNKEIQNAVNGVKQIKTLIEKTNEERKTLLSNLEEAKKKKEDALNETRESETKLKELPGVCNETMMALWEECKPCLKQTCMKFYARVCRSGSGLVGRQLEEFLNQSSPFYFWMNGDRIDSLLENDRQQTHMLDVMQDHFSRASSIIDELFQDRFFTREPQDTYHYLPFSLPHRRPHFFFPKSRIVRSLMPFSPYEPLNFHAMFQPFLEMIHEAQQAMDIHFHSPAFQHPPTEFIREGDDDRTVCREIRHNSTGCLRMKDQCDKCREILSVDCSTNNPSQAKLRRELDESLQVAERLTRKYNELLKSYQWKMLNTSSLLEQLNEQFNWVSRLANLTQGEDQYYLRVTTVASHTSDSDVPSGVTEVVVKLFDSDPITVTVPVEVSRKNPKFMETVAEKALQEYRKKHREE

SEQ ID NO: 3074 - protein, 449 aa, Homo sapiens; identical to SEQ ID NO: 3073

SEQ ID NO: 3075 - protein, 449 aa, Homo sapiens; identical to SEQ ID NO: 3073

SEQ ID NO: 3076 - protein, 271 aa, Homo sapiens
MMKTLLLFVGLLLTWESGQVLGDQTVSDNELQEMSNQGSKYVNKEIQNAVNGVKQIKTLIEKTNEERKTLLSNLEEAKKKKEDALNETRESETKLKELPGVCNETMMALWEECKPCLKQTCMKFYARVCRSGSGLVGRQLEEFLNQSSPFYFWMNGDRIDSLLENDRQQTHMLDVMQDHFSRASSIIDELFQDSLMPFSPYEPLNFHAMFQPFLEMIHEAQQAMDIHFHSPAFQHPPTEFIREGDDDRTVCREIRHNSTGCLRMKDQCDKC

SEQ ID NO: 3077 - protein, 140 aa, Homo sapiens
  SITE 1: note = misc_feature - Xaa can be any naturally occurring amino acid
XADCSTNNPSQAKLRRELDESLQVAERLTRKYNELLKSYQWKMLNTSSLLEQLNEQFNWVSRLANLTQGEDQYYLRVTTVASHTSDSDVPSGVTEVVVKLFDSDPITVTVPVEVSRKNPKFMETVAEKALQEYRKKHREE

SEQ ID NO: 3078 - protein, 284 aa, Homo sapiens
  SITE 1: note = misc_feature - Xaa can be any naturally occurring amino acid
XQLEEFLNQSSPFYFWMNGDRIDSLLENDRQQTHMLDVMQDHFSRASSIIDELFQDRFFTREPQDTYHYLPFSLPHRRPHFFFPKSRIVRSLMPFSPYEPLNFHAMFQPFLEMIHEAQQAMDIHFHSPAFQHPPTEFIREGDDDRTVCREIRHNSTGCLRMKDQCDKCREILSVDCSTNNPSQAKLRRELDESLQVAERLTRKYNELLKSYQWKMLNTSSLLEQLNEQFNWVSRLANLTQGEDQYYLRVTTVASHTSDSDVPSGVTEVVVKLFDSDPITVTVPV

SEQ ID NO: 3079 - protein, 466 aa, Homo sapiens
MKPPLLVFIVCLLWLKDSHCAPTWKDKTAISENLKSFSEVGEIDADEEVKKALTGIKQMKIMMERKEKEHTNLMSTLKKCREEKQEALKLLNEVQEHLEEEERLCRESLADSWGECRSCLENNCMRIYTTCQPSWSSVKNKIERFFRKIYQFLFPFHEDNEKDLPISEKLIEEDAQLTQMEDVFSQLTVDVNSLFNRSFNVFRQMQQEFDQTFQSHFISDTDLTEPYFFPAFSKEPMTKADLEQCWDIPNFFQLFCNFSVSIYESVSETITKMLKAIEDLPKQDKAPDHGGLISKMLPGQDRGLCGELDQNLSRCFKFHEKCQKCQAHLSEDCPDVPALHTELDEAIRLVNVSNQQYGQILQMTRKHLEDTAYLVEKMRGQFGWVSELANQAPETEIIFNSIQVVPRIHEGNISKQDETMMTDLSILPSSNFTLKIPLEESAESSNFIGYVVAKALQHFKEHFKTW

SEQ ID NO: 3080 - protein, 466 aa, Homo sapiens; identical to SEQ ID NO: 3079

SEQ ID NO: 3081 - protein, 466 aa, Homo sapiens; identical to SEQ ID NO: 3079

SEQ ID NO: 3082 - protein, 491 aa, Homo sapiens
MNSMEAAVGTEVPLLDNLQHCNSGNMKPPLLVFIVCLLWLKDSHCAPTWKDKTAISENLKSFSEVGEIDADEEVKKALTGIKQMKIMMERKEKEHTNLMSTLKKCREEKQEALKLLNEVQEHLEEEERLCRESLADSWGECRSCLENNCMRIYTTCQPSWSSVKNKIERFFRKIYQFLFPFHEDNEKDLPISEKLIEEDAQLTQMEDVFSQLTVDVNSLFNRSFNVFRQMQQEFDQTFQSHFISDTDLTEPYFFPAFSKEPMTKADLEQCWDIPNFFQLFCNFSVSIYESVSETITKMLKAIEDLPKQDKAPDHGGLISKMLPGQDRGLCGELDQNLSRCFKFHEKCQKCQAHLSEDCPDVPALHTELDEAIRLVNVSNQQYGQILQMTRKHLEDTAYLVEKMRGQFGWVSELANQAPETEIIFNSIQVVPRIHEGNISKQDETMMTDLSILPSSNFTLKIPLEESAESSNFIGYVVAKALQHFKEHFKTW

SEQ ID NO: 3083 - protein, 518 aa, Homo sapiens
MRTWDYRWSLALVAQTGVHCCNLSSLQPLPPRFKRFSCLSLSSGWDYSNSGNMKPPLLVFIVCLLWLKDSHCAPTWKDKTAISENLKSFSEVGEIDADEEVKKALTGIKQMKIMMERKEKEHTNLMSTLKKCREEKQEALKLLNEVQEHLEEEERLCRESLADSWGECRSCLENNCMRIYTTCQPSWSSVKNKIERFFRKIYQFLFPFHEDNEKDLPISEKLIEEDAQLTQMEDVFSQLTVDVNSLFNRSFNVFRQMQQEFDQTFQSHFISDTDLTEPYFFPAFSKEPMTKADLEQCWDIPNFFQLFCNFSVSIYESVSETITKMLKAIEDLPKQDKAPDHGGLISKMLPGQDRGLCGELDQNLSRCFKFHEKCQKCQAHLSEDCPDVPALHTELDEAIRLVNVSNQQYGQILQMTRKHLEDTAYLVEKMRGQFGWVSELANQAPETEIIFNSIQVVPRIHEGNISKQDETMMTDLSILPSSNFTLKIPLEESAESSNFIGYVVAKALQHFKEHFKTW

SEQ ID NO: 3084 - protein, 518 aa, Homo sapiens; identical to SEQ ID NO: 3083

SEQ ID NO: 3085 - protein, 82 aa, Homo sapiens
MRTWDYSNSGNMKPPLLVFIVCLLWLKDSHCAPTWKDKTAISENLKSFSEVGEIDADEEVKKALTGIKQMKIMMERKEKEHT

SEQ ID NO: 3086 - protein, 34 aa, Homo sapiens
  SITE 1: note = misc_feature - Xaa can be any naturally occurring amino acid
XQFGWVSELANQAPETEIIFNSIQVRRSNASYIQ

SEQ ID NO: 3087 - protein, 136 aa, Homo sapiens
MLLKLKEKASLTLAVGTLPFPSQFNFVPPGRMCRVAGWGRTGVLKPGSDTLQEVKLRLMDPQACSHFRDFDHNLQLCVGNPRKTKSAFKGDSGGPLLCAGVAQGIVSYGRSDAKPPAVFTRISHYRPWINQILQAN

SEQ ID NO: 3088 - protein, 247 aa, Homo sapiens
MLLLPLPLLLFLLCSRAEAGEIIGGTECKPHSRPYMAYLEIVTSNGPSKFCGGFLIRRNFVLTAAHCAGRSITVTLGAHNITEEEDTWQKLEVIKQFRHPKYNTSTLHHDIMLLKLKEKASLTLAVGTLPFPSQFNFVPPGRMCRVAGWGRTGVLKPGSDTLQEVKLRLMDPQACSHFRDFDHNLQLCVGNPRKTKSAFKGDSGGPLLCAGVAQGIVSYGRSDAKPPAVFTRISHYRPWINQILQAN

SEQ ID NO: 3089 - protein, 179 aa, Homo sapiens
MLSRCRSGLLHVLGLSFLLQTRRPILLCSPRLMKPLVVFVLGGPGAGKGTQCARIVEEMDQTMAANAQKNKFLIDGFPRNQDNLQGWNKTMDGKADVSFVLFFDCNNEICIERCLERGKSSGRSDDNRESLEKRIQTYLQSTKPIIDLYEEMGKVKKIDASKSVDEVFDEVVQIFDKEG

SEQ ID NO: 3090 - protein, 58 aa, Homo sapiens
MLSRCRSGLLHVLGLSFLLQTRRPILLCSPRLMKPLVVFVLGGPGAGKGTQCARIVEG

SEQ ID NO: 3091 - protein, 228 aa, Homo sapiens
MLSRCRSGLLHVLGLSFLLQTRRPILLCSPRLMKPLVVFVLGGPGAGKGTQCARIVEKYGYTHLSAGELLRDERKNPDSQYGELIEKYIKEGKIVPVEITISLLKREMDQTMAANAQKNKFLIDGFPRNQDNLQGWNKTMDGKADVSFVLFFDCNNEICIERCLERGKSSGRSDDNRESLEKRIQTYLQSTKPIIDLYEEMGKVKKIDASKSVDEVFDEVVQIFDKEG

SEQ ID NO: 3092 - protein, 169 aa, Homo sapiens
MLSRCRSGLLHVLGLSFLLQTRRPILLCSPRLMKPLVVFVLGGPGAGKGTQCARIVEKYGYTHLSAGELLRDERKNPDSQYGELIEKYIKEGKIVPVEITISLLKREMDQTMAANAQKNKFLIDGFPRNQDNLQGWNKTMDGKADVSFVLFFDCNNENSDLPSVNKANY

SEQ ID NO: 3093 - protein, 436 aa, Homo sapiens
MPMSSLPAAILSHMTAINNVPPPPLHSIPNLKKSKHINYGQLNALCHIRGQHSRSMSNILSAHDTFMKQYPKVFLHQKPRLPKLFKQEEQRELNEGKEESQHQQPDDSNNIAVHVQRAHGGHILYRPKRATEKFEEFLAILKKLPIHRTPYEHKTVWKFLKTIPDLTFQLNDKHLKTLSKTVFSETWLKGSTVVANDGFYVILKGLARPQTNVYKNLIEGSDSPDSFISQSFHSFIWSEEFKNSTLAEMYLPSYDSMLSKWSTFGTLEVMPQNESETQMFSVVTEDDCEILKIPAKGYAKIKEEKIKLENMQKLKLIRMCPYYEEWPTLSIYELIALLKWKKFPPGHVIVESGNIISFVGYINSGCCNIYRSIIGFVKLRSNKVKRSQKLVYMGKLKEKESFGEISVLLQVPFTCTIITKKEVEMAIIEDKDLFVA

SEQ ID NO: 3094 - protein, 292 aa, Homo sapiens [sequence omitted]

SEQ ID NO: 3095 - protein, 161 aa, Homo sapiens
  SITE 1: note = misc_feature - Xaa can be any naturally occurring amino acid
XGCCNIYRSIIGFVKLRSNKVKRSQKLVYMGKLKEKESFGEISVLLQVPFTCTIITKKEVEMAIIEDKDLFELDPVTKQLMLQTAKPTFGHLTDEDVKNEYLKKEQQKEWKDFKIASWTKEITDFICLYEKHQDNFTLPKIAHLERITKRIKNNSILIHLE

SEQ ID NO: 3096 - protein, 207 aa, Homo sapiens
  SITE 1: note = misc_feature - Xaa can be any naturally occurring amino acid
XNMQKLKLIRMCPYYEEWPTLSIYELIALLKWKKFPPGHVIVESGNIISFVGYINSGCCNIYRSIIGFVKLRSNKVKRSQKLVYMGKLKEKESFGEISVLLQVPFTCTIITKKEVEMAIIEDKDLFELDPVTKQLMLQTAKPTFGHLTDEDVKNEYLKKEQQKEWKDFKDKTVKNSLYYKGIIPGFGKWDHYCTSIPRNLKDTLVNY

SEQ ID NO: 3097 - protein, 507 aa, Homo sapiens
MDPKLGRMAASLLAVLLLLLERGMFSSPSPPPALLEKVFQYIDLHQDEFVQTLKEWVAIESDSVQPVPRFRQELFRMMAVAADTLQRLGARVASVDMGPQQLPDGQSLPIPPVILAELGSDPTKGTVCFYGHLDVQPADRGDGWLTDPYVLTEVDGKLYGRGATDNKGPVLAWINAVSAFRALEQDLPVNIKFIIEGMEEAGSVALEELVEKEKDRFFSGVDYIVISDNLWISQRKPAITYGTRGNSYFMVEVKCRDQDFHSGTFGGILHEPMADLVALLGSLVDSSGHILVPGIYDEVVPLTEEEINTYKAIHLDLEEYRNSSRVEKFLFDTKEEILMHLWRYPSLSIHGIEGAFDEPGTKTVIPGRVIGKFSIRLVPHMNVSAVEKQVTRHLEDVFSKRNSSNKMVVSMTLGLHPWIANIDDTQYLAAKRAIRTVFGTEPDMIRDGSTIPIAKMFQEIVHKSVVLIPLGAVDDGEHSQNEKINRWNYIEGTKLFAAFFLEMAQLH

SEQ ID NO: 3098 - protein, 464 aa, Homo sapiens
MDPKLGRMTLKEWVAIESDSVQPVPRFRQELFRMMAVAADTLQRLGARVASVDMGPQQLPDGQSLPIPPVILAELGSDPTKGTVCFYGHLDVQPADRGDGWLTDPYVLTEVDGKLYGRGATDNKGPVLAWINAVSAFRALEQDLPVNIKFIIEGMEEAGSVALEELVEKEKDRFFSGVDYIVISDNLWISQRKPAITYGTRGNSYFMVEVKCRDQDFHSGTFGGILHEPMADLVALLGSLVDSSGHILVPGIYDEVVPLTEEEINTYKAIHLDLEEYRNSSRVEKFLFDTKEEILMHLWRYPSLSIHGIEGAFDEPGTKTVIPGRVIGKFSIRLVPHMNVSAVEKQVTRHLEDVFSKRNSSNKMVVSMTLGLHPWIANIDDTQYLAAKRAIRTVFGTEPDMIRDGSTIPIAKMFQEIVHKSVVLIPLGAVDDGEHSQNEKINRWNYIEGTKLFAAFFLEMAQLH

SEQ ID NO: 3099 - protein, 38 aa, Homo sapiens
  SITE 1: note = misc_feature - Xaa can be any naturally occurring amino acid
XADRGDGWLTDPYVLTEGNFMDEERPTTKALSWLGSML

SEQ ID NO: 3100 - protein, 61 aa, Homo sapiens
ILQKILLDDTGLAYICQTYERFSHVAMILGKMVLQLSKEPSARLLKHVVRCYLRLSDNPRC

SEQ ID NO: 3101 - protein, 41 aa, Homo sapiens
MHSLATAADLALLPRLECSGVILAHRNLDLLGSVDSPTSAS

SEQ ID NO: 3102 - protein, 299 aa, Homo sapiens
MHSLATAAPVPTTLAQVDREKIYQWINELSSPETRENALLELSKKRESVPDLAPMLWHSFGTIAALLQEIVNIYPSINPPTLTAHQSNRVCNALALLQCVASHPETRSAFLAAHIPLFLYPFLHTVSKTRPFEYLRLTSLGVIGALVKTDEQEVINFLLTTEIIPLCLRIMESGSELSKTVATFILQKILLDDTGLAYICQTYERFSHVAMILGKMVLQLSKEPSARLLKHVVRCYLRLSDNPRAREALRQCLPDQLKDTTFAQVLKDDTTTKRWLAQLVKNLQEGQVTDPRGIPLPPQ

SEQ ID NO: 3103 - protein, 299 aa, Homo sapiens; identical to SEQ ID NO: 3102

SEQ ID NO: 3104 - protein, 258 aa, Homo sapiens
MHSLATAAPVPTTLAQVDREKIYQWINELSSPETRENALLELSKKRESVPDLAPMLWHSFGTIAALLQEIVNIYPSINPPTLTAHQSNRVCNALALLQCVASHPETRSAFLAAHIPLFLYPFLHTVSKTRPFEYLRLTSLGVIGALVKTDEQEVINFLLTTEIIPLCLRIMESGSELSKTVATFILQKILLDDTGLAYICQTYERFSHVAMILGKMVLQLSKEPSARLLKHVVRCYLRLSDNPRFSDLTFCWSSFQRK

SEQ ID NO: 3105 - protein, 331 aa, Homo sapiens
MHSLATAAPVPTTLAQVDREKIYQWINELSSPETRENALLELSKKRESVPDLAPMLWHSFGTIAALLQEIVNIYPSINPPTLTAHQSNRVCNALALLQCVASHPETRSAFLAAHIPLFLYPFLHTVSKTRPFEYLRLTSLGVIVETGFHHVGQADLELPTSSDLPASASQSAGITGALVKTDEQEVINFLLTTEIIPLCLRIMESGSELSKTVATFILQKILLDDTGLAYICQTYERFSHVAMILGKMVLQLSKEPSARLLKHVVRCYLRLSDNPRAREALRQCLPDQLKDTTFAQVLKDDTTTKRWLAQLVKNLQEGQVTDPRGIPLPPQ

SEQ ID NO: 3106 - protein, 75 aa, Homo sapiens
MHSLATAAPVPTTLAQVDREKIYQWINELSSPETRENALLELSKKRESVPDLAPMLWHSFGTIAALLQVIVMQVI

SEQ ID NO: 3107 - protein, 80 aa, Homo sapiens
KNYVRVVGRNGESSELDLQGIRIDSDISGTLKFACESIVEEYEDELIEFFSREADNVKDKLCSKRTDLCDHALHISHDEL

SEQ ID NO: 3108 - protein, 102 aa, Homo sapiens
MGSFRINPDGSQSVVEVPYARSEAHLTELLEEICDRMKEYGEQIDPSTHRKNYVRVVGRNGESSELDLQGIRIDSDISGTLKFACESIVEEYEDELIEFFSR

SEQ ID NO: 3109 - protein, 168 aa, Homo sapiens
MKGWGWLALLLGALLGTAWARRSQDLHCGACRALVDELEWEIAQVDPKKTIQMGSFRINPDGSQSVVEVPYARSEAHLTELLEEICDRMKEYGEQIDPSTHRKNYVRVVGRNGESSELDLQGIRIDSDISGTLKFACESIVEEYEDELIEFFSREADNVKDKLCSKRT

SEQ ID NO: 3110 - protein, 182 aa, Homo sapiens
MKGWGWLALLLGALLGTAWARRSQDLHCGACRALVDELEWEIAQVDPKKTIQMGSFRINPDGSQSVVEVPYARSEAHLTELLEEICDRMKEYGEQIDPSTHRKNYVRVVGRNGESSELDLQGIRIDSDISGTLKFACESIVEEYEDELIEFFSREADNVKDKLCSKRTDLCDHALHISHDEL

SEQ ID NO: 3111 - protein, 41 aa, Homo sapiens
  SITE 1: note = misc_feature - Xaa can be any naturally occurring amino acid
XACRALVDELEWEIAQVDPKKTIQMGSFRINPDGSQSVVER

SEQ ID NO: 3112 - protein, 278 aa, Homo sapiens [sequence omitted]

SEQ ID NO: 3113 - protein, 143 aa, Homo sapiens
MDSMPEPASRCLLLLPLLLLLLLLLPAPELGPSQAGAEENDWVRLPSKCEVCKYVAVELKSAFEETGKTKEVIGTGYGILDQKASGVKYTKSDLRLIEVTETICKRLLIIACTRRGPAAIDLPRACQRPLRHYTTWYTKGSRW

SEQ ID NO: 3114 - protein, 36 aa, Homo sapiens
MATLKGLVQKGVKVDLGIPLELWDEPSVEVTYLKKQ

SEQ ID NO: 3115 - protein, 248 aa, Homo sapiens
MGPVRLGILLFLFLAVHEAWAGMLKEEDDDTERLPSKCEVCKLLSTELQAELSRTGRSREVLELGQVLDTGKRKRHVPYSVSETRLEEALENLCERILDYSVHAERKGSLRYAKGQSQTMATLKGLVQKGVKVDLGIPLELWDEPSVEVTYLKKQCETMLEEFEDIVGDWYFHHQEQPLQNFLCEGHVLPAAETACLQETWTGKEITDGEEKTEGEEEQEEEEEEEEEEGGDKMTKTGSHPKLDREDL

SEQ ID NO: 3116 - protein, 118 aa, Homo sapiens
  SITE 1: note = misc_feature - Xaa can be any naturally occurring amino acid
XCKLLSTELQAELSRTGRSREVLELGQVLDTGKRKRHVPYSVSETRLEEALENLCERILDYSVHAERKGSLRYAKGQSQTMATLKGLVQKGVKVDLGIPLELWDEPSVEVTYLKKQSG

SEQ ID NO: 3117 - protein, 372 aa, Homo sapiens
MAAPVPWACCAVLAAAAAVVYAQRHSPQEAPHVQYERLGSDVTLPCGTANWDAAVTWRVNGTDLAPDLLNGSQLVLHGLELGHSGLYACFHRDSWHLRHQVLLHVGLPPREPVLSCRSNTYPKGFYCSWHLPTPTYIPNTFNVTVLHGSKIMVCEKDPALKNRCHIRYMHLFSTIKYKVSISVSNALGHNATAITFDEFTIVKPDPPENVVARPVPSNPRRLEVTWQTPSTWPDPESFPLKFFLRYRPLILDQWQHVELSDGTAHTITDAYAGKEYIIQVAAKDNEIGTWSDWSVAAHATPWTEEPRHLTTEAQAAETTTSTTSSLAPPPTTKICDPGELGSGGGPSAPFLVSVPITLALAAAAATASSLLI

SEQ ID NO: 3118 - protein, 372 aa, Homo sapiens; identical to SEQ ID NO: 3117

SEQ ID NO: 3119 - protein, 256 aa, Homo sapiens
MAAPVPWACCAVLAAAAAVVYAQRHSPQEAPHVQYERLGSDVTLPCGTANWDAAVTWRVNGTDLAPDLLNGSQLVLHGLELGHSGLYACFHRDSWHLRHQVLLHVGLPPREPVLSCRSNTYPKGFYCSWHLPTPTYIPNTFNVTVLHGSKIMVCEKDPALKNRCHIRYMHLFSTIKYKVSISVSNALGHNATAITFDEFTIVKPDPPENVVARPVPSNPRRLEVTWQTPSTWPDPESFPLKFFLRYRPLILDQWQH

SEQ ID NO: 3120 - protein, 372 aa, Homo sapiens; identical to SEQ ID NO: 3117

SEQ ID NO: 3121 - protein, 57 aa, Homo sapiens
KHSIEVPIPRDGEYVVEVRAHSDGGDGVVSQVKISEGKSTSLRSKTAKDHRSIRTMS

SEQ ID NO: 3122 - protein, 63 aa, Homo sapiens
MKMWLLVSHLVIISITTCLAEFTWYRRYGHGVSEEDKGFGPIFEEQPINTIYPEESLEGKVSL

SEQ ID NO: 3123 - protein, 73 aa, Homo sapiens
MKMWLLVSHLVIISITTCLAEFTWYRRYGHGVSEEDKGFGPIFEEQPINTIYPEESLEGKVSLNCRARASPFP

SEQ ID NO: 3124 - protein, 85 aa, Homo sapiens
MKMWLLVSHLVIISITTCLAEFTWYRRYGHGVSEEDKGFGPIFEEQPINTIYPEESLEGKVSLNCRARASPFPVYKWRMNNGDVD

SEQ ID NO: 3125 - protein, 90 aa, Homo sapiens
MKMWLLVSHLVIISITTCLAEFTWYRRYGHGVSEEDKGFGPIFEEQPINTIYPEESLEGKVSLNCRARASPFPVYKWRMNNGDVDLTSDR

SEQ ID NO: 3126 - protein, 1018 aa, Homo sapiens
MKMWLLVSHLVIISITTCLAEFTWYRRYGHGVSEEDKGFGPIFEEQPINTIYPEESLEGKVSLNCRARASPFPVYKWRMNNGDVDLTSDRYSMVGGNLVINNPDKQKDAGIYYCLASNNYGMVRSTEATLSFGYLDPFPPEERPEVRVKEGKGMVLLCDPPYHFPDDLSYRWLLNEFPVFITMDKRRFVSQTNGNLYIANVEASDKGNYSCFVSSPSITKSVFSKFIPLIPIPERTTKPYPADIVVQFKDVYALMGQNVTLECFALGNPVPDIRWRKVLEPMPSTAEISTSGAVLKIFNIQLEDEGIYECEAENIRGKDKHQARIYVQAFPEWVEHINDTEVDIGSDLYWPCVATGKPIPTIRWLKNGYAYHKGELRLYDVTFENAGMYQCIAENTYGAIYANAELKILALAPTFEMNPMKKKILAAKGGRVIIECKPKAAPKPKFSWSKGTEWLVNSSRILIWEDGSLEINNITRNDGGIYTCFAENNRGKANSTGTLVITDPTRIILAPINADITVGENATMQCAASFDPALDLTFVWSFNGYVIDFNKENIHYQRNFMLDSNGELLIRNAQLKHAGRYTCTAQTIVDNSSASADLVVRGPPGPPGGLRIEDIRATSVALTWSRGSDNHSPISKYTIQTKTILSDDWKDAKTDPPIIEGNMEAARAVDLIPWMEYEFRVVATNTLGRGEPSIPSNRIKTDGAAPNVAPSDVGGGGGRNRELTITWAPLSREYHYGNNFGYIVAFKPFDGEEWKKVTVTNPDTGRYVHKDETMSPSTAFQVKVKAFNNKGDGPYSLVAVINSAQDAPSEAPTEVGVKVLSSSEISVHWEHVLEKIVESYQIRYWAAHDKEEAANRVQVTSQEYSARLENLLPDTQYFIEVGACNSAGCGPPSDMIEAFTKKAPPSQPPRIISSVRSGSRYIITWDHVVALSNESTVTGYKVLYRPDGQHDGKLYSTHKHSIEVPIPRDGEYVVEVRAHSDGGDGVVSQVKISGAPTLSPSLLGLLLPAFGILVYLEF

SEQ ID NO: 3127 - protein, 1018 aa, Homo sapiens; identical to SEQ ID NO: 3126

SEQ ID NO: 3128 - protein, 627 aa, Homo sapiens
MKMWLLVSHLVIISITTCLAEFTWYRRYGHGVSEEDKGFGPIFEEQPINTIYPEESLEGKVSLNCRARASPFPVYKWRMNNGDVDLTSDRYSMVGGNLVINNPDKQKDAGIYYCLASNNYGMVRSTEATLSFGYLDPFPPEERPEVRVKEGKGMVLLCDPPYHFPDDLSYRWLLNEFPVFITMDKRRFVSQTNGNLYIANVEASDKGNYSCFVSSPSITKSVFSKFIPLIPIPERTTKPYPADIVVQFKDVYALMGQNVTLECFALGNPVPDIRWRKVLEPMPSTAEISTSGAVLKIFNIQLEDEGIYECEAENIRGKDKHQARIYVQAFPEWVEHINDTEVDIGSDLYWPCVATGKPIPTIRWLKNGYAYHKGELRLYDVTFENAGMYQCIAENTYGAIYANAELKILALAPTFEMNPMKKKILAAKGGRVIIECKPKAAPKPKFSWSKGTEWLVNSSRILIWEDGSLEINNITRNDGGIYTCFAENNRGKANSTGTLVITDPTRIILAPINADITVGENATMQCAASFDPALDLTFVWSFNGYVIDFNKENIHYQRNFMLDSNGELLIRNAQLKHAGRYTCTAQTIVDNSSASADLVVRGKNRKGGEKNMVDSFLPVCASLPPTW

SEQ ID NO: 3129 - protein, 627 aa, Homo sapiens; identical to SEQ ID NO: 3128

SEQ ID NO: 3130 - protein, 1007 aa, Homo sapiens
MKMWLLVSHLVIISITTCLAVSEEDKGFGPIFEEQPINTIYPEESLEGKVSLNCRARASPFPVYKWRMNNGDVDLTSDRYSMVGGNLVINNPDKQKDAGIYYCLASNNYGMVRSTEATLSFGYLDPFPPEERPEVRVKEGKGMVLLCDPPYHFPDDLSYRWLLNEFPVFITMDKRRFVSQTNGNLYIANVEASDKGNYSCFVSSPSITKSVFSKFIPLIPIPERTTKPYPADIVVQFKDVYALMGQNVTLECFALGNPVPDIRWRKVLEPMPSTAEISTSGAVLKIFNIQLEDEGIYECEAENIRGKDKHQARIYVQAFPEWVEHINDTEVDIGSDLYWPCVATGKPIPTIRWLKNGYAYHKGELRLYDVTFENAGMYQCIAENTYGAIYANAELKILALAPTFEMNPMKKKILAAKGGRVIIECKPKAAPKPKFSWSKGTEWLVNSSRILIWEDGSLEINNITRNDGGIYTCFAENNRGKANSTGTLVITDPTRIILAPINADITVGENATMQCAASFDPALDLTFVWSFNGYVIDFNKENIHYQRNFMLDSNGELLIRNAQLKHAGRYTCTAQTIVDNSSASADLVVRGPPGPPGGLRIEDIRATSVALTWSRGSDNHSPISKYTIQTKTILSDDWKDAKTDPPIIEGNMEAARAVDLIPWMEYEFRVVATNTLGRGEPSIPSNRIKTDGAAPNVAPSDVGGGGGRNRELTITWAPLSREYHYGNNFGYIVAFKPFDGEEWKKVTVTNPDTGRYVHKDETMSPSTAFQVKVKAFNNKGDGPYSLVAVINSAQDAPSEAPTEVGVKVLSSSEISVHWEHVLEKIVESYQIRYWAAHDKEEAANRVQVTSQEYSARLENLLPDTQYFIEVGACNSAGCGPPSDMIEAFTKKAPPSQPPRIISSVRSGSRYIITWDHVVALSNESTVTGYKVLYRPDGQHDGKLYSTHKHSIEVPIPRDGEYVVEVRAHSDGGDGVVSQVKISGAPTLSPSLLGLLLPAFGILVYLEF

SEQ ID NO: 3131 - protein, 1040 aa, Homo sapiens
MGTATRRKPHLLLVAAVALVSSSAWSSALGSQTTFGPVFEDQPLSVLFPEESTEEQVLLACRARASPPATYRWKMNGTEMKLEPGSRHQLVGGNLVIMNPTKAQDAGVYQCLASNPVGTVVSREAILRFGFLQEFSKEERDPVKAHEGWGVMLPCNPPAHYPGLSYRWLLNEFPNFIPTDGRHFVSQTTGNLYIARTNASDLGNYSCLATSHMDFSTKSVFSKFAQLNLAAEDTRLFAPSIKARFPAETYALVGQQVTLECFAFGNPVPRIKWRKVDGSLSPQWTTAEPTLQIPSVSFEDEGTYECEAENSKGRDTVQGRIIVQAQPEWLKVISDTEADIGSNLRWGCAAAGKPRPTVRWLRNGEPLASQNRVEVLAGDLRFSKLSLEDSGMYQCVAENKHGTIYASAELAVQALAPDFRLNPVRRLIPAARGGEILIPCQPRAAPKAVVLWSKGTEILVNSSRVTVTPDGTLIIRNISRSDEGKYTCFAENFMGKANSTGILSVRDATKITLAPSSADINLGDNLTLQCHASHDPTMDLTFTWTLDDFPIDFDKPGGHYRRTNVKETIGDLTILNAQLRHGGKYTCMAQTVVDSASKEATVLVRGPPGPPGGVVVRDIGDTTIQLSWSRGFDNHSPIAKYTLQARTPPAGKWKQVRTNPANIEGNAETAQVLGLTPWMDYEFRVIASNILGTGEPSGPSSKIRTREAAPSVAPSGLSGGGGAPGELIVNWTPMSREYQNGDGFGYLLSFRRQGSTHWQTARVPGADAQYFVYSNESVRPYTPFEVKIRSYNRRGDGPESLTALVYSAEEEPRVAPTKVWAKGVSSSEMNVTWEPVQQDMNGILLGYEIRYWKAGDKEAAADRVRTAGLDTSARVSGLHPNTKYHVTVRAYNRAGTGPASPSANATTMKPPPRRPPGNISWTFSSSSLSIKWDPVVPFRNESAVTGYKMLYQNDLHLTPTLHLTGKNWIEIPVPEDIGHALVQIRTTGPGGDGIPAEVHIVRNGGTSMMVENMAVRPAPHPGTVISHSVAMLILIGSLEL

SEQ ID NO: 3132 - protein, 1040 aa, Homo sapiens; identical to SEQ ID NO: 3131

SEQ ID NO: 3133 - protein, 1085 aa, Homo sapiens
MGTATRRKPHLLLVAAVALVSSSAWSSALGSQTTFGPVFEDQPLSVLFPEESTEEQVLLACRARASPPATYRWKMNGTEMKLEPGSRHQLVGGNLVIMNPTKAQDAGVYQCLASNPVGTVVSREAILRFGFLQEFSKEERDPVKAHEGWGVMLPCNPPAHYPGLSYRWLLNEFPNFIPTDGRHFVSQTTGNLYIARTNASDLGNYSCLATSHMDFSTKSVFSKFAQLNLAAEDTRLFAPSIKARFPAETYALVGQQVTLECFAFGNPVPRIKWRKVDGSLSPQWTTAEPTLQIPSVSFEDEGTYECEAENSKGRDTVQGRIIVQAQPEWLKVISDTEADIGSNLRWGCAAAGKPRPTVRWLRNGEPLASQNRVEVLAGDLRFSKLSLEDSGMYQCVAENKHGTIYASAELAVQALAPDFRLNPVRRLIPAARGGEILIPCQPRAAPKAVVLWSKGTEILVNSSRVTVTPDGTLIIRNISRSDEGKYTCFAENFMGKANSTGILSVRDATKITLAPSSADINLGDNLTLQCHASHDPTMDLTFTWTLDDFPIDFDKPGGHYRRTNVKETIGDLTILNAQLRHGGKYTCMAQTVVDSASKEATVLVRGPPGPPGGVVVRDIGDTTIQLSWSRGFDNHSPIAKYTLQARTPPAGKWKQVRTNPANIEGNAETAQVLGLTPWMDYEFRVIASNILGTGEPSGPSSKIRTREAAPSVAPSGLSGGGGAPGELIVNWTPMSREYQNGDGFGYLLSFRRQGSTHWQTARVPGADAQYFVYSNESVRPYTPFEVKIRSYNRRGDGPESLTALVYSAEEEPRVAPTKVWAKGVSSSEMNVTWEPVQQDMNGILLGYEIRYWKAGDKEAAADRVRTAGLDTSARVSGLHPNTKYHVTVRAYNRAGTGPASPSANATTMKPPPRRPPGNISWTFSSSSLSIKWDPVVPFRNESAVTGYKMLYQNDLHLTPTLHLTGKNWIEIPVPEDIGHALVQIRTTGPGGDGIPAEVHIVRNGEMALWDPIRTPPLESSPRPGRNTRHEQVEELERSAHLTILQSKEEGQALGPRALPPSPSSSSKDPDAVPDNSLGAPACPSG

SEQ ID NO: 3134 - protein, 1040 aa, Homo sapiens; identical to SEQ ID NO: 3131

SEQ ID NO: 3135 - protein, 1040 aa, Homo sapiens; identical to SEQ ID NO: 3131

SEQ ID NO: 3136 - protein, 764 aa, Homo sapiens
MGTATRRKPHLLLVAAVALVSSSAWSSALGSQTTFGPVFEDQPLSVLFPEESTEEQVLLACRARASPPATYRWKMNGTEMKLEPGSRHQLVGGNLVIMNPTKAQDAGVYQCLASNPVGTVVSREAILRFGFLQEFSKEERDPVKAHEGWGVMLPCNPPAHYPGLSYRWLLNEFPNFIPTDGRHFVSQTTGNLYIARTNASDLGNYSCLATSHMDFSTKSVFSKFAQLNLAAEDTRLFAPSIKARFPAETYALVGQQVTLECFAFGNPVPRIKWRKVDGSLSPQWTTAEPTLQIPSVSFEDEGTYECEAENSKGRDTVQGRIIVQAQPEWLKVISDTEADIGSNLRWGCAAAGKPRPTVRWLRNGEPLASQNRVEVLAGDLRFSKLSLEDSGMYQCVAENKHGTIYASAELAVQALAPDFRLNPVRRLIPAARGGEILIPCQPRAAPKAVVLWSKGTEILVNSSRVTVTPDGTLIIRNISRSDEGKYTCFAENFMGKANSTGILSVRDATKITLAPSSADINLGDNLTLQCHASHDPTMDLTFTWTLDDFPIDFDKPGGHYRRTNVKETIGDLTILNAQLRHGGKYTCMAQTVVDSASKEATVLVRGPPGPPGGVVVRDIGDTTIQLSWSRGFDNHSPIAKYTLQARTPPAGKWKQVRTNPANIEGNAETAQVLGLTPWMDYEFRVIASNILGTGEPSGPSSKIRTREAAPSVAPSGLSGGGGAPGELIVNWTAGQHSLADRPGAWRRCPVLCLQQRERPALHAL

SEQ ID NO: 3137 - protein, 41 aa, Homo sapiens
MGTATRRKPHLLLVAAVALVSSSGEDTEAQKSSITFPRSHS

SEQ ID NO: 3138 - protein, 41 aa, Homo sapiens; identical to SEQ ID NO: 3137

SEQ ID NO: 3139 - protein, 527 aa, Homo sapiens
  SITE 1: note = misc_feature - Xaa can be any naturally occurring amino acid
XAQTVVDSASKEATVLVRGPPGPPGGVVVRDIGDTTIQLSWSRGFDNHSPIAKYTLQARTPPAGKWKQVRTNPANIEGNAETAQVLGLTPWMDYEFRVIASNILGTGEPSGPSSKIRTREAAPSVAPSGLSGGGGAPGELIVNWTPMSREYQNGDGFGYLLSFRRQGSTHWQTARVPGADAQYFVYSNESVRPYTPFEVKIRSYNRRGDGPESLTALVYSAEEEPRVAPTKVWAKGVSSSEMNVTWEPVQQDMNGILLGYEIRYWKAGDKEAAADRVRTAGLDTSARVSGLHPNTKYHVTVRAYNRAGTGPASPSANATTMKPPPRRPPGNISWTFSSSSLSIKWDPVVPFRNESAVTGYKMLYQNDLHLTPTLHLTGKNWIEIPVPEDIGHALVQIRTTGPGGDGIPAEVHIVRNGGAAPPLPLSPREIQDPPRYLRGSFPPRPTPISTRKGKWKAGRNQVQSSLRTASPPPFYPAPRTSPRAREGRRVQGEAEDQPAIANGLQSTVGVGLRRPPSRPLPGLQLAL

SEQ ID NO: 3140 - protein, 115 aa, Homo sapiens
  SITE 1: note = misc_feature - Xaa can be any naturally occurring amino acid
XGKANSTGILSVRDATKITLAPSSADINLGDNLTLQCHASHDPTMDLTFTWTLDDFPIDFDKPGGHYRRTNVKETIGDLTILNAQLRHGGKYTCMAQTVVDSASKEATVLVRGPK

SEQ ID NO: 3141 - protein, 473 aa, Homo sapiens
  SITE 1: note = misc_feature - Xaa can be any naturally occurring amino acid
XIKWRKVDGSLSPQWTTAEPTLQIPSVSFEDEGTYECEAENSKGRDTVQGRIIVQAQPEWLKVISDTEADIGSNLRWGCAAAGKPRPTVRWLRNGEPLASQNRVEVLAGDLRFSKLSLEDSGMYQCVAENKHGTIYASAELAVQALAPDFRLNPVRRLIPAARGGEILIPCQPRAAPKAVVLWSKGTEILVNSSRVTVTPDGTLIIRNISRSDEGKYTCFAENFMGKANSTGILSVRDATKITLAPSSADINLGDNLTLQCHASHDPTMDLTFTWTLDDFPIDFDKPGGHYRRTNVKETIGDLTILNAQLRHGGKYTCMAQTVVDSASKEATVLVRGPPGPPGGVVVRDIGDTTIQLSWSRGFDNHSPIAKYTLQARTPPAGKWKQVRTNPANIEGNAETAQVLGLTPWMDYEFRVIASNILGTGEPSGPSSKIRTREAAPSVAPSGLSGGGGAPGELIVNWTQRERPALHAL

SEQ ID NO: 3142 - protein, 1011 aa, Homo sapiens
  SITE 1: note = misc_feature - Xaa can be any naturally occurring amino acid
XPTDGRHFVSQTTGNLYIARTNASDLGNYSCLATSHMDFSTKSVFSKFAQLNLAAEDTRLFAPSIKARFPAETYALVGQQVTLECFAFGNPVPRIKWRKVDGSLSPQWTTAEPTLQIPSVSFEDEGTYECEAENSKGRDTVQGRIIVQAQPEWLKVISDTEADIGSNLRWGCAAAGKPRPTVRWLRNGEPLASQNRVEVLAGDLRFSKLSLEDSGMYQCVAENKHGTIYASAELAVQALAPDFRLNPVRRLIPAARGGEILIPCQPRAAPKAVVLWSKGTEILVNSSRVTVTPDGTLIIRNISRSDEGKYTCFAENFMGKANSTGILSVRDATKITLAPSSADINLGDNLTLQCHASHDPTMDLTFTWTLDDFPIDFDKPGGHYRRTNVKETIGDLTILNAQLRHGGKYTCMAQTVVDSASKEATVLVRGPPGPPGGVVVRDIGDTTIQLSWSRGFDNHSPIAKYTLQARTPPAGKWKQVRTNPANIEGNAETAQVLGLTPWMDYEFRVIASNILGTGEPSGPSSKIRTREAAPSVAPSGLSGGGGAPGELIVNWTPMSREYQNGDGFGYLLSFRRQGSTHWQTARVPGADAQYFVYSNESVRPYTPFEVKIRSYNRRGDGPESLTALVYSAEEEPRVAPTKVWAKGVSSSEMNVTWEPVQQDMNGILLGYEIRYWKAGDKEAAADRVRTAGLDTSARVSGLHPNTKYHVTVRAYNRAGTGPASPSANATTMKPPPRRPPGNISWTFSSSSLSIKWDPVVPFRNESAVTGYKMLYQNDLHLTPTLHLTGKNWIEIPVPEDIGHALVQIRTTGPGGDGIPAEVHIVRNGGAAPPLPLSPREIQDPPRYLRGSFPPRPTPISTRKGKWKAGRNQVQSSLRTASPPPFYPAPRTSPRAREGRRVQGEAEDQPAIANGLQSTVGVGLRRPPSRPLPGLQLALHKHDGGEHGSPPSTTPWHRHFPLRGDADPHRLPGALILEPLPLRRSWTPPPTDTASPFLLPRWPDTVPESGWF

SEQ ID NO: 3143 - protein, 1028 aa, Homo sapiens
MMFPWKQLILLSFIGCLGGELLLQGPVFIKEPSNSIFPVGSEDKKITLHCEARGNPSPHYRWQLNGSDIDMSMEHRYKLNGGNLVVINPNRNWDTGTYQCFATNSLGTIVSREAKLQFAYLENFKTKMRSTVSVREGQGVVLLCGPPPHSGELSYAWIFNEYPSFVEEDSRRFVSQETGHLYISKVEPSDVGNYTCVVTSMVTNARVLGSPTPLVLRSDGVMGEYEPKIEVQFPETLPAAKGSTVKLECFALGNPIPQINWRRSDGLPFSSKIKLRKFSGVLEIPNFQQEDAGSYECIAENSRGKNVARGRLTYYAKPHWVQLIKDVEIAVEDSLYWECRASGKPKPSYRWLKNGAALVLEERTQIENGALTISNLSVTDSGMFQCIAENKHGLVYSSAELKVVASAPDFSKNPMKKLVQVQVGSLVSLDCKPRASPRALSSWKKGDVSVQEHERISLLNDGGLKIANVTKADAGTYTCMAENQFGKANGTTHLVVTEPTRITLAPSNMDVSVGESVILPCQVQHDPLLDIIFTWYFNGALADFKKDGSHFEKVGGSSSGDLMIRNIQLKHSGKYVCMVQTGVDSVSSAADLIVRGSPGPPENVKVDEITDTTAQLSWKEGKDNHSPVISYSIQARTPFSVGWQTVTTVPEVIDGKTHTATVVELNPWVEYEFRVVASNKIGGGEPSLPSEKVRTEEAVPEVPPSEVNGGGGSRSELVITWDPVPEELQNGEGFGYVVAFRPLGVTTWIQTVVTSPDTPRYVFRNESIVPYSPYEVKVGVYNNKGEGPFSPVTTVFSAEEEPTVAPSQVSANSLSSSEIEVSWNTIPWKLSNGHLLGYEVRYWNGGGKEESSSKMKVAGNETSARLRGLKSNLAYYTAVRAYNSAGAGPFSATVNVTTKKTPPSQPPGNVVWNATDTKVLLNWEQVKAMENESEVTGYKVFYRTSSQNNVQVLNTNKTSAELVLPIKEDYIIEVKATTDGGDGTSSEQIRIPRITSMDARGSTSAISNVHPMSSYMPIVLFLIVYVLW

SEQ ID NO: 3144 - protein, 698 aa, Homo sapiens
MEENVFWECKANGRPKPTYKWLKNGEPLLTRDRIQIEQGTLNITIVNLSDAGMYQCLAENKHGVIFSNAELSVIAVGPDFSRTLLKRVTLVKVGGEVVIECKPKASPKPVYTWKKGRDILKENERITISEDGNLRIINVTKSDAGSYTCIATNHFGTASSTGNLVVKDPTRVMVPPSSMDVTVGESIVLPCQVTHDHSLDIVFTWSFNGHLIDFDRDGDHFERVGGQDSAGDLMIRNIQLKHAGKYVCMVQTSVDRLSAAADLIVRGPPGPPEAVTIDEITDTTAQLSWRPGPDNHSPITMYVIQARTPFSVGWQAVSTVPELIDGKTFTATVVGLNPWVEYEFRTVAANVIGIGEPSRPSEKRRTEEALPEVTPANVSGGGGSKSELVITWETVPEELQNGRGFGYVVAFRPYGKMIWMLTVLASADASRYVFRNESVHPFSPFEVKVGVFNNKGEGPFSPTTVVYSAEEEPTKPPASIFARSLSATDIEVFWASPLEKNRGRIQGYEVKYWRHEDKEENARKIRTVGNQTSTKITNLKGSVLYHLAVKAYNSAGTGPSSATVNVTTRKPPPSQPPGNIIWNSSDSKIILNWDQVKALDNESEVKGYKVLYRWNRQSSTSVIETNKTSVELSLPFDEDYIIEIKPFSDGGDGSSSEQIRIPKISNAYARGSGASTSNACTLSAISTIMISLTARSSL

SEQ ID NO: 3145 - protein, 54 aa, Homo sapiens
MRLPWELLVLQSFILCLADDSTLHGPIFIQEPSPVMFPLDSEEKKVKLNCEVKG

SEQ ID NO: 3146 - protein, 116 aa, Homo sapiens
MRLPWELLVLQSFILCLADDSTLHGPIFIQEPSPVMFPLDSEEKKVKLNCEVKGNPKPHIRWKLNGTDVDTGMDFRYSVVEGSLLINNPNKTQDAGTYQCTATNSFGTIVSREAKL

SEQ ID NO: 3147 - protein, 1026 aa, Homo sapiens
MRLPWELLVLQSFILCLADDSTLHGPIFIQEPSPVMFPLDSEEKKVKLNCEVKGNPKPHIRWKLNGTDVDTGMDFRYSVVEGSLLINNPNKTQDAGTYQCTATNSFGTIVSREAKLQFAYLDNFKTRTRSTVSVRRGQGMVLLCGPPPHSGELSYAWIFNEYPSYQDNRRFVSQETGNLYIAKVEKSDVGNYTCVVTNTVTNHKVLGPPTPLILRNDGVMGEYEPKIEVQFPETVPTAKGATVKLECFALGNPVPTIIWRRADGKPIARKARRHKSNGILEIPNFQQEDAGLYECVAENSRGKNVARGQLTFYAQPNWIQKINDIHVAMEENVFWECKANGRPKPTYKWLKNGEPLLTRDRIQIEQGTLNITIVNLSDAGMYQCLAENKHGVIFSNAELSVIAVGPDFSRTLLKRVTLVKVGGEVVIECKPKASPKPVYTWKKGRDILKENERITISEDGNLRIINVTKSDAGSYTCIATNHFGTASSTGNLVVKDPTRVMVPPSSMDVTVGESIVLPCQVTHDHSLDIVFTWSFNGHLIDFDRDGDHFERVGGQDSAGDLMIRNIQLKHAGKYVCMVQTSVDRLSAAADLIVRGPPGPPEAVTIDEITDTTAQLSWRPGPDNHSPITMYVIQARTPFSVGWQAVSTVPELIDGKTFTATVVGLNPWVEYEFRTVAANVIGIGEPSRPSEKRRTEEALPEVTPANVSGGGGSKSELVITWETVPEELQNGRGFGYVVAFRPYGKMIWMLTVLASADASRYVFRNESVHPFSPFEVKVGVFNNKGEGPFSPTTVVYSAEEEPTKPPASIFARSLSATDIEVFWASPLEKNRGRIQGYEVKYWRHEDKEENARKIRTVGNQTSTKITNLKGSVLYHLAVKAYNSAGTGPSSATVNVTTRKPPPSQPPGNIIWNSSDSKIILNWDQVKALDNESEVKGYKVLYRWNRQSSTSVIETNKTSVELSLPFDEDYIIEIKPFSDGGDGSSSEQIRIPKISNAYARGSGASTSNACTLSAISTIMISLTARSSL

SEQ ID NO: 3148 - protein, 1026 aa, Homo sapiens; identical to SEQ ID NO: 3147

SEQ ID NO: 3149 - protein, 1026 aa, Homo sapiens; identical to SEQ ID NO: 3147

SEQ ID NO: 3150 - protein, 232 aa, Homo sapiens
MRLPWELLVLQSFILCLADDSTLHGPIFIQEPSPVMFPLDSEEKKVKLNCEVKGNPKPHIRWKLNGTDVDTGMDFRYSVVEGSLLINNPNKTQDAGTYQCTATNSFGTIVSREAKLQFAYLDNFKTRTRSTVSVRRGQGMVLLCGPPPHSGELSYAWIFNEYPSYQDNRRFVSQETGNLYIAKVEKSDVGNYTCVVTNTVTNHKVLGPPTPLILRNDVQYQLLSGEELMESQ

SEQ ID NO: 3151 - protein, 137 aa, Homo sapiens
MRLPWELLVLQSFILCLAGSQTDFWSLLGVLPALEADDSTLHGPIFIQEPSPVMFPLDSEEKKVKLNCEVKGNPKPHIRWKLNGTDVDTGMDFRYSVVEGSLLINNPNKTQDAGTYQCTATNSFGTIVSREAKLQFA

SEQ ID NO: 3152 - protein, 143 aa, Homo sapiens
NDIHVAMEENVFWECKANGRPKPTYKWLKNGEPLLTRDRIQIEQGTLNITIVNLSDAGMYQCLAENKHGVIFSNAELSVIAVGPDFSRTLLKRVTLVKVGGEVVIECKPKASPKPVYTWKKGRDILKENESVHQGFGSGSAPL

SEQ ID NO: 3153 - protein, 1022 aa, Homo sapiens [sequence omitted]

SEQ ID NO: 3154 - protein, 1084 aa, Homo sapiens
LTEYSKSLPGLSTSYAALLRIKKSSSSSLFGSKTRPRYSSPSLGTLSASSPSWLGAAQNYYSPINLYHSSDAFKQDESVDYGPVFVQEPDDIIFPTDSDEKKVALNCEVRGNPVPSYRWLRNGTEIDLESDYRYSLIDGTFIISNPSEAKDSGHYQCLATNTVGSILSREATLQFAYLGNFSGRTRSAVSVREGQGVVLMCSPPPHSPEIIYSWVFNEFPSFVAEDSRRFISQETGNLYISKVQTSDVGSYICLVKNTVTNARVLSPPTPLTLRNDGVMGEYEPKIEVHFPFTVTAAKGTTVKMECFALGNPVPTITWMKVNGYIPSKARLRKSQAVLEIPNVQLDDAGIYECRAENSRGKNSFRGQLQVYTYPHWVEKLNDTQLDSGSPLRWECKATGKPRPTYRWLKNGVPLSPQSRVEMVNGVLMIHNVNQSDAGMYQCLAENKYGAIYASAELKILASAPTFALNQLKKTIIVTKDQEVVIECKPQGSPKPTISWKKGDRAVRENKRIAILPDGSLRILNASKSDEGKYVCRGENVFGSAEIIASLSVKEPTRIELTPKRTELTVGESIVLNCKAIHDASLDVTFYWTLKGQPIDFEEEGGHFESIRAQASSADLMIRNILLMHAGRYGCRVQTTADSVSDEAELLVRGPPGPPGIVIVEEITESTATLSWSPAADNHSPISSYNLQARSPFSLGWQTVKTVPEIITGDMESAMAVDLNPWVEYEFRVVATNPIGTGDPSTPSRMIRTNEAVPKTAPTNVSGRSGRRHELVIAWEPVSEEFQNGEGFGYIVAFRPNGTRGWKEKMVTSSEASKFIYRDESVPPLTPFEVKVGVYNNKGDGPFSQIVVICSAEGEPSAAPTDVKATSVSVSEILVAWKHIKESLGRPQGFEVGYWKDMEQEDTAETVKTRGNESFVILTGLEGNTLYHFTVRAYNGAGYGPPSSEVSATTKKSPPSQAPSNLRWEQQGSQVSLGWEPVIPLANESEVVGYKVFYRQEGHSNSQVIETQKLQAVVPLPDAGVYIIEVRAYSEGGDGTASSQIRVPSYSGGKITSAQSTLHSLSTSSSSVTLLLALMIPSTSW

SEQ ID NO: 3155 - protein, 1026 aa, Homo sapiens
MASSWKLMLFLSVTMCLSESVDYGPVFVQEPDDIIFPTDSDEKKVALNCEVRGNPVPSYRWLRNGTEIDLESDYRYSLIDGTFIISNPSEAKDSGHYQCLATNTVGSILSREATLQFAYLGNFSGRTRSAVSVREGQGVVLMCSPPPHSPEIIYSWVFNEFPSFVAEDSRRFISQETGNLYISKVQTSDVGSYICLVKNTVTNARVLSPPTPLTLRNDGVMGEYEPKIEVHFPFTVTAAKGTTVKMECFALGNPVPTITWMKVNGYIPSKARLRKSQAVLEIPNVQLDDAGIYECRAENSRGKNSFRGQLQVYTYPHWVEKLNDTQLDSGSPLRWECKATGKPRPTYRWLKNGVPLSPQSRVEMVNGVLMIHNVNQSDAGMYQCLAENKYGAIYASAELKILASAPTFALNQLKKTIIVTKDQEVVIECKPQGSPKPTISWKKGDRAVRENKRIAILPDGSLRILNASKSDEGKYVCRGENVFGSAEIIASLSVKEPTRIELTPKRTELTVGESIVLNCKAIHDASLDVTFYWTLKGQPIDFEEEGGHFESIRAQASSADLMIRNILLMHAGRYGCRVQTTADSVSDEAELLVRGPPGPPGIVIVEEITESTATLSWSPAADNHSPISSYNLQARSPFSLGWQTVKTVPEIITGDMESAMAVDLNPWVEYEFRVVATNPIGTGDPSTPSRMIRTNEAVPKTAPTNVSGRSGRRHELVIAWEPVSEEFQNGEGFGYIVAFRPNGTRGWKEKMVTSSEASKFIYRDESVPPLTPFEVKVGVYNNKGDGPFSQIVVICSAEGEPSAAPTDVKATSVSVSEILVAWKHIKESLGRPQGFEVGYWKDMEQEDTAETVKTRGNESFVILTGLEGNTLYHFTVRAYNGAGYGPPSSEVSATTKKSPPSQAPSNLRWEQQGSQVSLGWEPVIPLANESEVVGYKVFYRQEGHSNSQVIETQKLQAVVPLPDAGVYIIEVRAYSEGGDGTASSQIRVPSYSGGKITSAQSTLHSLSTSSSSVTLLLALMIPSTSW

SEQ ID NO: 3156 - protein, 1100 aa, Homo sapiens
MASSWKLMLFLSVTMCLSEYSKSLPGLSTSYAALLRIKKSSSSSLFGSKTRPRYSSPSLGTLSASSPSWLGAAQNYYSPINLYHSSDAFKQDESVDYGPVFVQEPDDIIFPTDSDEKKVALNCEVRGNPVPSYRWLRNGTEIDLESDYRYSLIDGTFIISNPSEAKDSGHYQCLATNTVGSILSREATLQFAYLGNFSGRTRSAVSVREGQGVVLMCSPPPHSPEIIYSWVFNEFPSFVAEDSRRFISQETGNLYISKVQTSDVGSYICLVKNTVTNARVLSPPTPLTLRNDGVMGEYEPKIEVHFPFTVTAAKGTTVKMECFALGNPVPTITWMKVNGYIPSKARLRKSQAVLEIPNVQLDDAGIYECRAENSRGKNSFRGQLQVYTYPHWVEKLNDTQLDSGSPLRWECKATGKPRPTYRWLKNGVPLSPQSRVEMVNGVLMIHNVNQSDAGMYQCLAENKYGAIYASAELKILASAPTFALNQLKKTIIVTKDQEVVIECKPQGSPKPTISWKKGDRAVRENKRIAILPDGSLRILNASKSDEGKYVCRGENVFGSAEIIASLSVKEPTRIELTPKRTELTVGESIVLNCKAIHDASLDVTFYWTLKGQPIDFEEEGGHFESIRAQASSADLMIRNILLMHAGRYGCRVQTTADSVSDEAELLVRGPPGPPGIVIVEEITESTATLSWSPAADNHSPISSYNLQARSPFSLGWQTVKTVPEIITGDMESAMAVDLNPWVEYEFRVVATNPIGTGDPSTPSRMIRTNEAVPKTAPTNVSGRSGRRHELVIAWEPVSEEFQNGEGFGYIVAFRPNGTRGWKEKMVTSSEASKFIYRDESVPPLTPFEVKVGVYNNKGDGPFSQIVVICSAEGEPSAAPTDVKATSVSVSEILVAWKHIKESLGRPQGFEVGYWKDMEQEDTAETVKTRGNESFVILTGLEGNTLYHFTVRAYNGAGYGPPSSEVSATTKKSPPSQAPSNLRWEQQGSQVSLGWEPVIPLANESEVVGYKVFYRQEGHSNSQVIETQKLQAVVPLPDAGVYIIEVRAYSEGGDGTASSQIRVPSYSGGKITSAQSTLHSLSTSSSSVTLLLALMIPSTSW

SEQ ID NO: 3157 - protein, 1100 aa, Homo sapiens; identical to SEQ ID NO: 3156

SEQ ID NO: 3158 - protein, 911 aa, Homo sapiens
MASSWKLMLFLSVTMCLSEYSKSLPGLSTSYAALLRIKKSSSSSLFGSKTRPRYSSPSLGTLSASSPSWLGAAQNYYSPINLYHSSDAFKQDESVDYGPVFVQEPDDIIFPTDSDEKKVALNCEVRGNPVPSYRWLRNGTEIDLESDYRYSLIDGTFIISNPSEAKDSGHYQCLATNTVGSILSREATLQFAYLGNFSGRTRSAVSVREGQGVVLMCSPPPHSPEIIYSWVFNEFPSFVAEDSRRFISQETGNLYISKVQTSDVGSYICLVKNTVTNARVLSPPTPLTLRNDGVMGEYEPKIEVHFPFTVTAAKGTTVKMECFALGNPVPTITWMKVNGYIPSKARLRKSQAVLEIPNVQLDDAGIYECRAENSRGKNSFRGQLQVYTYPHWVEKLNDTQLDSGSPLRWECKATGKPRPTYRWLKNGVPLSPQSRVEMVNGVLMIHNVNQSDAGMYQCLAENKYGAIYASAELKILASAPTFALNQLKKTIIVTKDQEVVIECKPQGSPKPTISWKKGDRAVRENKRIAILPDGSLRILNASKSDEGKYVCRGENVFGSAEIIASLSVKEPTRIELTPKRTELTVGESIVLNCKAIHDASLDVTFYWTLKGQPIDFEEEGGHFESIRAQASSADLMIRNILLMHAGRYGCRVQTTADSVSDEAELLVRGPPGPPGIVIVEEITESTATLSWSPAADNHSPISSYNLQARSPFSLGWQTVKTVPEIITGDMESAMAVDLNPWVEYEFRVVATNPIGTGDPSTPSRMIRTNEAVPKTAPTNVSGRSGRRHELVIAWEPVSEEFQNGEGFGYIVAFRPNGTRGWKEKMVTSSEASKFIYRDESVPPLTPFEVKVGVYNNKGDGPFSQIVVICSAEGEPSAAPTDVKATSVSVSEILVAWKHIKESLGRPQGFEV

SEQ ID NO: 3159 - protein, 390 aa, Homo sapiens
MNGVTLDLEERAKVTSGFISGCSGHCTSYGTNCENGGKCLERYHGYSCDCSNTAYDGTFCNKDVGAFFEEGMWLRYNFQAPATNARDSSSRVDNAPDQQNSHPDLAQEEIRFSFSTTKAPCILLYISSFTTDFLAVLVKPTGSLQIRYNLGGTREPYNIDVDHRNMANGQPHSVNITRHEKTIFLKLDHYPSVSYHLPSSSDTLFNSPKSLFLGKVIETGKIDQEIHKYNTPGFTGCLSRVQFNQIAPLKAALRQTNASAHVHIQGELVESNCGASPLTLSPMSSATDPWHLDHLDSASADFPYNPGQGQAIRNGVNRNSAIIGGVIAVVIFTILCTLVFLIRYMFRHKGTYHTNEAKGAESAESADAAIMNNDPNFTETIDESKKEWLI

SEQ ID NO: 3160 - protein, 120 aa, Homo sapiens
MQAAPRAGCGAALLLWIVSSCLCRAWTAPSTSQKCDEPLVSGLPHVAFSSSSSISGSYSPGYAKINKRGGAGGWSPSDSDHYQWLQVDFGNRKQISAIATQGRYSSSDWVTQYRMLYSDT

SEQ ID NO: 3161 - protein, 1331 aa, Homo sapiens
MQAAPRAGCGAALLLWIVSSCLCRAWTAPSTSQKCDEPLVSGLPHVAFSSSSSISGSYSPGYAKINKRGGAGGWSPSDSDHYQWLQVDFGNRKQISAIATQGRYSSSDWVTQYRMLYSDTGRNWKPYHQDGNIWAFPGNINSDGVVRHELQHPIIARYVRIVPLDWNGEGRIGLRIEVYGCSYWADVINFDGHVVLPYRFRNKKMKTLKDVIALNFKTSESEGVILHGEGQQGDYITLELKKAKLVLSLNLGSNQLGPIYGHTSVMTGSLLDDHHWHSVVIERQGRSINLTLDRSMQHFRTNGEFDYLDLDYEITFGGIPFSGKPSSSSRKNFKGCMESINYNGVNITDLARRKKLEPSNVGNLSFSCVEPYTVPVFFNATSYLEVPGRLNQDLFSVSFQFRTWNPNGLLVFSHFADNLGNVEIDLTESKVGVHINITQTKMSQIDISSGSGLNDGQWHEVRFLAKENFAILTIDGDEASAVRTNSPLQVKTGEKYFFGGFLNQMNNSSHSVLQPSFQGCMQLIQVDDQLVNLYEVAQRKPGSFANVSIDMCAIIDRCVPNHCEHGGKCSQTWDSFKCTCDETGYSGATCHNSIYEPSCEAYKHLGQTSNYYWIDPDGSGPLGPLKVYCNMTEDKVWTIVSHDLQMQTPVVGYNPEKYSVTQLVYSASMDQISAITDSAEYCEQYVSYFCKMSRLLNTPDGSPYTWWVGKANEKHYYWGGSGPGIQKCACGIERNCTDPKYYCNCDADYKQWRKDAGFLSYKDHLPVSQVVVGDTDRQGSEAKLSVGPLRCQGDRNYWNAASFPNPSSYLHFSTFQGETSADISFYFKTLTPWGVFLENMGKEDFIKLELKSATEVSFSFDVGNGPVEIVVRSPTPLNDDQWHRVTAERNVKQASLQVDRLPQQIRKAPTEGHTRLELYSQLFVGGAGGQQGFLGCIRSLRMNGVTLDLEERAKVTSGFISGCSGHCTSYGTNCENGGKCLERYHGYSCDCSNTAYDGTFCNKDVGAFFEEGMWLRYNFQAPATNARDSSSRVDNAPDQQNSHPDLAQEEIRFSFSTTKAPCILLYISSFTTDFLAVLVKPTGSLQIRYNLGGTREPYNIDVDHRNMANGQPHSVNITRHEKTIFLKLDHYPSVSYHLPSSSDTLFNSPKSLFLGKVIETGKIDQEIHKYNTPGFTGCLSRVQFNQIAPLKAALRQTNASAHVHIQGELVESNCGASPLTLSPMSSATDPWHLDHLDSASADFPYNPGQGQAIRNGVNRNSAIIGGVIAVVIFTILCTLVFLIRYMFRHKGTYHTNEAKGAESAESADAAIMNNDPNFTETIDESKKEWLI

SEQ ID NO: 3162 - protein, 108 aa, Homo sapiens
MSSATDPWHLDHLDSASADFPYNPGQGQAIRNGVNRNSAIIGGVIAVVIFTILCTLVFLIRYMFRHKGTYHTNEAKGAESAESADAAIMNNDPNFTETIDESKKEWLI

SEQ ID NO: 3163 - protein, 1288 aa, Homo sapiens
MASVAWAVLKVLLLLPTQTWSPVGAGNPPDCDAPLASALPRSSFSSSSELSSSHGPGFSRLNRRDGAGGWTPLVSNKYQWLQIDLGERMEVTAVATQGGYGSSDWVTSYLLMFSDGGRNWKQYRREESIWGFPGNTNADSVVHYRLQPPFEARFLRFLPLAWNPRGRIGMRIEVYGCAYKSEVVYFDGQSALLYRLDKKPLKPIRDVISLKFKAMQSNGILLHREGQHGNHITLELIKGKLVFFLNSGNAKLPSTIAPVTLTLGSLLDDQHWHSVLIELLDTQVNFTVDKHTHHFQAKGDSSYLDLNFEISFGGIPTPGRSRAFRRKSFHGCLENLYYNGVDVTELAKKHKPQILMMGNVSFSCPQPQTVPVTFLSSRSYLALPGNSGEDKVSVTFQFRTWNRAGHLLFGELRRGSGSFVLFLKDGKLKLSLFQPGQSPRNVTAGAGLNDGQWHSVSFSAKWSHMNVVVDDDTAVQPLVAVLIDSGDTYYFGGCLDNSSGSGCKSPLGGFQGCLRLITIGDKAVDPILVQQGALGSFRDLQIDSCGITDRCLPSYCEHGGECSQSWDTFSCDCLGTGYTGETCHSSLYEQSCEAHKHRGNPSGLYYIDADGSGPLGPFLVYCNMTADAAWTVVQHGGPDAVTLRGAPSGHPRSAVSFAYAAGAGQLRSAVNLAERCEQRLALRCGTARRPDSRDGTPLSWWVGRTNETHTSWGGSLPDAQKCTCGLEGNCIDSQYYCNCDAGRNEWTSDTIVLSQKEHLPVTQIVMTDAGRPHSEAAYTLGPLLCRGDQSFWNSASFNTETSYLHFPAFHGELTADVCFFFKTTVSSGVFMENLGITDFIRIELRAPTEVTFSFDVGNGPCEVTVQSPTPFNDNQWHHVRAERNVKGASLQVDQLPQKMQPAPADGHVRLQLNSQLFIGGTATRQRGFLGCIRSLQLNGVALDLEERATVTPGVEPGCAGHCSTYGHLCRNGGRCREKRRGVTCDCAFSAYDGPFCSNEISAYFATGSSMTYHFQEHYTLSENSSSLVSSLHRDVTLTREMITLSFRTTRTPSLLLYVSSFYEEYLSVILANNGSLQIRYKLDRHQNPDAFTFDFKNMADGQLHQVKINREEAVVMVEVNQSTKKQVILSSGTEFNAVKSLILGKVLEAAGADPDTRRAATSGFTGCLSAVRFGRAAPLKAALRPSGPSRVTVRGHVAPMARCAAGAASGSPARELAPRLAGGAGRSGPADEGEPLVNADRRDSAVIGGVIAVVIFILLCITAIAIRIYQQRKLRKENESKVSKKEEC

SEQ ID NO: 3164 - protein, 1207 aa, Homo sapiens
MASVAWAVLKVLLLLPTQTWSPVGAGNPPDCDAPLASALPRSSFSSSSELSSSHGPGFSRLNRRDGAGGWTPLVSNKYQWLQIDLGERMEVTAVATQGGYGSSDWVTSYLLMFSDGGRNWKQYRREESIWGFPGNTNADSVVHYRLQPPFEARFLRFLPLAWNPRGRIGMRIEVYGCAYKSEVVYFDGQSALLYRLDKKPLKPIRDVISLKFKAMQSNGILLHREGQHGNHITLELIKGKLVFFLNSGNAKLPSTIAPVTLTLGSLLDDQHWHSVLIELLDTQVNFTVDKHTHHFQAKGDSSYLDLNFEISFGGIPTPGRSRAFRRKSFHGCLENLYYNGVDVTELAKKHKPQILMMGNVSFSCPQPQTVPVTFLSSRSYLALPGNSGEDKVSVTFQFRTWNRAGHLLFGELRRGSGSFVLFLKDGKLKLSLFQPGQSPRNVTAGAGLNDGQWHSVSFSAKWSHMNVVVDDDTAVQPLVAVLIDSGDTYYFGGCLDNSSGSGCKSPLGGFQGCLRLITIGDKAVDPILVQQGALGSFRDLQIDSCGITDRCLPSYCEHGGECSQSWDTFSCDCLGTGYTGETCHSSLYEQSCEAHKHRGNPSGLYYIDADGSGPLGPFLVYCNMTDAAWTVVQHGGPDAVTLRGAPSGHPRSAVSFAYAAGAGQLRSAVNLAERCEQRLALRCGTARRPDSRDGTPLSWWVGRTNETHTSWGGSLPDAQKCTCGLEGNCIDSQYYCNCDAGRNEWTSDTIVLSQKEHLPVTQIVMTDAGRPHSEAAYTLGPLLCRGDQSFWNSASFNTETSYLHFPAFHGELTADVCFFFKTTVSSGVFMENLGITDFIRIELRAPTEVTFSFDVGNGPCEVTVQSPTPFNDNQWHHVRAERNVKGASLQVDQLPQKMQPAPADGHVRLQLNSQLFIEISAYFATGSSMTYHFQEHYTLSENSSSLVSSLHRDVTLTREMITLSFRTTRTPSLLLYVSSFYEEYLSVILANNGSLQIRYKLDRHQNPDAFTFDFKNMADGQLHQVKINREEAVVMVEVNQSTKKQVILSSGTEFNAVKSLILGKVLEAAGADPDTRRAATSGFTGCLSAVRFGRAAPLKAALRPSGPSRVTVRGHVAPMARCAAGAASGSPARELAPRLAGGAGRSGPADEGEPLVNADRRDSAVIGGVIAVVIFILLCITAIAIRIYQQRKLRKENESKVSKKEEC

SEQ ID NO: 3165 - protein, 745 aa, Homo sapiens
MASVAWAVLKVLLLLPTQTWSPVGAGNPPDCDAPLASALPRSSFSSSSELSSSHGPGFSRLNRRDGAGGWTPLVSNKYQWLQIDLGERMEVTAVATQGGYGSSDWVTSYLLMFSDGGRNWKQYRREESIWGFPGNTNADSVVHYRLQPPFEARFLRFLPLAWNPRGRIGMRIEVYGCAYKSEVVYFDGQSALLYRLDKKPLKPIRDVISLKFKAMQSNGILLHREGQHGNHITLELIKGKLVFFLNSGNAKLPSTIAPVTLTLGSLLDDQHWHSVLIELLDTQVNFTVDKHTHHFQAKGDSSYLDLNFEISFGGIPTPGRSRAFRRKSFHGCLENLYYNGVDVTELAKKHKPQILMMGNVSFSCPQPQTVPVTFLSSRSYLALPGNSGEDKVSVTFQFRTWNRAGHLLFGELRRGSGSFVLFLKDGKLKLSLFQPGQSPRNVTAGAGLNDGQWHSVSFSAKWSHMNVVVDDDTAVQPLVAVLIDSGDTYYFGGCLDNSSGSGCKSPLGGFQGCLRLITIGDKAVDPILVQQGALGSFRDLQIDSCGITDRCLPSYCEHGGECSQSWDTFSCDCLGTGYTGETCHSSLYEQSCEAHKHRGNPSGLYYIDADGSGPLGPFLVYCNMTDAAWTVVQHGGPDAVTLRGAPSGHPRSAVSFAYAAGAGQLRSAVNLAERCEQRLALRCGTARRPDSRDGTPLSWWVGRTNETHTSWGGSLPDAQKCTCGLEGNCIDSQYYCNCDAGRNEW

SEQ ID NO: 3166 - protein, 604 aa, Homo sapiens
MASVAWAVLKVLLLLPTQTWSPVGAGNPPDCDAPLASALPRSSFSSSSELSSSHGPGFSRLNRRDGAGGWTPLVSNKYQWLQIDLGERMEVTAVATQGGYGSSDWVTSYLLMFSDGGRNWKQYRREESIWGFPGNTNADSVVHYRLQPPFEARFLRFLPLAWNPRGRIGMRIEVYGCAYKSEVVYFDGQSALLYRLDKKPLKPIRDVISLKFKAMQSNGILLHREGQHGNHITLELIKGKLVFFLNSGNAKLPSTIAPVTLTLGSLLDDQHWHSVLIELLDTQVNFTVDKHTHHFQAKGDSSYLDLNFEISFGGIPTPGRSRAFRRKSFHGCLENLYYNGVDVTELAKKHKPQILMMGNVSFSCPQPQTVPVTFLSSRSYLALPGNSGEDKVSVTFQFRTWNRAGHLLFGELRRGSGSFVLFLKDGKLKLSLFQPGQSPRNVTAGAGLNDGQWHSVSFSAKWSHMNVVVDDDTAVQPLVAVLIDSGDTYYFGALYEQSCEAHKHRGNPSGLYYIDADGSGPLGPFLVYCNMTDAAWTVVQHGGPDAVTLRGAPSGHPRSAVSFAYAAGAGQLRSAVNLAERCEQRLALRCGTARRPDSRGLVTQ

SEQ ID NO: 3167 - protein, 1039 aa, Homo sapiens
MEVTAVATQGGYGSSDWVTSYLLMFSDGGRNWKQYRREESIWGFPGNTNADSVVHYRLQPPFEARFLRFLPLAWNPRGRIGMRIEVYGCAYKSEVVYFDGQSALLYRLDKKPLKPIRDVISLKFKAMQSNGILLHREGQHGNHITLELIKGKLVFFLNSGNAKLPSTIAPVTLTLGSLLDDQHWHSVLIELLDTQVNFTVDKHTHHFQAKGDSSYLDLNFEISFGGIPTPGRSRAFRRKSFHGCLENLYYNGVDVTELAKKHKPQILMMGNVSFSCPQPQTVPVTFLSSRSYLALPGNSGEDKVSVTFQFRTWNRAGHLLFGELRRGSGSFVLFLKDGKLKLSLFQPGQSPRNVTAGAGLNDGQWHSVSFSAKWSHMNVVVDDDTAVQPLVAVLIDSGDTYYFGGCLDNSSGSGCKSPLGGFQGCLRLITIGDKAVDPILVQQGALGSFRDLQIDSCGITDRCLPSYCEHGGECSQSWDTFSCDCLGTGYTGETCHSSLYEQSCEAHKHRGNPSGLYYIDADGSGPLGPFLVYCNMTADAAWTVVQHGGPDAVTLRGAPSGHPRSAVSFAYAAGAGQLRSAVNLAERCEQRLALRCGTARRPDSRDGTPLSWWVGRTNETHTSWGGSLPDAQKCTCGLEGNCIDSQYYCNCDAGRNEWTSDTIVLSQKEHLPVTQIVMTDAGRPHSEAAYTLGPLLCRGDQSFWNSASFNTETSYLHFPAFHGELTADVCFFFKTTVSSGVFMENLGITDFIRIELRAPTEVTFSFDVGNGPCEVTVQSPTPFNDNQWHHVRAERNVKGASLQVDQLPQKMQPAPADGHVRLQLNSQLFIGGTATRQRGFLGCIRSLQLNGVALDLEERATVTPGVEPGCAGHCSTYGHLCRNGGRCREKRRGVTCDCAFSAYDGPFCSNEISAYFATGSSMTYHFQEHYTLSENSSSLVSSLHRDVTLTREMITLSFRTTRTPSLLLYVSSFYEEYLSVILANNGSLQIRYKLDRHQNPDAFTFDFKNMADGQLHQVKINREEAVVMVEVIPQMQKSN

SEQ ID NO: 3168 - protein, 380 aa, Homo sapiens
MASVAWAVLKVLLLLPTQTWSPVGAGNPPDCDSPLASALPRSSFSSSSELSSSHGPGFSRLNRRDGAGGWTPLVSNKYQWLQIDLGERMEVTAVATQGGYGSSDWVTSYLLMFSDGGRNWKQYRREESIWGFPGNTNADSVVHYRLQPPFEARFLRFLPLAWNPRGRIGMRIEVYGCAYKSEVVYFDGQSALLYTLDKKPLKPIRDVISLKFKAMQSNGILLHREGQHGNHITLELIKGKLVFFLNSGNAKLPSTIAPVTLTLGSLLDDQHWHSVLIELLDTQVNFTVDKHTHHFQAKGDSSNLDLNFEISFGGILSPGRSRAFTRKSFHGCLENLYYNGVDVTELAKKHKPQILMMELAHGLQDQNLKISLTVCHQTTQ

SEQ ID NO: 3169 - protein, 745 aa, Homo sapiens
MASVAWAVLKVLLLLPTQTWSPVGAGNPPDCDSPLASALPRSSFSSSSELSSSHGPGFSRLNRRDGAGGWTPLVSNKYQWLQIDLGERMEVTAVATQGGYGSSDWVTSYLLMFSDGGRNWKQYRREESIWGFPGNTNADSVVHYRLQPPFEARFLRFLPLAWNPRGRIGMRIEVYGCAYKSEVVYFDGQSALLYTLDKKPLKPIRDVISLKFKAMQSNGILLHREGQHGNHITLELIKGKLVFFLNSGNAKLPSTIAPVTLTLGSLLDDQHWHSVLIELLDTQVNFTVDKHTHHFQAKGDSSNLDLNFEISFGGILSPGRSRAFTRKSFHGCLENLYYNGVDVTELAKKHKPQILMMGNVSFSCPQPQTVPVTFLSSRSYLALPGNSGEDKVSVTFQFRTWNRAGHLLFGELQRGSGSFVLFLKDGKLKLSLFQAGQSPRNVTAGAGLNDGQWHSVSFSAKWSHMNVVVDDDTAVQPLVAVLIDSGDTYYFGGCLGNSSGSGCKSPLGGFQGCLRLITIGDKAVDPILVQQGALGSFRDLQIDSCGITDRCLPSYCEHGGECSQSWDTFSCDCLGTGYTGETCHSSLYEQSCEAHKHRGNPSGLYYIDADGSGPLGPFLVYCNMTDSAWTVVRHGGPDAVTLRGAPSGHPLSAVSFAYAAGAGQLRAAVNLAERCEQRLALRCGTARRPDSRDGTPLSWWVGRTNETHTSWGGSLPDAQKCTCGLEGNCIDSQYYCNCDAGQNEW

SEQ ID NO: 3170 - protein, 1288 aa, Homo sapiens
MASVAWAVLKVLLLLPTQTWSPVGAGNPPDCDSPLASALPRSSFSSSSELSSSHGPGFSRLNRRDGAGGWTPLVSNKYQWLQIDLGERMEVTAVATQGGYGSSDWVTSYLLMFSDGGRNWKQYRREESIWGFPGNTNADSVVHYRLQPPFEARFLRFLPLAWNPRGRIGMRIEVYGCAYKSEVVYFDGQSALLYTLDKKPLKPIRDVISLKFKAMQSNGILLHREGQHGNHITLELIKGKLVFFLNSGNAKLPSTIAPVTLTLGSLLDDQHWHSVLIELLDTQVNFTVDKHTHHFQAKGDSSNLDLNFEISFGGILSPGRSRAFTRKSFHGCLENLYYNGVDVTELAKKHKPQILMMGNVSFSCPQPQTVPVTFLSSRSYLALPGNSGEDKVSVTFQFRTWNRAGHLLFGELQRGSGSFVLFLKDGKLKLSLFQAGQSPRNVTAGAGLNDGQWHSVSFSAKWSHMNVVVDDDTAVQPLVAVLIDSGDTYYFGGCLGNSSGSGCKSPLGGFQGCLRLITIGDKAVDPILVQQGALGSFRDLQIDSCGITDRCLPSYCEHGGECSQSWDTFSCDCLGTGYTGETCHSSLYEQSCEAHKHRGNPSGLYYIDADGSGPLGPFLVYCNMTADSAWTVVRHGGPDAVTLRGAPSGHPLSAVSFAYAAGAGQLRAAVNLAERCEQRLALRCGTARRPDSRDGTPLSWWVGRTNETHTSWGGSLPDAQKCTCGLEGNCIDSQYYCNCDAGQNEWTSDTIVLSQKEHLPVTQIVMTDTGQPHSEADYTLGPLLCRGDKSFWNSASFNTETSYLHFPAFHGELTADVCFFFKTTVSSGVFMENLGITDFIRIELRAPTEVTFSFDVGNGPCEVTVQSPTPFNDNQWHHVRAERNVKGASLQVDQLPQKMQPAPADGHVRLQLNSQLFIGGTATRQRGFLGCIRSLQLNGVALDLEERATVTPGVEPGCAGHCSTYGHLCRNGGRCREKRRGVTCDCAFSAYDGPFCSNEISAYFATGSSMTYHFQEHYTLSENSSSLVSSLHRDVTLTREMITLSFRTTRTPSLLLYVSSFYEEYLSVILANNGSLQIRYKLDRHQNPDAFTFDFKNMADGQLHQVKINREEAVVMVEVNQSAKKQVILSSGTEFNAVKSLILGKVLEAAGADPDTRRAATSGFTGCLSAVRFGCAAPLKAALRPSGPSRVTVRGHVAPMARCAAGAASGSPARELAPRLAGGAGRSGPVDEGEPLVNADRRDSAVIGGVIAVEIFILLCITAIAIRIYQQRKLRKENESKVSKKEEC

SEQ ID NO: 3171 - protein, 605 aa, Homo sapiens
MASVAWAVLKVLLLLPTQTWSPVGAGNPPDCDSPLASALPRSSFSSSSELSSSHGPGFSRLNRRDGAGGWTPLVSNKYQWLQIDLGERMEVTAVATQGGYGSSDWVTSYLLMFSDGGRNWKQYRREESIWGFPGNTNADSVVHYRLQPPFEARFLRFLPLAWNPRGRIGMRIEVYGCAYKSEVVYFDGQSALLYTLDKKPLKPIRDVISLKFKAMQSNGILLHREGQHGNHITLELIKGKLVFFLNSGNAKLPSTIAPVTLTLGSLLDDQHWHSVLIELLDTQVNFTVDKHTHHFQAKGDSSNLDLNFEISFGGILSPGRSRAFTRKSFHGCLENLYYNGVDVTELAKKHKPQILMMGNVSFSCPQPQTVPVTFLSSRSYLALPGNSGEDKVSVTFQFRTWNRAGHLLFGELQRGSGSFVLFLKDGKLKLSLFQAGQSPRNVTAGAGLNDGQWHSVSFSAKWSHMNVVVDDDTAVQPLVAVLIDSGDTYYFGALYEQSCEAHKHRGNPSGLYYIDADGSGPLGPFLVYCNMTADSAWTVVRHGGPDAVTLRGAPSGHPLSAVSFAYAAGAGQLRAAVNLAERCEQRLALRCGTARRPDSRGLVTQ

SEQ ID NO: 3172 - protein, 1207 aa, Homo sapiens
MASVAWAVLKVLLLLPTQTWSPVGAGNPPDCDSPLASALPRSSFSSSSELSSSHGPGFSRLNRRDGAGGWTPLVSNKYQWLQIDLGERMEVTAVATQGGYGSSDWVTSYLLMFSDGGRNWKQYRREESIWGFPGNTNADSVVHYRLQPPFEARFLRFLPLAWNPRGRIGMRIEVYGCAYKSEVVYFDGQSALLYTLDKKPLKPIRDVISLKFKAMQSNGILLHREGQHGNHITLELIKGKLVFFLNSGNAKLPSTIAPVTLTLGSLLDDQHWHSVLIELLDTQVNFTVDKHTHHFQAKGDSSNLDLNFEISFGGILSPGRSRAFTRKSFHGCLENLYYNGVDVTELAKKHKPQILMMGNVSFSCPQPQTVPVTFLSSRSYLALPGNSGEDKVSVTFQFRTWNRAGHLLFGELQRGSGSFVLFLKDGKLKLSLFQAGQSPRNVTAGAGLNDGQWHSVSFSAKWSHMNVVVDDDTAVQPLVAVLIDSGDTYYFGGCLGNSSGSGCKSPLGGFQGCLRLITIGDKAVDPILVQQGALGSFRDLQIDSCGITDRCLPSYCEHGGECSQSWDTFSCDCLGTGYTGETCHSSLYEQSCEAHKHRGNPSGLYYIDADGSGPLGPFLVYCNMTDSAWTVVRHGGPDAVTLRGAPSGHPLSAVSFAYAAGAGQLRAAVNLAERCEQRLALRCGTARRPDSRDGTPLSWWVGRTNETHTSWGGSLPDAQKCTCGLEGNCIDSQYYCNCDAGQNEWTSDTIVLSQKEHLPVTQIVMTDTGQPHSEADYTLGPLLCRGDKSFWNSASFNTETSYLHFPAFHGELTADVCFFFKTTVSSGVFMENLGITDFIRIELRAPTEVTFSFDVGNGPCEVTVQSPTPFNDNQWHHVRAERNVKGASLQVDQLPQKMQPAPADGHVRLQLNSQLFIEISAYFATGSSMTYHFQEHYTLSENSSSLVSSLHRDVTLTREMITLSFRTTRTPSLLLYVSSFYEEYLSVILANNGSLQIRYKLDRHQNPDAFTFDFKNMADGQLHQVKINREEAVVMVEVNQSAKKQVILSSGTEFNAVKSLILGKVLEAAGADPDTRRAATSGFTGCLSAVRFGCAAPLKAALRPSGPSRVTVRGHVAPMARCAAGAASGSPARELAPRLAGGAGRSGPVDEGEPLVNADRRDSAVIGGVIAVEIFILLCITAIAIRIYQQRKLRKENESKVSKKEEC

SEQ ID NO: 3173 - protein, 652 aa, Homo sapiens
MASVAWAVLKVLLLLPTQTWSPVGAGNPPDCDSPLASALPRSSFSSSSELSSSHGPGFSRLNRRDGAGGWTPLVSNKYQWLQIDLGERMEVTAVATQGGYGSSDWVTSYLLMFSDGGRNWKQYRREESIWGFPGNTNADSVVHYRLQPPFEARFLRFLPLAWNPRGRIGMRIEVYGCAYKSEVVYFDGQSALLYTLDKKPLKPIRDVISLKFKAMQSNGILLHREGQHGNHITLELIKGKLVFFLNSGNAKLPSTIAPVTLTLGSLLDDQHWHSVLIELLDTQVNFTVDKHTHHFQAKGDSSNLDLNFEISFGGILSPGRSRAFTRKSFHGCLENLYYNGVDVTELAKKHKPQILMMGNVSFSCPQPQTVPVTFLSSRSYLALPGNSGEDKVSVTFQFRTWNRAGHLLFGELQRGSGSFVLFLKDGKLKLSLFQAGQSPRNVTAGAGLNDGQWHSVSFSAKWSHMNVVVDDDTAVQPLVAVLIDSGDTYYFGALYEQSCEAHKHRGNPSGLYYIDADGSGPLGPFLVYCNMTDSAWTVVRHGGPDAVTLRGAPSGHPLSAVSFAYAAGAGQLRAAVNLAERCEQRLALRCGTARRPDSRDGTPLSWWVGRTNETHTSWGGSLPDAQKCTCGLEGNCIDSQYYCNCDAGQNEW

SEQ ID NO: 3174 - protein, 966 aa, Homo sapiens
MASVAWAVLKVLLLLPTQTWSPVGAGNPPDCDSPLASALPRSSFSSSSELSSSHGPGFSRLNRRDGAGGWTPLVSNKYQWLQIDLGERMEVTAVATQGGYGSSDWVTSYLLMFSDGGRNWKQYRREESIWGFPGNTNADSVVHYRLQPPFEARFLRFLPLAWNPRGRIGMRIEVYGCAYKSEVVYFDGQSALLYTLDKKPLKPIRDVISLKFKAMQSNGILLHREGQHGNHITLELIKGKLVFFLNSGNAKLPSTIAPVTLTLGSLLDDQHWHSVLIELLDTQVNFTVDKHTHHFQAKGDSSNLDLNFEISFGGILSPGRSRAFTRKSFHGCLENLYYNGVDVTELAKKHKPQILMMGNVSFSCPQPQTVPVTFLSSRSYLALPGNSGEDKVSVTFQFRTWNRAGHLLFGELQRGSGSFVLFLKDGKLKLSLFQAGQSPRNVTAGAGLNDGQWHSVSFSAKWSHMNVVVDDDTAVQPLVAVLIDSGDTYYFGALYEQSCEAHKHRGNPSGLYYIDADGSGPLGPFLVYCNMTDSAWTVVRHGGPDAVTLRGAPSGHPLSAVSFAYAAGAGQLRAAVNLAERCEQRLALRCGTARRPDSRDGTPLSWWVGRTNETHTSWGGSLPDAQKCTCGLEGNCIDSQYYCNCDAGQNEWTSDTIVLSQKEHLPVTQIVMTDTGQPHSEADYTLGPLLCRGDKSFWNSASFNTETSYLHFPAFHGELTADVCFFFKTTVSSGVFMENLGITDFIRIELRAPTEVTFSFDVGNGPCEVTVQSPTPFNDNQWHHVRAERNVKGASLQVDQLPQKMQPAPADGHVRLQLNSQLFIGGTATRQRGFLGCIRSLQLNGVALDLEERATVTPGVEPGCAGHCSTYGHLCRNGGRCREKRRGVTCDCAFSAYDGPFCSNEISAYFATGSSMTYHFQEHYTLSENSSSLVSSLHRDVTLTREMITLSFRTTRTPSLLLKFAD

SEQ ID NO: 3175 - protein, 180 aa, Homo sapiens
  SITE 1: note = misc_feature - Xaa can be any naturally occurring amino acid
XRDVTLTREMITLSFRTTRTPSLLLYVSSFYEEYLSVILANNGSLQIRYKLDRHQNPDAFTFDFKNMADGQLHQVKINREEAVVMVEVNQSAKKQVILSSGTEFNAVKSLILGKVLGRSGPVDEGEPLVNADRRDSAVIGGVIAVEIFILLCITAIAIRIYQQRKLRKENESKVSKKEEC

SEQ ID NO: 3176 - protein, 167 aa, Homo sapiens
  SITE 1: note = misc_feature - Xaa can be any naturally occurring amino acid
XSAAPGLTRTSDTIVLSQKEHLPVTQIVMTDTGQPHSEADYTLGPLLCRGDTRLLKVWRRESVIFEIFPSLFGRLRWEDGLSQGVQHKPGQDESFWNSASFNTETSYLHFPAFHGELTADVCFFFKTTVSSGVFMENLGITDFIRIELRGRLATLDKSQGTHYLAIK

SEQ ID NO: 3177 - protein, 116 aa, Homo sapiens
MAINRFRLENDLEELALYQIQLLKDLRHTENEEDKVSSSSFRQRMLGNLLRPPYERPELPTCLYVIGLTGISGSGKSSIAQRLKGLGAFVIDSDHLGHRAYAPGGPAYQPVVEAFG

SEQ ID NO: 3178 - protein, 91 aa, Homo sapiens
MAVFRSGLLVLTTPLASLAPRLASILTSAARLVNHTLYVHLQPGMSLEGPAQPQSSPVQATFEVLDFITHLYAGADVHRHLDVRILLTNIR

SEQ ID NO: 3179 - protein, 147 aa, Homo sapiens
MAVFRSGLLVLTTPLASLAPRLASILTSAARLVNHTLYVHLQPGMSLEGPAQPQSSPVQATFEVLDFITHLYAGADVHRHLDVRILLTNIRTKSTFLPPLPTSVQNLAHPPEVVLTDFQTLDGSQYNPVKQQLVRYATSCYSCCPRL

SEQ ID NO: 3180 - protein, 219 aa, Homo sapiens
MAVFRSGLLVLTTPLASLAPRLASILTSAARLVNHTLYVHLQPGMSLEGPAQPQSSPVQATFEVLDFITHLYAGADVHRHLDVRILLTNIRTKSTFLPPLPTSVQNLAHPPEVVLTDFQTLDGSQYNPVKQQLVRYATSCYSCCPRLASVLLYSDYGIGEVPVEPLDVPLPSTIRPASPVAGSPKQPVRGYYRGAVGGTFDRLHNAHKVLLSVACILAQ

SEQ ID NO: 3181 - protein, 564 aa, Homo sapiens
MAVFRSGLLVLTTPLASLAPRLASILTSAARLVNHTLYVHLQPGMSLEGPAQPQSSPVQATFEVLDFITHLYAGADVHRHLDVRILLTNIRTKSTFLPPLPTSVQNLAHPPEVVLTDFQTLDGSQYNPVKQQLVRYATSCYSCCPRLASVLLYSDYGIGEVPVEPLDVPLPSTIRPASPVAGSPKQPVRGYYRGAVGGTFDRLHNAHKVLLSVACILAQEQLVVGVADKDLLKSKLLPELLQPYTERVEHLSEFLVDIKPSLTFDVIPLLDPYGPAGSDPSLEFLVVSEETYRGGMAINRFRLENDLEELALYQIQLLKDLRHTENEEDKVSSSSFRQRMLGNLLRPPYERPELPTCLYVIGLTGISGSGKSSIAQRLKGLGAFVIDSDHLGHRAYAPGGPAYQPVVEAFGTDILHKDGIINRKVLGSRVFGNKKQLKILTDIMWPIIAKLAREEMDRAVAEGKRVCVIDAAVLLEAGWQNLVHEVWTAVIPETEAVRRIVERDGLSEAAAQSRLQSQMSGQQLVEQSHVVLSTLWEPHITQRQVEKAWALLQKRIPKTHQALD

SEQ ID NO: 3182 - protein, 564 aa, Homo sapiens; identical to SEQ ID NO: 3181

SEQ ID NO: 3183 - protein, 98 aa, Homo sapiens
MRTPRLRAQPRGAVYQAPSPPPAPVGLGSMAVFRSGLLVLTTPLASLAPRLASILTSAARLVNHTLYVHLQPGMSLEGPAQPQSSPVQATFEVLDFIT

SEQ ID NO: 3184 - protein, 128 aa, Homo sapiens
MRTPRLRAQPRGAVYQAPSPPPAPVGLGSMAVFRSGLLVLTTPLASLAPRLASILTSAARLVNHTLYVHLQPGMSLEGPAQPQSSPVQATFEVLDFITHLYAGADVHRHLDVRILLTNIRTKSTFLPP

SEQ ID NO: 3185 - protein, 593 aa, Homo sapiens
MRTPRLRAQPRGAVYQAPSPPPAPVGLGSMAVFRSGLLVLTTPLASLAPRLASILTSAARLVNHTLYVHLQPGMSLEGPAQPQSSPVQATFEVLDFITHLYAGADVHRHLDVRILLTNIRTKSTFLPPLPTSVQNLAHPPEVVLTDFQTLDGSQYNPVKQQLVRYATSCYSCCPRLASVLLYSDYGIGEVPVEPLDVPLPSTIRPASPVAGSPKQPVRGYYRGAVGGTFDRLHNAHKVLLSVACILAQEQLVVGVADKDLLKSKLLPELLQPYTERVEHLSEFLVDIKPSLTFDVIPLLDPYGPAGSDPSLEFLVVSEETYRGGMAINRFRLENDLEELALYQIQLLKDLRHTENEEDKVSSSSFRQRMLGNLLRPPYERPELPTCLYVIGLTGISGSGKSSIAQRLKGLGAFVIDSDHLGHRAYAPGGPAYQPVVEAFGTDILHKDGIINRKVLGSRVFGNKKQLKILTDIMWPIIAKLAREEMDRAVAEGKRVCVIDAAVLLEAGWQNLVHEVWTAVIPETEAVRRIVERDGLSEAAAQSRLQSQMSGQQLVEQSHVVLSTLWEPHITQRQVEKAWALLQKRIPKTHQALD

SEQ ID NO: 3186 - protein, 96 aa, Homo sapiens
MRTPRLRAQPRGAVYQAPSPPPAPVVQNLAHPPEVVLTDFQTLDGSQYNPVKQQLVRYATSCYSCCPRLASVLLYSDYGIGEVPVEPLDVPLPSTI

SEQ ID NO: 3187 - protein, 438 aa, Homo sapiens
MLSRWSASFTVTKGKSSTQEATGQAVSTAHPPTGKRLKKTPEKKTGNKDCKADIAFLIDGSFNIGQRRFNLQKNFVGKVALMLGIGTEGPHVGLVQASEHPKIEFYLKNFTSAKDVLFAIKEVGFRGGNSNTGKALKHTAQKFFTVDAGVRKGIPKVVVVFIDGWPSDDIEEAGIVAREFGVNVFIVSVAKPIPEELGMVQDVTFVDKAVCRNNGFFSYHMPNWFGTTKYVKPLVQKLCTHEQMMCSKTCYNSVNIAFLIDGSSSVGDSNFRLMLEFVSNIAKTFEISDIGAKIAAVQFTYDQRTEFSFTDYSTKENVLAVIRNIRYMSGGTATGDAISFTVRNVFGPIRESPNKNFLVIVTDGQSYDDVQGPAAAAHDAGITIFSVGVAWAPLDDLKDMASKPKESHAFFTREFTGLEPIVSDVIRGICRDFLESQQ

SEQ ID NO: 3188 - protein, 193 aa, Homo sapiens
MSAAWIPALGLAPIAITCFTRGLDIRKEKADVLCPGGCPLEEFSVYGNIVYASVSSICGAAVHRGVISNSGGPVRVYSLPGRENYSSVDANGIQSQMLSRWSASFTVTKGKSSTQEATGQAVSTAHPPTGKRLKKTPEKKTGNKDCKADIAFLIDGSFNIGQRRFNLQKNFVGKVALMLGIGTEGPHVGLVQA

SEQ ID NO: 3189 - protein, 80 aa, Homo sapiens
MSAAWIPALGLGVCLLLLPGPAGSEGAAPIAITCFTRGLDIRKEKADVLCPGGCPLEEFSVYGNIVYASVSSICGAAVHR

SEQ ID NO: 3190 - protein, 513 aa, Homo sapiens
MSAAWIPALGLGVCLLLLPGPAGSEGAAPIAITCFTRGLDIRKEKADVLCPGGCPLEEFSVYGNIVYASVSSICGAAVHRGVISNSGGPVRVYSLPGRENYSSVDANGIQSQMLSRWSASFTVTKGKSSTQEATGQAVSTAHPPTGKRLKKTPEKKTGNKDCKADIAFLIDGSFNIGQRRFNLQKNFVGKVALMLGIGTEGPHVGLVQASEHPKIEFYLKNFTSAKDVLFAIKEVGFRGGNSNTDVAERMSSTTVDSEERLLRGKALKHTAQKFFTVDAGVRKGIPKVVVVFIDGWPSDDIEEAGIVAREFGVNVFIVSVAKPIPEELGMVQDVTFVDKAVCRNNGFFSYHMPNWFGTTKYVKPLVQKLCTHEQMMCSKTCYNSVNIAFLIDGSSSVGDSNFRLMLEFVSNIAKTFEISDIGAKIAAVQFTYDQRTEFSFTDYSTKENVLAVIRNIRYMSGGTATGDAISFTVRNVFGPIRESPNKNFLVIVTDGQSYDDVQGPAAAAHDAAK

SEQ ID NO: 3191 - protein, 550 aa, Homo sapiens
MSAAWIPALGLGVCLLLLPGPAGSEGAAPIAITCFTRGLDIRKEKADVLCPGGCPLEEFSVYGNIVYASVSSICGAAVHRGVISNSGGPVRVYSLPGRENYSSVDANGIQSQMLSRWSASFTVTKGKSSTQEATGQAVSTAHPPTGKRLKKTPEKKTGNKDCKADIAFLIDGSFNIGQRRFNLQKNFVGKVALMLGIGTEGPHVGLVQASEHPKIEFYLKNFTSAKDVLFAIKEVGFRGGNSNTGKALKHTAQKFFTVDAGVRKGIPKVVVVFIDGWPSDDIEEAGIVAREFGVNVFIVSVAKPIPEELGMVQDVTFVDKAVCRNNGFFSYHMPNWFGTTKYVKPLVQKLCTHEQMMCSKTCYNSVNIAFLIDGSSSVGDSNFRLMLEFVSNIAKTFEISDIGAKIAAVQFTYDQRTEFSFTDYSTKENVLAVIRNIRYMSGGTATGDAISFTVRNVFGPIRESPNKNFLVIVTDGQSYDDVQGPAAAAHDAGITIFSVGVAWAPLDDLKDMASKPKESHAFFTREFTGLEPIVSDVIRGICRDFLESQQ

SEQ ID NO: 3192 - protein, 494 aa, Homo sapiens
MSAAWIPALGLGVCLLLLPGPAGSEGAAPIAITCFTRGLDIRKEKADVLCPGGCPLEEFSVYGNIVYASVSSICGAAVHRGVISNSGGPVRVYSLPGRENYSSVDANGIQSQMLSRWSASFTVTKGKSSTQEATGQAVSTAHPPTGKRLKKTPEKKTGNKDCKADIAFLIDGSFNIGQRRFNLQKNFVGKVALMLGIGTEGPHVGLVQASEHPKIEFYLKNFTSAKDVLFAIKEVGFRGGNSNTGKALKHTAQKFFTVDAGVRKGIPKVVVVFIDGWPSDDIEEAGIVAREFGVNVFIVSVAKPIPEELGMVQDVTFVDKAVCRNNGFFSYHMPNWFGTTKYVKPLVQKLCTHEQMMCSKTCYNSVNIAFLIDGSSSVGDSNFRLMLEFVSNIAKTFEISDIGAKIAAVQFTYDQRTEFSFTDYSTKENVLAVIRNIRYMSGGTATGDAISFTVRNVFGPIRESPNKNFLVIVTDGQSYDDVQGPAAAAHDAAK

SEQ ID NO: 3193 - protein, 550 aa, Homo sapiens; identical to SEQ ID NO: 3191

SEQ ID NO: 3194 - protein, 550 aa, Homo sapiens; identical to SEQ ID NO: 3191

SEQ ID NO: 3195 - protein, 615 aa, Homo sapiens
MSAAWIPALGLGVCLLLLPGPAGSEGAGEWGSWGASRRSQGLSTSGYKRDSDPAPWASALPPEEEGAKVEPPRGAPALTPAADLLLLTCFSHAPIAITCFTRGLDIRKEKADVLCPGGCPLEEFSVYGNIVYASVSSICGAAVHRGVISNSGGPVRVYSLPGRENYSSVDANGIQSQMLSRWSASFTVTKGKSSTQEATGQAVSTAHPPTGKRLKKTPEKKTGNKDCKADIAFLIDGSFNIGQRRFNLQKNFVGKVALMLGIGTEGPHVGLVQASEHPKIEFYLKNFTSAKDVLFAIKEVGFRGGNSNTGKALKHTAQKFFTVDAGVRKGIPKVVVVFIDGWPSDDIEEAGIVAREFGVNVFIVSVAKPIPEELGMVQDVTFVDKAVCRNNGFFSYHMPNWFGTTKYVKPLVQKLCTHEQMMCSKTCYNSVNIAFLIDGSSSVGDSNFRLMLEFVSNIAKTFEISDIGAKIAAVQFTYDQRTEFSFTDYSTKENVLAVIRNIRYMSGGTATGDAISFTVRNVFGPIRESPNKNFLVIVTDGQSYDDVQGPAAAAHDAGITIFSVGVAWAPLDDLKDMASKPKESHAFFTREFTGLEPIVSDVIRGICRDFLESQQ

SEQ ID NO: 3196 - protein, 202 aa, Homo sapiens
MSAAWIPALGLGVCLLLLPGPAGSEGAGKRLKKTPEKKTGNKDCKADIAFLIDGSFNIGQRRFNLQKNFVGKVALMLGIGTEGPHVGLVQASEHPKIEFYLKNFTSAKDVLFAIKEVGFRGGNSNTGKALKHTAQKFFTVDAGVRKGIPKVVVVFIDGWPSDDIEEAGIVAREFGVNVFIVSVAKPIPEELGMVQDVTFVDK

SEQ ID NO: 3197 - protein, 55 aa, Homo sapiens
PIAITCFTRGLDIRKEKADVLCPGGCPLEEFSVYGNIVYASVSSICGAAVHRRQK

SEQ ID NO: 3198 - protein, 434 aa, Homo sapiens
  SITE 1: note = misc_feature - Xaa can be any naturally occurring amino acid
XCKADIAFLIDGSFNIGQRRFNLQKNFVGKVALMLGIGTEGPHVGLVQASEHPKIEFYLKNFTSAKDVLFAIKEVGFRGGNSNTDITLEKYLFVMLKRSENQQTYLMNADVAERMSSTTVDSEERLLRGKALKHTAQKFFTVDAGVRKGIPKVVVVFIDGWPSDDIEEAGIVAREFGVNVFIVSVAKPIPEELGMVQDVTFVDKAVCRNNGFFSYHMPNWFGTTKYVKPLVQKLCTHEQMMCSKTCYNSVNIAFLIDGSSSVGDSNFRLMLEFVSNIAKTFEISDIGAKIAAVQFTYDQRTEFSFTDYSTKENVLAVIRNIRYMSGGTATGDAISFTVRNVFGPIRESPNKNFLVIVTDGQSYDDVQGPAAAAHDAGITIFSVGVAWAPLDDLKDMASKPKESHAFFTREFTGLEPIVSDVIRGICRDFLESQQ

SEQ ID NO: 3199 - protein, 828 aa, Homo sapiens
MAEAALLLLPEAAAERDAREKLALWDRRPDTTAPLTDRQTDSVLELKAAAENLPVPAELPIEDLCSLTSQSLPIELTSVVPESTEDILLKGFTSLGMEEERIETAQQFFSWFAKLQTQMDQDEGTKYRQMRDYLSGFQEQCDAILNDVNSALQHLESLQKQYLFVSNKTGTLHEACEQLLKEQSELVDLAENIQQKLSYFNELETINTKLNSPTLSVNSDGFIPMLAKLDDCITYISSHPNFKDYPIYLLKFKQCLSKALHLMKTYTVNTLQTLTSQLLKRDPSSVPNADNAFTLFYVKFRAAAPKVRTLIEQIELRSEKIPEYQQLLNDIHQCYLDQRELLLGPSIACTVAELTSQNNRDHCALVRSGCAFMVHVCQDEHQLYNEFFTKPTSKLDELLEKLCVSLYDVFRPLIIHVIHLETLSELCGILKNEVLEDHVQNNAEQLGAFAAGVKQMLEDVQERLVYRTHIYIQTDITGYKPAPGDLAYPDKLVMMEQIAQSLKDEQKKVPSEASFSDVHLEEGESNSLTKSGSTESLNPRPQTTISPADLHGMWYPTVRRTLVCLSKLYRCIDRAVFQGLSQEALSACIQSLLGASESISKNKTQIDGQLFLIKHLLILREQIAPFHTEFTIKEISLDLKKTRDAAFKILNPMTVPRFFRLNSNNALIEFLLEGTPEIREHYLDSKKDVDRHLKSACEQFIQQQTKLFVEQLEEFMTKVSALKTMASQGGPKYTLSQQPWAQPAKVNDLAATAYKTIKTKLPVTLRSMSLYLSNKDTEFILFKPVRNNIQQVFQKFHALLKEEFSPEDIQIIACPSMEQLSLLLLVSK

SEQ ID NO: 3200 - protein, 444 aa, Homo sapiens
MAEAALLLLPEAAAERDAREKLALWDRRPDTTAPLTDRQTDSVLELKAAAENLPVPAELPIEDLCSLTSQSLPIELTSVVPESTEDILLKGFTSLGMEEERIETAQQFFSWFAKLQTQMDQDEGTKYRQMRDYLSGFQEQCDAILNDVNSALQHLESLQKQYLFVSNKTGTLHEACEQLLKEQSELVDLAENIQQKLSYFNELETINTKLNSPTLSVNSDGFIPMLAKLDDCITYISSHPNFKDYPIYLLKFKQCLSKALHLMKTYTVNTLQTLTSQLLKRDPSSVPNADNAFTLFYVKFRAAAPKVRTLIEQIELRSEKIPEYQQLLNDIHQCYLDQRELLLGPSIACTVAELTSQNNRDHCALVRSGCAFMVHVCQDEHQLYNEFFTKPTSKLDELLEKLCVSLYDVFRPLIIHVIHLETLSELCGILKNEVLEDHVQNNGK

SEQ ID NO: 3201 - protein, 85 aa, Homo sapiens
PEAAAERDAREKLALWDRRPDTTAPLTDRQTDSVLELKAAAENLPVPAEDMVPEVDLKSMKAQVEISLAQLSNSFIPWIIKVVCS

SEQ ID NO: 3202 - protein, 68 aa, Homo sapiens
  SITE 1: note = misc_feature - Xaa can be any naturally occurring amino acid
XIDGQLFLIKHLLILREQIAPFHTEFTIKEISLDLKKTRGFSVKNNGQSGRPQVYSLTAALGTTSKGQ

SEQ ID NO: 3203 - protein, 51 aa, Homo sapiens
MLPQIPFLLLVSLNLVHGVFYAERYQMPTGIKGPLPNTKTQFFIPYTIKSK

SEQ ID NO: 3204 - protein, 216 aa, Homo sapiens
MLPQIPFLLLVSLNLVHGVFYAERYQMPTGIKGPLPNTKTQFFIPYTIKSKGIAVRGEQGTPGPPGPAGPRGHPGPSGPPGKPGYGSPGLQGEPGLPGPPGPSAVGKPGVPGLPGKPGERGPYGPKGDVGPAGLPGPRGPPGPPGIPGPAGISVPGKPGQQGPTGAPGPRGFPGEKGAPGVPGMNGQKGEMGYGAPGRPGERGLPGPQGPTGPSGP

SEQ ID NO: 3205 - protein, 680 aa, Homo sapiens
MLPQIPFLLLVSLNLVHGVFYAERYQMPTGIKGPLPNTKTQFFIPYTIKSKGIAVRGEQGTPGPPGPAGPRGHPGPSGPPGKPGYGSPGLQGEPGLPGPPGPSAVGKPGVPGLPGKPGERGPYGPKGDVGPAGLPGPRGPPGPPGIPGPAGISVPGKPGQQGPTGAPGPRGFPGEKGAPGVPGMNGQKGEMGYGAPGRPGERGLPGPQGPTGPSGPPGVGKRGENGVPGQPGIKGDRGFPGEMGPIGPPGPQGPPGERGPEGIGKPGAAGAPGQPGIPGTKGLPGAPGIAGPPGPPGFGKPGLPGLKGERGPAGLPGGPGAKGEQGPAGLPGKPGLTGPPGNMGPQGPKGIPGSHGLPGPKGETGPAGPAGYPGAKGERGSPGSDGKPGYPGKPGLDGPKGNPGLPGPKGDPGVGGPPGLPGPVGPAGAKGMPGHNGEAGPRGAPGIPGTRGPIGPPGIPGFPGSKGDPGSPGPPGPAGIATKGLNGPTGPPGPPGPRGHSGEPGLPGPPGPPGPPGQAVMPEGFIKAGQRPSLSGTPLVSANQGVTGMPVSAFTVILSKAYPAIGTPIPFDKILYNRQQHYDPRTGIFTCQIPGIYYFSYHVHVKGTHVWVGLYKNGTPVMYTYDEYTKGYLDQASGSAIIDLTENDQVWLQLPNAESNGLYSSEYVHSSFSGFLVAPM

SEQ ID NO: 3206 - protein, 680 aa, Homo sapiens; identical to SEQ ID NO: 3205

SEQ ID NO: 3207 - protein, 1767 aa, Homo sapiens
MEPWSSRWKTKRWLWDFTVTTLALTFLFQAREVRGAAPVDVLKALDFHNSPEGISKTTGFCTNRKNSKGSDTAYRVSKQAQLSAPTKQLFPGGTFPEDFSILFTVKPKKGIQSFLLSIYNEHGIQQIGVEVGRSPVFLFEDHTGKPAPEDYPLFRTVNIADGKWHRVAISVEKKTVTMIVDCKKKTTKPLDRSERAIVDTNGITVFGTRILDEEVFEGDIQQFLITGDPKAAYDYCEHYSPDCDSSAPKAAQAQEPQIDEANIVDDFQEYNYGTMESYQTEAPRHVSGTNEPNPVEEIFTEEYLTGEDYDSQRKNSEDTLYENKEIDGRDSDLLVDGDLGEYDFYEYKEYEDKPTSPPNEEFGPGVPAETDITETSINGHGAYGEKGQKGEPAVVEPGMLVEGPPGPAGPAGIMGPPGLQGPTGPPGDPGDRGPPGRPGLPGADGLPGPPGTMLMLPFRYGGDGSKGPTISAQEAQAQAILQQARIALRGPPGPMGLTGRPGPVGGPGSSGAKGESGDPGPQGPRGVQGPPGPTGKPGKRGRPGADGGRGMPGEPGAKGDRGFDGLPGLPGDKGHRGERGPQGPPGPPGDDGMRGEDGEIGPRGLPGEAGPRGLLGPRGTPGAPGQPGMAGVDGPPGPKGNMGPQGEPGPPGQQGNPGPQGLPGPQGPIGPPGEKGPQGKPGLAGLPGADGPPGHPGKEGQSGEKGALGPPGPQGPIGYPGPRGVKGADGVRGLKGSKGEKGEDGFPGFKGDMGLKGDRGEVGQIGPRGEDGPEGPKGRAGPTGDPGPSGQAGEKGKLGVPGLPGYPGRQGPKGSTGFPGFPGANGEKGARGVAGKPGPRGQRGPTGPRGSRGARGPTGKPGPKGTSGGDGPPGPPGERGPQGPQGPVGFPGPKGPPGPPGKDGLPGHPGQRGETGFQGKTGPPGPGGVVGPQGPTGETGPIGERGHPGPPGPPGEQGLPGAAGKEGAKGDPGPQGISGKDGPAGLRGFPGERGLPGAQGAPGLKGGEGPQGPPGPVGSPGERGSAGTAGPIGLPGRPGPQGPPGPAGEKGAPGEKGPQGPAGRDGVQGPVGLPGPAGPAGSPGEDGDKGEIGEPGQKGSKGDKGENGPPGPPGLQGPVGAPGIAGGDGEPGPRGQQGMFGQKGDEGARGFPGPPGPIGLQGLPGPPGEKGENGDVGPMGPPGPPGPRGPQGPNGADGPQGPPGSVGSVGGVGEKGEPGEAGNPGPPGEAGVGGPKGERGEKGEAGPPGAAGPPGAKGPPGDDGPKGNPGPVGFPGDPGPPGEPGPAGQDGVGGDKGEDGDPGQPGPPGPSGEAGPPGPPGKRGPPGAAGAEGRQGEKGAKGEAGAEGPPGKTGPVGPQGPAGKPGPEGLRGIPGPVGEQGLPGAAGQDGPPGPMGPPGLPGLKGDPGSKGEKGHPGLIGLIGPPGEQGEKGDRGLPGTQGSPGAKGDGGIPGPAGPLGPPGPPGLPGPQGPKGNKGSTGPAGQKGDSGLPGPPGSPGPPGEVIQPLPILSSKKTRRHTEGMQADADDNILDYSDGMEEIFGSLNSLKQDIEHMKFPMGTQTNPARTCKDLQLSHPDFPDGEYWIDPNQGCSGDSFKVYCNFTSGGETCIYPDKKSEGVRISSWPKEKPGSWFSEFKRGKLLSYLDVEGNSINMVQMTFLKLLTASARQNFTYHCHQSAAWYDVSSGSYDKALRFLGSNDEEMSYDNNPFIKTLYDGCASRKGYEKTVIEINTPKIDQVPIVDVMINDFGDQNQKFGFEVGPVCFLG

SEQ ID NO: 3208 - protein, 1806 aa, Homo sapiens
MEPWSSRWKTKRWLWDFTVTTLALTFLFQAREVRGAAPVDVLKALDFHNSPEGISKTTGFCTNRKNSKGSDTAYRVSKQAQLSAPTKQLFPGGTFPEDFSILFTVKPKKGIQSFLLSIYNEHGIQQIGVEVGRSPVFLFEDHTGKPAPEDYPLFRTVNIADGKWHRVAISVEKKTVTMIVDCKKKTTKPLDRSERAIVDTNGITVFGTRILDEEVFEGDIQQFLITGDPKAAYDYCEHYSPDCDSSAPKAAQAQEPQIDEYAPEDIIEYDYEYGEAEYKEAESVTEGPTVTEETIAQTEANIVDDFQEYNYGTMESYQTEAPRHVSGTNEPNPVEEIFTEEYLTGEDYDSQRKNSEDTLYENKEIDGRDSDLLVDGDLGEYDFYEYKEYEDKPTSPPNEEFGPGVPAETDITETSINGHGAYGEKGQKGEPAVVEPGMLVEGPPGPAGPAGIMGPPGLQGPTGPPGDPGDRGPPGRPGLPGADGLPGPPGTMLMLPFRYGGDGSKGPTISAQEAQAQAILQQARIALRGPPGPMGLTGRPGPVGGPGSSGAKGESGDPGPQGPRGVQGPPGPTGKPGKRGRPGADGGRGMPGEPGAKGDRGFDGLPGLPGDKGHRGERGPQGPPGPPGDDGMRGEDGEIGPRGLPGEAGPRGLLGPRGTPGAPGQPGMAGVDGPPGPKGNMGPQGEPGPPGQQGNPGPQGLPGPQGPIGPPGEKGPQGKPGLAGLPGADGPPGHPGKEGQSGEKGALGPPGPQGPIGYPGPRGVKGADGVRGLKGSKGEKGEDGFPGFKGDMGLKGDRGEVGQIGPRGEDGPEGPKGRAGPTGDPGPSGQAGEKGKLGVPGLPGYPGRQGPKGSTGFPGFPGANGEKGARGVAGKPGPRGQRGPTGPRGSRGARGPTGKPGPKGTSGGDGPPGPPGERGPQGPQGPVGFPGPKGPPGPPGKDGLPGHPGQRGETGFQGKTGPPGPGGVVGPQGPTGETGPIGERGHPGPPGPPGEQGLPGAAGKEGAKGDPGPQGISGKDGPAGLRGFPGERGLPGAQGAPGLKGGEGPQGPPGPVGSPGERGSAGTAGPIGLPGRPGPQGPPGPAGEKGAPGEKGPQGPAGRDGVQGPVGLPGPAGPAGSPGEDGDKGEIGEPGQKGSKGDKGENGPPGPPGLQGPVGAPGIAGGDGEPGPRGQQGMFGQKGDEGARGFPGPPGPIGLQGLPGPPGEKGENGDVGPMGPPGPPGPRGPQGPNGADGPQGPPGSVGSVGGVGEKGEPGEAGNPGPPGEAGVGGPKGERGEKGEAGPPGAAGPPGAKGPPGDDGPKGNPGPVGFPGDPGPPGEPGPAGQDGVGGDKGEDGDPGQPGPPGPSGEAGPPGPPGKRGPPGAAGAEGRQGEKGAKGEAGAEGPPGKTGPVGPQGPAGKPGPEGLRGIPGPVGEQGLPGAAGQDGPPGPMGPPGLPGLKGDPGSKGEKGHPGLIGLIGPPGEQGEKGDRGLPGTQGSPGAKGDGGIPGPAGPLGPPGPPGLPGPQGPKGNKGSTGPAGQKGDSGLPGPPGSPGPPGEVIQPLPILSSKKTRRHTEGMQADADDNILDYSDGMEEIFGSLNSLKQDIEHMKFPMGTQTNPARTCKDLQLSHPDFPDGEYWIDPNQGCSGDSFKVYCNFTSGGETCIYPDKKSEGVRISSWPKEKPGSWFSEFKRGKLLSYLDVEGNSINMVQMTFLKLLTASARQNFTYHCHQSAAWYDVSSGSYDKALRFLGSNDEEMSYDNNPFIKTLYDGCASRKGYEKTVIEINTPKIDQVPIVDVMINDFGDQNQKFGFEVGPVCFLG

SEQ ID NO: 3209 - protein, 1818 aa, Homo sapiens
MEPWSSRWKTKRWLWDFTVTTLALTFLFQAREVRGAAPVDVLKALDFHNSPEGISKTTGFCTNRKNSKGSDTAYRVSKQAQLSAPTKQLFPGGTFPEDFSILFTVKPKKGIQSFLLSIYNEHGIQQIGVEVGRSPVFLFEDHTGKPAPEDYPLFRTVNIADGKWHRVAISVEKKTVTMIVDCKKKTTKPLDRSERAIVDTNGITVFGTRILDEEVFEGDIQQFLITGDPKAAYDYCEHYSPDCDSSAPKAAQAQEPQIDEKKKSNFKKKMRTVATKSKEKSKKFTPPKSEKFSSKKKKSYQASAKAKLGVKANIVDDFQEYNYGTMESYQTEAPRHVSGTNEPNPVEEIFTEEYLTGEDYDSQRKNSEDTLYENKEIDGRDSDLLVDGDLGEYDFYEYKEYEDKPTSPPNEEFGPGVPAETDITETSINGHGAYGEKGQKGEPAVVEPGMLVEGPPGPAGPAGIMGPPGLQGPTGPPGDPGDRGPPGRPGLPGADGLPGPPGTMLMLPFRYGGDGSKGPTISAQEAQAQAILQQARIALRGPPGPMGLTGRPGPVGGPGSSGAKGESGDPGPQGPRGVQGPPGPTGKPGKRGRPGADGGRGMPGEPGAKGDRGFDGLPGLPGDKGHRGERGPQGPPGPPGDDGMRGEDGEIGPRGLPGEAGPRGLLGPRGTPGAPGQPGMAGVDGPPGPKGNMGPQGEPGPPGQQGNPGPQGLPGPQGPIGPPGEKGPQGKPGLAGLPGADGPPGHPGKEGQSGEKGALGPPGPQGPIGYPGPRGVKGADGVRGLKGSKGEKGEDGFPGFKGDMGLKGDRGEVGQIGPRGEDGPEGPKGRAGPTGDPGPSGQAGEKGKLGVPGLPGYPGRQGPKGSTGFPGFPGANGEKGARGVAGKPGPRGQRGPTGPRGSRGARGPTGKPGPKGTSGGDGPPGPPGERGPQGPQGPVGFPGPKGPPGPPGKDGLPGHPGQRGETGFQGKTGPPGPGGVVGPQGPTGETGPIGERGHPGPPGPPGEQGLPGAAGKEGAKGDPGPQGISGKDGPAGLRGFPGERGLPGAQGAPGLKGGEGPQGPPGPVGSPGERGSAGTAGPIGLPGRPGPQGPPGPAGEKGAPGEKGPQGPAGRDGVQGPVGLPGPAGPAGSPGEDGDKGEIGEPGQKGSKGDKGENGPPGPPGLQGPVGAPGIAGGDGEPGPRGQQGMFGQKGDEGARGFPGPPGPIGLQGLPGPPGEKGENGDVGPMGPPGPPGPRGPQGPNGADGPQGPPGSVGSVGGVGEKGEPGEAGNPGPPGEAGVGGPKGERGEKGEAGPPGAAGPPGAKGPPGDDGPKGNPGPVGFPGDPGPPGEPGPAGQDGVGGDKGEDGDPGQPGPPGPSGEAGPPGPPGKRGPPGAAGAEGRQGEKGAKGEAGAEGPPGKTGPVGPQGPAGKPGPEGLRGIPGPVGEQGLPGAAGQDGPPGPMGPPGLPGLKGDPGSKGEKGHPGLIGLIGPPGEQGEKGDRGLPGTQGSPGAKGDGGIPGPAGPLGPPGPPGLPGPQGPKGNKGSTGPAGQKGDSGLPGPPGSPGPPGEVIQPLPILSSKKTRRHTEGMQADADDNILDYSDGMEEIFGSLNSLKQDIEHMKFPMGTQTNPARTCKDLQLSHPDFPDGEYWIDPNQGCSGDSFKVYCNFTSGGETCIYPDKKSEGVRISSWPKEKPGSWFSEFKRGKLLSYLDVEGNSINMVQMTFLKLLTASARQNFTYHCHQSAAWYDVSSGSYDKALRFLGSNDEEMSYDNNPFIKTLYDGCASRKGYEKTVIEINTPKIDQVPIVDVMINDFGDQNQKFGFEVGPVCFLG

SEQ ID NO: 3210 - protein, 780 aa, Homo sapiens
MEPWSSRWKTKRWLWDFTVTTLALTFLFQAREVRGAAPVDVLKALDFHNSPEGISKTTGFCTNRKNSKGSDTAYRVSKQAQLSAPTKQLFPGGTFPEDFSILFTVKPKKGIQSFLLSIYNEHGIQQIGVEVGRSPVFLFEDHTGKPAPEDYPLFRTVNIADGKWHRVAISVEKKTVTMIVDCKKKTTKPLDRSERAIVDTNGITVFGTRILDEEVFEGDIQQFLITGDPKAAYDYCEHYSPDCDSSAPKAAQAQEPQIDEYAPEDIIEYDYEYGEAEYKEAESVTEGPTVTEETIAQTEKKKSNFKKKMRTVATKSKEKSKKFTPPKSEKFSSKKKKSYQASAKAKLGVKANIVDDFQEYNYGTMESYQTEAPRHVSGTNEPNPVEEIFTEEYLTGEDYDSQRKNSEDTLYENKEIDGRDSDLLVDGDLGEYDFYEYKEYEDKPTSPPNEEFGPGVPAETDITETSINGHGAYGEKGQKGEPAVVEPGMLVEGPPGPAGPAGIMGPPGLQGPTGPPGDPGDRGPPGRPGLPGADGLPGPPGTMLMLPFRYGGDGSKGPTISAQEAQAQAILQQARIALRGPPGPMGLTGRPGPVGGPGSSGAKGESGDPGPQGPRGVQGPPGPTGKPGKRGRPGADGGRGMPGEPGAKGDRGFDGLPGLPGDKGHRGERGPQGPPGPPGDDGMRGEDGEIGPRGLPGEAGPRGLLGPRGTPGAPGQPGMAGVDGPPGPKGNMGPQGEPGPPGQQGNPGPQGLPGPQGPIGPPGEKMCCNLSFGILIPLQK

SEQ ID NO: 3211 - protein, 570 aa, Homo sapiens
MEPWSSRWKTKRWLWDFTVTTLALTFLFQAREVRGAAPVDVLKALDFHNSPEGISKTTGFCTNRKNSKGSDTAYRVSKQAQLSAPTKQLFPGGTFPEDFSILFTVKPKKGIQSFLLSIYNEHGIQQIGVEVGRSPVFLFEDHTGKPAPEDYPLFRTVNIADGKWHRVAISVEKKTVTMIVDCKKKTTKPLDRSERAIVDTNGITVFGTRILDEEVFEGDIQQFLITGDPKAAYDYCEHYSPDCDSSAPKAAQAQEPQIDEKKKSNFKKKMRTVATKSKEKSKKFTPPKSEKFSSKKKKSYQASAKAKLGVKANIVDDFQEYNYGTMESYQTEAPRHVSGTNEPNPVEEIFTEEYLTGEDYDSQRKNSEDTLYENKEIDGRDSDLLVDGDLGEYDFYEYKEYEDKPTSPPNEEFGPGVPAETDITETSINGHGAYGEKGQKGEPAVVEPGMLVEGPPGPAGPAGIMGPPGLQGPTGPPGDPGDRGPPGRPGLPGADGLPGPPGTMLMLPFRYGGDGSKGPTISAQEAQAQAILQQARIALRGPPGPMGLTGRPGPVGGPGSSGAKGESGDP

SEQ ID NO: 3212 - protein, 1690 aa, Homo sapiens
MEPWSSRWKTKRWLWDFTVTTLALTFLFQAREVRGAAPVDVLKALDFHNSPEGISKTTGFCTNRKNSKGSDTAYRVSKQAQLSAPTKQLFPGGTFPEDFSILFTVKPKKGIQSFLLSIYNEHGIQQIGVEVGRSPVFLFEDHTGKPAPEDYPLFRTVNIADGKWHRVAISVEKKTVTMIVDCKKKTTKPLDRSERAIVDTNGITVFGTRILDEEVFEGDIQQFLITGDPKAAYDYCEHYSPDCDSSAPKAAQAQEPQIDEYAPEDIIEYDYEYGEAEYKEAESVTEGPTVTEETIAQTEINGHGAYGEKGQKGEPAVVEPGMLVEGPPGPAGPAGIMGPPGLQGPTGPPGDPGDRGPPGRPGLPGADGLPGPPGTMLMLPFRYGGDGSKGPTISAQEAQAQAILQQARIALRGPPGPMGLTGRPGPVGGPGSSGAKGESGDPGPQGPRGVQGPPGPTGKPGKRGRPGADGGRGMPGEPGAKGDRGFDGLPGLPGDKGHRGERGPQGPPGPPGDDGMRGEDGEIGPRGLPGEAGPRGLLGPRGTPGAPGQPGMAGVDGPPGPKGNMGPQGEPGPPGQQGNPGPQGLPGPQGPIGPPGEKGPQGKPGLAGLPGADGPPGHPGKEGQSGEKGALGPPGPQGPIGYPGPRGVKGADGVRGLKGSKGEKGEDGFPGFKGDMGLKGDRGEVGQIGPRGEDGPEGPKGRAGPTGDPGPSGQAGEKGKLGVPGLPGYPGRQGPKGSTGFPGFPGANGEKGARGVAGKPGPRGQRGPTGPRGSRGARGPTGKPGPKGTSGGDGPPGPPGERGPQGPQGPVGFPGPKGPPGPPGKDGLPGHPGQRGETGFQGKTGPPGPGGVVGPQGPTGETGPIGERGHPGPPGPPGEQGLPGAAGKEGAKGDPGPQGISGKDGPAGLRGFPGERGLPGAQGAPGLKGGEGPQGPPGPVGSPGERGSAGTAGPIGLPGRPGPQGPPGPAGEKGAPGEKGPQGPAGRDGVQGPVGLPGPAGPAGSPGEDGDKGEIGEPGQKGSKGDKGENGPPGPPGLQGPVGAPGIAGGDGEPGPRGQQGMFGQKGDEGARGFPGPPGPIGLQGLPGPPGEKGENGDVGPMGPPGPPGPRGPQGPNGADGPQGPPGSVGSVGGVGEKGEPGEAGNPGPPGEAGVGGPKGERGEKGEAGPPGAAGPPGAKGPPGDDGPKGNPGPVGFPGDPGPPGEPGPAGQDGVGGDKGEDGDPGQPGPPGPSGEAGPPGPPGKRGPPGAAGAEGRQGEKGAKGEAGAEGPPGKTGPVGPQGPAGKPGPEGLRGIPGPVGEQGLPGAAGQDGPPGPMGPPGLPGLKGDPGSKGEKGHPGLIGLIGPPGEQGEKGDRGLPGTQGSPGAKGDGGIPGPAGPLGPPGPPGLPGPQGPKGNKGSTGPAGQKGDSGLPGPPGSPGPPGEVIQPLPILSSKKTRRHTEGMQADADDNILDYSDGMEEIFGSLNSLKQDIEHMKFPMGTQTNPARTCKDLQLSHPDFPDGEYWIDPNQGCSGDSFKVYCNFTSGGETCIYPDKKSEGVRISSWPKEKPGSWFSEFKRGKLLSYLDVEGNSINMVQMTFLKLLTASARQNFTYHCHQSAAWYDVSSGSYDKALRFLGSNDEEMSYDNNPFIKTLYDGCASRKGYEKTVIEINTPKIDQVPIVDVMINDFGDQNQKFGFEVGPVCFLG

SEQ ID NO: 3213 - protein, 736 aa, Homo sapiens
MEPWSSRWKTKRWLWDFTVTTLALTFLFQAREVRGAAPVDVLKALDFHNSPEGISKTTGFCTNRKNSKGSDTAYRVSKQAQLSAPTKQLFPGGTFPEDFSILFTVKPKKGIQSFLLSIYNEHGIQQIGVEVGRSPVFLFEDHTGKPAPEDYPLFRTVNIADGKWHRVAISVEKKTVTMIVDCKKKTTKPLDRSERAIVDTNGITVFGTRILDEEVFEGDIQQFLITGDPKAAYDYCEHYSPDCDSSAPKAAQAQEPQIDEYAPEDIIEYDYEYGEAEYKEAESVTEGPTVTEETIAQTEANIVDDFQEYNYGTMESYQTEAPRHVSGTNEPNPVEEIFTEEYLTGEDYDSQRKNSEDTLYENKEIDGRDSDLLVDGDLGEYDFYEYKEYEDKPTSPPNEEFGPGVPAETDITETSINGHGAYGEKGQKGEPAVVEPGMLVEGPPGPAGPAGIMGPPGLQGPTGPPGDPGDRGPPGRPGLPGADGLPGPPGTMLMLPFRYGGDGSKGPTISAQEAQAQAILQQARIALRGPPGPMGLTGRPGPVGGPGSSGAKGESGDPGPQGPRGVQGPPGPTGKPGKRGRPGADGGRGMPGEPGAKGDRGFDGLPGLPGDKGHRGERGPQGPPGPPGDDGMRGEDGEIGPRGLPGEAGPRGLLGPRGTPGAPGQPGMAGVDGPPGPKGNMGPQGEPGPPGQQGNPGPQGLPGPQGPIGPPGEKVSYSVVLVKPGEHVCFSNLRQV

SEQ ID NO: 3214 - protein, 729 aa, Homo sapiens
MEPWSSRWKTKRWLWDFTVTTLALTFLFQAREVRGAAPVDVLKALDFHNSPEGISKTTGFCTNRKNSKGSDTAYRVSKQAQLSAPTKQLFPGGTFPEDFSILFTVKPKKGIQSFLLSIYNEHGIQQIGVEVGRSPVFLFEDHTGKPAPEDYPLFRTVNIADGKWHRVAISVEKKTVTMIVDCKKKTTKPLDRSERAIVDTNGITVFGTRILDEEVFEGDIQQFLITGDPKAAYDYCEHYSPDCDSSAPKAAQAQEPQIDEYAPEDIIEYDYEYGEAEYKEAESVTEGPTVTEETIAQTEANIVDDFQEYNYGTMESYQTEAPRHVSGTNEPNPVEEIFTEEYLTGEDYDSQRKNSEDTLYENKEIDGRDSDLLVDGDLGEYDFYEYKEYEDKPTSPPNEEFGPGVPAETDITETSINGHGAYGEKGQKGEPAVVEPGMLVEGPPGPAGPAGIMGPPGLQGPTGPPGDPGDRGPPGRPGLPGADGLPGPPGTMLMLPFRYGGDGSKGPTISAQEAQAQAILQQARIALRGPPGPMGLTGRPGPVGGPGSSGAKGESGDPGPQGPRGVQGPPGPTGKPGKRGRPGADGGRGMPGEPGAKGDRGFDGLPGLPGDKGHRGERGPQGPPGPPGDDGMRGEDGEIGPRGLPGEAGPRGLLGPRGTPGAPGQPGMAGVDGPPGPKGNMGPQGEPGPPGQQGNPGPQGLPGPQGPIGPPGEKMCCNLSFGILIPLQK

SEQ ID NO: 3215 - protein, 756 aa, Homo sapiens
MEPWSSRWKTKRWLWDFTVTTLALTFLFQAREVRGAAPVDVLKALDFHNSPEGISKTTGFCTNRKNSKGSDTAYRVSKQAQLSAPTKQLFPGGTFPEDFSILFTVKPKKGIQSFLLSIYNEHGIQQIGVEVGRSPVFLFEDHTGKPAPEDYPLFRTVNIADGKWHRVAISVEKKTVTMIVDCKKKTTKPLDRSERAIVDTNGITVFGTRILDEEVFEGDIQQFLITGDPKAAYDYCEHYSPDCDSSAPKAAQAQEPQIDEYAPEDIIEYDYEYGEAEYKEAESVTEGPTVTEETIAQTEANIVDDFQEYNYGTMESYQTEAPRHVSGTNEPNPVEEIFTEEYLTGEDYDSQRKNSEDTLYENKEIDGRDSDLLVDGDLGEYDFYEYKEYEDKPTSPPNEEFGPGVPAETDITETSINGHGAYGEKGQKGEPAVVEPGMLVEGPPGPAGPAGIMGPPGLQGPTGPPGDPGDRGPPGRPGLPGADGLPGPPGTMLMLPFRYGGDGSKGPTISAQEAQAQAILQQARIALRGPPGPMGLTGRPGPVGGPGSSGAKGESGDPGPQGPRGVQGPPGPTGKPGKRGRPGADGGRGMPGEPGAKGDRGFDGLPGLPGDKGHRGERGPQGPPGPPGDDGMRGEDGEIGPRGLPGEAGPRGLLGPRGTPGAPGQPGMAGVDGPPGPKGNMGPQGEPGPPGQQGNPGPQGLPGPQGPIGPPGEKVSFSFSLFYKKVIKFACDKRFVGRHDERKVVKLSLPLYLIYE

SEQ ID NO: 3216 - protein, 694 aa, Homo sapiens
  SITE 1: note = misc_feature - Xaa can be any naturally occurring amino acid
XPKAAYDYCEHYSPDCDSSAPKAAQAQEPQIDEYAPEDIIEYDYEYGEAEYKEAESVTEGPTVTEETIAQTEANIVDDFQEYNYGTMESYQTEAPRHVSGTNEPNPVEEIFTEEYLTGEDYDSQRKNSEDTLYENKEIDGRDSDLLVDGDLGEYDFYEYKEYEDKPTSPPNEEFGPGVPAETDITETSINGHGAYGEKGQKGEPAVVEPGMLVEGPPGPAGPAGIMGPPGLQGPTGPPGDPGDRGPPGRPGLPGADGLPGPPGTMLMLPFRYGGDGSKGPTISAQEAQAQAILQQARIALRGPPGPMGLTGRPGPVGGPGSSGAKGESGDPGPQGPRGVQGPPGPTGKPGKRGRPGADGGRGMPGEPGAKGDRGFDGLPGLPGDKGHRGERGPQGPPGPPGDDGMRGEDGEIGPRGLPGEAGPRGLLGPRGTPGAPGQPGMAGVDGPPGPKGNMGPQGEPGPPGQQGNPGPQGLPGPQGPIGPPGEKGPQGKPGLAGLPGADGPPGHPGKEGQSGEKGALGPPGPQGPIGYPGPRGVKGADGVRGLKGSKGEKGEDGFPGFKGDMGLKGDRGEVGQIGPRGEDGPEGPKGRAGPTGDPGPSGQAGEKGKLGVPGLPGYPGRQGPKDFRCHWFHWIPWVSRCQWRERCTGSSWQTRPSGSAWSNGSSRFKRCKRSHWETWAKGHFRWRWPSWPSR

SEQ ID NO: 3217 - protein, 200 aa, Homo sapiens
YRVSKQAQLSAPTKQLFPGGTFPEDFSILFTVKPKKGIQSFLLSIYNEHGIQQIGVEVGRSPVFLFEDHTGKPAPEDYPLFRTVNIADGKWHRVAISVEKKTVTMIVDCKKKTTKPLDRSERAIVDTNGITVFGTRILDEEVFEGDIQQFLITGDPKAAYDYCEHYSPDCDSSAPKAAQAQEPQIDEVRSTRPEKVFVFQ

SEQ ID NO: 3218 - protein, 1736 aa, Homo sapiens
MERCSRCHRLLLLLPLVLGLSAAPGWAGAPPVDVLRALRFPSLPDGVRRAKGICPADVAYRVARPAQLSAPTRQLFPGGFPKDFSLLTVVRTRPGLQAPLLTLYSAQGVRQLGLELGRPVRFLYEDQTGRPQPPSQPVFRGLSLADGKWHRVAVAVKGQSVTLIVDCKKRVTRPLPRSARPVLDTHGVIIFGARILDEEVFEGDVQELAIVPGVQAAYESCEQKELECEGGQRERPQNQQPHRAQRSPQQQPSRLHRPQNQEPQSQPTESLYYDYEPPYYDVMTTGTTPDYQDPTPGEEEEILESSLLPPLEEEQTDLQVPPTADRFQAEEYGEGGTDPPEGPYDYTYGYGDDYREETELGPALSAETAHSGAAAHGPRGLKGEKGEPAVLEPGMLVEGPPGPEGPAGLIGPPGIQGNPGPVGDPGERGPPGRAGLPGSDGAPGPPGTSLMLPFRFGSGGGDKGPVVAAQEAQAQAILQQARLALRGPPGPMGYTGRPGPLGQPGSPGLKGESGDLGPQGPRGPQGLTGPPGKAGRRGRAGADGARGMPGDPGVKGDRGFDGLPGLPGEKGHRGDTGAQGLPGPPGEDGERGDDGEIGPRGLPGESGPRGLLGPKGPPGIPGPPGVRGMDGPQGPKGSLGPQGEPGPPGQQGTPGTQGLPGPQGAIGPHGEKGPQGKPGLPGMPGSDGPPGHPGKEGPPGTKGNQGPSGPQGPLGYPGPRGVKGVDGIRGLKGHKGEKGEDGFPGFKGDIGVKGDRGEVGVPGSRGEDGPEGPKGRTGPTGDPGPPGLMGEKGKLGVPGLPGYPGRQGPKGSLGFPGFPGASGEKGARGLSGKSGPRGERGPTGPRGQRGPRGATGKSGAKGTSGGDGPHGPPGERGLPGPQGPNGFPGPKGPPGPPGKDGLPGHPGQRGEVGFQGKTGPPGPPGVVGPQGAAGETGPMGERGHPGPPGPPGEQGLPGTAGKEGTKGDPGPPGAPGKDGPAGLRGFPGERGLPGTAGGPGLKGNEGPSGPPGPAGSPGERGAAGSGGPIGPPGRPGPQGPPGAAGEKGVPGEKGPIGPTGRDGVQGPVGLPGPAGPPGVAGEDGDKGEVGDPGQKGTKGNKGEHGPPGPPGPIGPVGQPGAAGADGEPGARGPQGHFGAKGDEGTRGFNGPPGPIGLQGLPGPSGEKGETGDVGPMGPPGPPGPRGPAGPNGADGPQGPPGGVGNLGPPGEKGEPGESGSPGIQGEPGVKGPRGERGEKGESGQPGEPGPPGPKGPTGDDGPKGNPGPVGFPGDPGPPGEGGPRGQDGAKGDRGEDGEPGQPGSPGPTGENGPPGPLGKRGPAGSPGSEGRQGGKGAKGDPGAIGAPGKTGPVGPAGPAGKPGPDGLRGLPGSVGQQGRPGATGQAGPPGPVGPPGLPGLRGDAGAKGEKGHPGLIGLIGPPGEQGEKGDRGLPGPQGSPGQKGEMGIPGASGPIGPGGPPGLPGPAGPKGAKGATGPGGPKGEKGVQGPPGHPGPPGEVIQPLPIQMPKKTRRSVDGSRLMQEDEAIPTGGAPGSPGGLEEIFGSLDSLREEIEQMRRPTGTQDSPARTCQDLKLCHPELPDGEYWVDPNQGCARDAFRVFCNFTAGGETCVTPRDDVTQFSYVDSEGSPVGVVQLTFLRLLSVSAHQDVSYPCSGAARDGPLRLRGANEDELSPETSPYVKEFRDGCQTQQGRTVLEVRTPVLEQLPVLDASFSDLGAPPRRGGVLLGPVCFMG

SEQ ID NO: 3219 - protein, 1629 aa, Homo sapiens
MERCSRCHRLLLLLPLVLGLSAAPGWAGAPPVDVLRALRFPSLPDGVRRAKGICPADVAYRVARPAQLSAPTRQLFPGGFPKDFSLLTVVRTRPGLQAPLLTLYSAQGVRQLGLELGRPVRFLYEDQTGRPQPPSQPVFRGLSLADGKWHRVAVAVKGQSVTLIVDCKKRVTRPLPRSARPVLDTHGVIIFGARILDEEVFEGDVQELAIVPGVQAAYESCEQKELECEGGQRERPQNQQPHRAQRSPQQQPSRLHRPQNQEPQSQAAHGPRGLKGEKGEPAVLEPGMLVEGPPGPEGPAGLIGPPGIQGNPGPVGDPGERGPPGRAGLPGSDGAPGPPGTSLMLPFRFGSGGGDKGPVVAAQEAQAQAILQQARLALRGPPGPMGYTGRPGPLGQPGSPGLKGESGDLGPQGPRGPQGLTGPPGKAGRRGRAGADGARGMPGDPGVKGDRGFDGLPGLPGEKGHRGDTGAQGLPGPPGEDGERGDDGEIGPRGLPGESGPRGLLGPKGPPGIPGPPGVRGMDGPQGPKGSLGPQGEPGPPGQQGTPGTQGLPGPQGAIGPHGEKGPQGKPGLPGMPGSDGPPGHPGKEGPPGTKGNQGPSGPQGPLGYPGPRGVKGVDGIRGLKGHKGEKGEDGFPGFKGDIGVKGDRGEVGVPGSRGEDGPEGPKGRTGPTGDPGPPGLMGEKGKLGVPGLPGYPGRQGPKGSLGFPGFPGASGEKGARGLSGKSGPRGERGPTGPRGQRGPRGATGKSGAKGTSGGDGPHGPPGERGLPGPQGPNGFPGPKGPPGPPGKDGLPGHPGQRGEVGFQGKTGPPGPPGVVGPQGAAGETGPMGERGHPGPPGPPGEQGLPGTAGKEGTKGDPGPPGAPGKDGPAGLRGFPGERGLPGTAGGPGLKGNEGPSGPPGPAGSPGERGAAGSGGPIGPPGRPGPQGPPGAAGEKGVPGEKGPIGPTGRDGVQGPVGLPGPAGPPGVAGEDGDKGEVGDPGQKGTKGNKGEHGPPGPPGPIGPVGQPGAAGADGEPGARGPQGHFGAKGDEGTRGFNGPPGPIGLQGLPGPSGEKGETGDVGPMGPPGPPGPRGPAGPNGADGPQGPPGGVGNLGPPGEKGEPGESGSPGIQGEPGVKGPRGERGEKGESGQPGEPGPPGPKGPTGDDGPKGNPGPVGFPGDPGPPGEGGPRGQDGAKGDRGEDGEPGQPGSPGPTGENGPPGPLGKRGPAGSPGSEGRQGGKGAKGDPGAIGAPGKTGPVGPAGPAGKPGPDGLRGLPGSVGQQGRPGATGQAGPPGPVGPPGLPGLRGDAGAKGEKGHPGLIGLIGPPGEQGEKGDRGLPGPQGSPGQKGEMGIPGASGPIGPGGPPGLPGPAGPKGAKGATGPGGPKGEKGVQGPPGHPGPPGEVIQPLPIQMPKKTRRSVDGSRLMQEDEAIPTGGAPGSPGGLEEIFGSLDSLREEIEQMRRPTGTQDSPARTCQDLKLCHPELPDGEYWVDPNQGCARDAFRVFCNFTAGGETCVTPRDDVTQFSYVDSEGSPVGVVQLTFLRLLSVSAHQDVSYPCSGAARDGPLRLRGANEDELSPETSPYVKEFRDGCQTQQGRTVLEVRTPVLEQLPVLDASFSDLGAPPRRGGVLLGPVCFMG

SEQ ID NO: 3220 - protein, 290 aa, Homo sapiens
MERCSRCHRLLLLLPLVLGLSAAPGWAGAPPVDVLRALRFPSLPDGVRRAKGICPADVAYRVARPAQLSAPTRQLFPGGFPKDFSLLTVVRTRPGLQAPLLTLYSAQGVRQLGLELGRPVRFLYEDQTGRPQPPSQPVFRGLSLADGKWHRVAVAVKGQSVTLIVDCKKRVTRPLPRSARPVLDTHGVIIFGARILDEEVFEGDVQELAIVPGVQAAYESCEQKELECEGGQRERPQNQQPHRAQRSPQQQPSRLHRPQNQEPQSQVRELGEPPSAAHPREGRHPGISPP

SEQ ID NO: 3221 - protein, 1650 aa, Homo sapiens
MERCSRCHRLLLLLPLVLGLSAAPGWAGAPPVDVLRALRFPSLPDGVRRAKGICPADVAYRVARPAQLSAPTRQLFPGGFPKDFSLLTVVRTRPGLQAPLLTLYSAQGVRQLGLELGRPVRFLYEDQTGRPQPPSQPVFRGLSLADGKWHRVAVAVKGQSVTLIVDCKKRVTRPLPRSARPVLDTHGVIIFGARILDEEVFEGDVQELAIVPGVQAAYESCEQKELECEGGQRERPQNQQPHRAQRSPQQQPSRLHRPQNQEPQSQDPTPGEEEEILESSLLPPLEEAAHGPRGLKGEKGEPAVLEPGMLVEGPPGPEGPAGLIGPPGIQGNPGPVGDPGERGPPGRAGLPGSDGAPGPPGTSLMLPFRFGSGGGDKGPVVAAQEAQAQAILQQARLALRGPPGPMGYTGRPGPLGQPGSPGLKGESGDLGPQGPRGPQGLTGPPGKAGRRGRAGADGARGMPGDPGVKGDRGFDGLPGLPGEKGHRGDTGAQGLPGPPGEDGERGDDGEIGPRGLPGESGPRGLLGPKGPPGIPGPPGVRGMDGPQGPKGSLGPQGEPGPPGQQGTPGTQGLPGPQGAIGPHGEKGPQGKPGLPGMPGSDGPPGHPGKEGPPGTKGNQGPSGPQGPLGYPGPRGVKGVDGIRGLKGHKGEKGEDGFPGFKGDIGVKGDRGEVGVPGSRGEDGPEGPKGRTGPTGDPGPPGLMGEKGKLGVPGLPGYPGRQGPKGSLGFPGFPGASGEKGARGLSGKSGPRGERGPTGPRGQRGPRGATGKSGAKGTSGGDGPHGPPGERGLPGPQGPNGFPGPKGPPGPPGKDGLPGHPGQRGEVGFQGKTGPPGPPGVVGPQGAAGETGPMGERGHPGPPGPPGEQGLPGTAGKEGTKGDPGPPGAPGKDGPAGLRGFPGERGLPGTAGGPGLKGNEGPSGPPGPAGSPGERGAAGSGGPIGPPGRPGPQGPPGAAGEKGVPGEKGPIGPTGRDGVQGPVGLPGPAGPPGVAGEDGDKGEVGDPGQKGTKGNKGEHGPPGPPGPIGPVGQPGAAGADGEPGARGPQGHFGAKGDEGTRGFNGPPGPIGLQGLPGPSGEKGETGDVGPMGPPGPPGPRGPAGPNGADGPQGPPGGVGNLGPPGEKGEPGESGSPGIQGEPGVKGPRGERGEKGESGQPGEPGPPGPKGPTGDDGPKGNPGPVGFPGDPGPPGEGGPRGQDGAKGDRGEDGEPGQPGSPGPTGENGPPGPLGKRGPAGSPGSEGRQGGKGAKGDPGAIGAPGKTGPVGPAGPAGKPGPDGLRGLPGSVGQQGRPGATGQAGPPGPVGPPGLPGLRGDAGAKGEKGHPGLIGLIGPPGEQGEKGDRGLPGPQGSPGQKGEMGIPGASGPIGPGGPPGLPGPAGPKGAKGATGPGGPKGEKGVQGPPGHPGPPGEVIQPLPIQMPKKTRRSVDGSRLMQEDEAIPTGGAPGSPGGLEEIFGSLDSLREEIEQMRRPTGTQDSPARTCQDLKLCHPELPDGEYWVDPNQGCARDAFRVFCNFTAGGETCVTPRDDVTQFSYVDSEGSPVGVVQLTFLRLLSVSAHQDVSYPCSGAARDGPLRLRGANEDELSPETSPYVKEFRDGCQTQQGRTVLEVRTPVLEQLPVLDASFSDLGAPPRRGGVLLGPVCFMG

SEQ ID NO: 3222 - protein, 624 aa, Homo sapiens
MERCSRCHRLLLLLPLVLGLSAAPGWAGAPPVDVLRALRFPSLPDGVRRAKGICPADVAYRVARPAQLSAPTRQLFPGGFPKDFSLLTVVRTRPGLQAPLLTLYSAQGVRQLGLELGRPVRFLYEDQTGRPQPPSQPVFRGLSLADGKWHRVAVAVKGQSVTLIVDCKKRVTRPLPRSARPVLDTHGVIIFGARILDEEVFEGDVQELAIVPGVQAAYESCEQKELECEGGQRERPQNQQPHRAQRSPQQQPSRLHRPQNQEPQSQPTESLYYDYEPPYYDVMTTGTTPDYQDPTPGEEEEILESSLLPPLEEEQTDLQVPPTADRFQAEEYGEGGTDPPEGPYDYTYGYGDDYREETELGPALSAETAHSGAAAHGPRGLKGEKGEPAVLEPGMLVEGPPGPEGPAGLIGPPGIQGNPGPVGDPGERGPPGRAGLPGSDGAPGPPGTSLMLPFRFGSGGGDKGPVVAAQEAQAQAILQQARLALRGPPGPMGYTGRPGPLGQPGSPGLKGESGDLGPQGPRGPQGLTGPPGKAGRRGRAGADGARGMPGDPGVKGDRGFDGLPGLPGEKGHRGDTGAQGLPGPPGEDGERGDDGEIGPRGLPGESGPRGLLGPKGPPGIPGPP

SEQ ID NO: 3223 - protein, 1874 aa, Homo sapiens
MECLTRAEADIVLLVDGSWSIGRANFRTVRSFISRIVEVFDIGPKRVQIALAQYSGDPRTEWQLNAHRDKKSLLQAVANLPYKGGNTLTGMALNFIRQQNFRTQAGMRPRARKIGVLITDGKSQDDVEAPSKKLKDEGVELFAIGIKNADEVELKMIATDPDDTHAYNVADFESLSRIVDDLTINLCNSVKGPGDLEAPSNLVISERTHRSFRVSWTPPSDSVDRYKVEYYPVSGGKRQEFYVSRMETSTVLKDLKPETEYVVNVYSVVEDEYSEPLKGTEKTLPVPVVSLNIYDVGPTTMHVQWQPVGGATGYILSYKPVKDTEPTRPKEVRLGPTVNDMQLTDLVPNTEYAVTVQAVLHDLTSEPVTVREVTLPLPRPQDLKLRDVTHSTMNVFWEPVPGKVRKYIVRYKTPEEDVKEVEVDRSETSTSLKDLFSQTLYTVSVSAVHDEGESPPVTAQETTRPVPAPTNLKITEVTSEGFRGTWDHGASDVSLYRITWAPFGSSDKMETILNGDENTLVFENLNPNTIYEVSITAIYPDESESDDLIGSERTLPILTTQAPKSGPRNLQVYNATSNSLTVKWDPASGRVQKYRITYQPSTGEGNEQTTTIGGRQNSVVLQKLKPDTPYTITVSSLYPDGEGGRMTGRGKTKPLNTVRNLRVYDPSTSTLNVRWDHAEGNPRQYKLFYAPAAGGPEELVPIPGNTNYAILRNLQPDTSYTVTVVPVYTEGDGGRTSDTGRTLMRGLARNVQVYNPTPNSLDVRWDPAPGPVLQYRVVYSPVDGTRPSESIVVPGNTRMVHLERLIPDTLYSVNLVALYSDGEGNPSPAQGRTLPRSGPRNLRVFGETTNSLSVAWDHADGPVQQYRIIYSPTVGDPIDEYTTVPGRRNNVILQPLQPDTPYKITVIAVYEDGDGGHLTGNGRTVGLLPPQNIHISDEWYTRFRVSWDPSPSPVLGYKIVYKPVGSNEPMEAFVGEMTSYTLHNLNPSTTYDVNVYAQYDSGLSVPLTDQGTTLYLNVTDLKTYQIGWDTFCVKWSPHRAATSYRLKLSPADGTRGQEITVRGSETSHCFTGLSPDTDYGVTVFVQTPNLEGPGVSVKEHTTVKPTEAPTEPPTPPPPPTIPPARDVCKGAKADIVFLTDASWSIGDDNFNKVVKFIFNTVGGFDEISPAGIQVSFVQYSDEVKSEFKLNTYNDKALALGALQNIRYRGGNTRTGKALTFIKEKVLTWESGMRKNVPKVLVVVTDGRSQDEVKKAALVIQHSRFSVFVVGVADVDYNELANIASKPSERHVFIVDDFESFEKIEDNLITFVCETATSSCPLIYLDGYTSPGFKMLEAYNLTEKNFASVQGVSLESGSFPSYSAYRIQKNAFVNQPTADLHPNGLPPSYTIILLFRLLPETPSDPFAIWQITDRDYKPQVGVIADPSSKTLSFFNKDTRGEVQTVTFDTEEVKTLFYGSFHKVHIVVTSKSVKIYIDCYEIIEKDIKEAGNITTDGYEILGKLLKGERKSAAFQIQSFDIVCSPVWTSRDRCCDIPSRRDEGKCPAFPNSCTCTQDSVGPPGPPGPAGGPGAKGPRGERGISGAIGPPGPRGDIGPPGPQGPPGPQGPNGLSIPGEQGRQGMKGDAGEPGLPGRTGTPGLPGPPGPMGPPGDRGFTGKDGAMGPRGPPGPPGSPGSPGVTGPSGKPGKPGDHGRPGPSGLKGEKGDRGDIASQNMMRAVARQVCEQLISGQMNRFNQMLNQIPNDYQSSRNQPGPPGPPGPPGSAGARGEPGPGGRPGFPGTPGMQGPPGERGLPGEKGERGTGSSGPRGLPGPPGPQGESRTGPPGSTGSRGPPGPPGRPGNSGIRGPPGPPGYCDSSQCASIPYNGQGYPGSG

SEQ ID NO: 3224 - protein, 1899 aa, Homo sapiens
MRSRLPPALAALGAALLLSSIEAEGMECLTRAEADIVLLVDGSWSIGRANFRTVRSFISRIVEVFDIGPKRVQIALAQYSGDPRTEWQLNAHRDKKSLLQAVANLPYKGGNTLTGMALNFIRQQNFRTQAGMRPRARKIGVLITDGKSQDDVEAPSKKLKDEGVELFAIGIKNADEVELKMIATDPDDTHAYNVADFESLSRIVDDLTINLCNSVKGPGDLEAPSNLVISERTHRSFRVSWTPPSDSVDRYKVEYYPVSGGKRQEFYVSRMETSTVLKDLKPETEYVVNVYSVVEDEYSEPLKGTEKTLPVPVVSLNIYDVGPTTMHVQWQPVGGATGYILSYKPVKDTEPTRPKEVRLGPTVNDMQLTDLVPNTEYAVTVQAVLHDLTSEPVTVREVTLPLPRPQDLKLRDVTHSTMNVFWEPVPGKVRKYIVRYKTPEEDVKEVEVDRSETSTSLKDLFSQTLYTVSVSAVHDEGESPPVTAQETTRPVPAPTNLKITEVTSEGFRGTWDHGASDVSLYRITWAPFGSSDKMETILNGDENTLVFENLNPNTIYEVSITAIYPDESESDDLIGSERTLPILTTQAPKSGPRNLQVYNATSNSLTVKWDPASGRVQKYRITYQPSTGEGNEQTTTIGGRQNSVVLQKLKPDTPYTITVSSLYPDGEGGRMTGRGKTKPLNTVRNLRVYDPSTSTLNVRWDHAEGNPRQYKLFYAPAAGGPEELVPIPGNTNYAILRNLQPDTSYTVTVVPVYTEGDGGRTSDTGRTLMRGLARNVQVYNPTPNSLDVRWDPAPGPVLQYRVVYSPVDGTRPSESIVVPGNTRMVHLERLIPDTLYSVNLVALYSDGEGNPSPAQGRTLPRSGPRNLRVFGETTNSLSVAWDHADGPVQQYRIIYSPTVGDPIDEYTTVPGRRNNVILQPLQPDTPYKITVIAVYEDGDGGHLTGNGRTVGLLPPQNIHISDEWYTRFRVSWDPSPSPVLGYKIVYKPVGSNEPMEAFVGEMTSYTLHNLNPSTTYDVNVYAQYDSGLSVPLTDQGTTLYLNVTDLKTYQIGWDTFCVKWSPHRAATSYRLKLSPADGTRGQEITVRGSETSHCFTGLSPDTDYGVTVFVQTPNLEGPGVSVKEHTTVKPTEAPTEPPTPPPPPTIPPARDVCKGAKADIVFLTDASWSIGDDNFNKVVKFIFNTVGGFDEISPAGIQVSFVQYSDEVKSEFKLNTYNDKALALGALQNIRYRGGNTRTGKALTFIKEKVLTWESGMRKNVPKVLVVVTDGRSQDEVKKAALVIQQSGFSVFVVGVADVDYNELANIASKPSERHVFIVDDFESFEKIEDNLITFVCETATSSCPLIYLDGYTSPGFKMLEAYNLTEKNFASVQGVSLESGSFPSYSAYRIQKNAFVNQPTADLHPNGLPPSYTIILLFRLLPETPSDPFAIWQITDRDYKPQVGVIADPSSKTLSFFNKDTRGEVQTVTFDTEEVKTLFYGSFHKVHIVVTSKSVKIYIDCYEIIEKDIKEAGNITTDGYEILGKLLKGERKSAAFQIQSFDIVCSPVWTSRDRCCDIPSRRDEGKCPAFPNSCTCTQDSVGPPGPPGPAGGPGAKGPRGERGISGAIGPPGPRGDIGPPGPQGPPGPQGPNGLSIPGEQGRQGMKGDAGEPGLPGRTGTPGLPGPPGPMGPPGDRGFTGKDGAMGPRGPPGPPGSPGSPGVTGPSGKPGKPGDHGRPGPSGLKGEKGDRGDIASQNMMRAVARQVCEQLISGQMNRFNQMLNQIPNDYQSSRNQPGPPGPPGPPGSAGARGEPGPGGRPGFPGTPGMQGPPGERGLPGEKGERGTGSSGPRGLPGPPGPQGESRTGPPGSTGSRGPPGPPGRPGNSGIRGPPGPPGYCDSSQCASIPYNGQGYPGSG

SEQ ID NO: 3225 - protein, 3063 aa, Homo sapiens
MRSRLPPALAALGAALLLSSIEAEVDPPSDLNFKIIDENTVHMSWAKPVDPIVGYRITVDPTTDGPTKEFTLSASTTETLLSELVPETEYVVTITSYDEVEESVPVIGQLTIQTGSSTKPVEKKPGKTEIQKCSVSAWTDLVFLVDGSWSVGRNNFKYILDFIAALVSAFDIGEEKTRVGVVQYSSDTRTEFNLNQYYQRDELLAAIKKIPYKGGNTMTGDAIDYLVKNTFTESAGARVGFPKVAIIITDGKSQDEVEIPARELRNVGVEVFSLGIKAADAKELKQIASTPSLNHVFNVANFDAIVDIQNEIISQVCSGVDEQLGELVSGEEVVEPPSNLIAMEVSSKYVKLNWNPSPSPVTGYKVILTPMTAGSRQHALSVGPQTTTLSVRDLSADTEYQISVSAMKGMTSSEPISIMEKTQPMKVQVECSRGVDIKADIVFLVDGSYSIGIANFVKVRAFLEVLVKSFEISPNRVQISLVQYSRDPHTEFTLKKFTKVEDIIEAINTFPYRGGSTNTGKAMTYVREKIFVPSKGSRSNVPKVMILITDGKSSDAFRDPAIKLRNSDVEIFAVGVKDAVRSELEAIASPPAETHVFTVEDFDAFQRISFELTQSICLRIEQELAAIKKKAYVPPKDLSFSEVTSYGFKTNWSPAGENVFSYHITYKEAAGDDEVTVVEPASSTSVVLSSLKPETLYLVNVTAEYEDGFSIPLAGEETTEEVKGAPRNLKVTDETTDSFKITWTQAPGRVLRYRIIYRPVAGGESREVTTPPNQRRRTLENLIPDTKYEVSVIPEYFSGPGTPLTGNAATEEVRGNPRDLRVSDPTTSTMKLSWSGAPGKVKQYLVTYTPVAGGETQEVTVRGDTTNTVLQGLKEGTQYALSVTALYASGAGDALFGEGTTLEERGSPQDLVTKDITDTSIGAYWTSAPGMVRGYRVSWKSLYDDVDTGEKNLPEDAIHTMIENLQPETKYRISVFATYSSGEGEPLTGDATTELSQDSKTLKVDEETENTMRVTWKPAPGKVVNYRVVYRPHGRGKQMVAKVPPTVTSTVLKRLQPQTTYDITVLPIYKMGEGKLRQGSGTTASRFKSPRNLKTSDPTMSSFRVTWEPAPGEVKGYKVTFHPTGDDRRLGELVVGPYDNTVVLEELRAGTTYKVNVFGMFDGGESSPLVGQEMTTLSDTTVMPILSSGMECLTRAEADIVLLVDGSWSIGRANFRTVRSFISRIVEVFDIGPKRVQIALAQYSGDPRTEWQLNAHRDKKSLLQAVANLPYKGGNTLTGMALNFIRQQNFRTQAGMRPRARKIGVLITDGKSQDDVEAPSKKLKDEGVELFAIGIKNADEVELKMIATDPDDTHAYNVADFESLSRIVDDLTINLCNSVKGPGDLEAPSNLVISERTHRSFRVSWTPPSDSVDRYKVEYYPVSGGKRQEFYVSRMETSTVLKDLKPETEYVVNVYSVVEDEYSEPLKGTEKTLPVPVVSLNIYDVGPTTMHVQWQPVGGATGYILSYKPVKDTEPTRPKEVRLGPTVNDMQLTDLVPNTEYAVTVQAVLHDLTSEPVTVREVTLPLPRPQDLKLRDVTHSTMNVFWEPVPGKVRKYIVRYKTPEEDVKEVEVDRSETSTSLKDLFSQTLYTVSVSAVHDEGESPPVTAQETTRPVPAPTNLKITEVTSEGFRGTWDHGASDVSLYRITWAPFGSSDKMETILNGDENTLVFENLNPNTIYEVSITAIYPDESESDDLIGSERTLPILTTQAPKSGPRNLQVYNATSNSLTVKWDPASGRVQKYRITYQPSTGEGNEQTTTIGGRQNSVVLQKLKPDTPYTITVSSLYPDGEGGRMTGRGKTKPLNTVRNLRVYDPSTSTLNVRWDHAEGNPRQYKLFYAPAAGGPEELVPIPGNTNYAILRNLQPDTSYTVTVVPVYTEGDGGRTSDTGRTLMRGLARNVQVYNPTPNSLDVRWDPAPGPVLQYRVVYSPVDGTRPSESIVVPGNTRMVHLERLIPDTLYSVNLVALYSDGEGNPSPAQGRTLPRSGPRNLRVFGETTNSLSVAWDHADGPVQQYRIIYSPTVGDPIDEYTTVPGRRNNVILQPLQPDTPYKITVIAVYEDGDGGHLTGNGRTVGLLPPQNIHISDEWYTRFRVSWDPSPSPVLGYKIVYKPVGSNEPMEAFVGEMTSYTLHNLNPSTTYDVNVYAQYDSGLSVPLTDQGTTLYLNVTDLKTYQIGWDTFCVKWSPHRAATSYRLKLSPADGTRGQEITVRGSETSHCFTGLSPDTDYGVTVFVQTPNLEGPGVSVKEHTTVKPTEAPTEPPTPPPPPTIPPARDVCKGAKADIVFLTDASWSIGDDNFNKVVKFIFNTVGGFDEISPAGIQVSFVQYSDEVKSEFKLNTYNDKALALGALQNIRYRGGNTRTGKALTFIKEKVLTWESGMRKNVPKVLVVVTDGRSQDEVKKAALVIQQSGFSVFVVGVADVDYNELANIASKPSERHVFIVDDFESFEKIEDNLITFVCETATSSCPLIYLDGYTSPGFKMLEAYNLTEKNFASVQGVSLESGSFPSYSAYRIQKNAFVNQPTADLHPNGLPPSYTIILLFRLLPETPSDPFAIWQITDRDYKPQVGVIADPSSKTLSFFNKDTRGEVQTVTFDTEEVKTLFYGSFHKVHIVVTSKSVKIYIDCYEIIEKDIKEAGNITTDGYEILGKLLKGERKSAAFQIQSFDIVCSPVWTSRDRCCDIPSRRDEGKCPAFPNSCTCTQDSVGPPGPPGPAGGPGAKGPRGERGISGAIGPPGPRGDIGPPGPQGPPGPQGPNGLSIPGEQGRQGMKGDAGEPGLPGRTGTPGLPGPPGPMGPPGDRGFTGKDGAMGPRGPPGPPGSPGSPGVTGPSGKPGKPGDHGRPGPSGLKGEKGDRGDIASQNMMRAVARQVCEQLISGQMNRFNQMLNQIPNDYQSSRNQPGPPGPPGPPGSAGARGEPGPGGRPGFPGTPGMQGPPGERGLPGEKGERGTGSSGPRGLPGPPGPQGESRTGPPGSTGSRGPPGPPGRPGNSGIRGPPGPPGYCDSSQCASIPYNGQGYPGSG

SEQ ID NO: 3226 - protein, 3062 aa, Homo sapiens
MRSRLPPALAALGAALLLSSIEAEVDPPSDLNFKIIDENTVHMSWAKPVDPIVGYRITVDPTTDGPTKEFTLSASTTETLLSELVPETEYVVTITSYDEVEESVPVIGQLTIQTGSSTKPVEKKPGKTEIQKCSVSAWTDLVFLVDGSWSVGRNNFKYILDFIAALVSAFDIGEEKTRVGVVQYSSDTRTEFNLNQYYQRDELLAAIKKIPYKGGNTMTGDAIDYLVKNTFTESAGARVGFPKVAIIITDGKSQDEVEIPARELRNVGVEVFSLGIKAADAKELKQIASTPSLNHVFNVANFDAIVDIQNEIISQVCSGVDEQLGELVSGEEVVEPPSNLIAMEVSSKYVKLNWNPSPSPVTGYKVILTPMTAGSRQHALSVGPQTTTLSVRDLSADTEYQISVSAMKGMTSSEPISIMEKTQPMKVQVECSRGVDIKADIVFLVDGSYSIGIANFVKVRAFLEVLVKSFEISPNRVQISLVQYSRDPHTEFTLKKFTKVEDIIEAINTFPYRGGSTNTGKAMTYVREKIFVPSKGSRSNVPKVMILITDGKSSDAFRDPAIKLRNSDVEIFAVGVKDAVRSELEAIASPPAETHVFTVEDFDAFQRISFELTQSICLRIEQELAAIKKKAYVPPKDLSFSEVTSYGFKTNWSPAGENVFSYHITYKEAAGDDEVTVVEPASSTSVVLSSLKPETLYLVNVTAEYEDGFSIPLAGEETTEEVKGAPRNLKVTDETTDSFKITWTQAPGRVLRYRIIYRPVAGGESREVTTPPNQRRRTLENLIPDTKYEVSVIPEYFSGPGTPLTGNAATEEVRGNPRDLRVSDPTTSTMKLSWSGAPGKVKQYLVTYTPVAGGETQEVTVRGDTTNTVLQGLKEGTQYALSVTALYASGAGDALFGEGTTLEERGSPQDLVTKDITDTSIGAYWTSAPGMVRGYRVSWKSLYDDVDTGEKNLPEDAIHTMIENLQPETKYRISVFATYSSGEGEPLTGDATTELSQDSKTLKVDEETENTMRVTWKPAPGKVVNYRVVYRPHGRGKQMVAKVPPTVTSTVLKRLQPQTTYDITVLPIYKMGEGKLRQGSGTTASRFKSPRNLKTSDPTMSSFRVTWEPAPGEVKGYKVTFHPTGDDRRLGELVVGPYDNTVVLEELRAGTTYKVNVFGMFDGGESSPLVGQEMTTLSDTTVMPILSSGMECLTRAEADIVLLVDGSWSIGRANFRTVRSFISRIVEVFDIGPKRVQIALAQYSGDPRTEWQLNAHRDKKSLLQAVANLPYKGGNTLTGMALNFIRQQNFRTQAGMRPRARKIGVLITDGKSQDDVEAPSKKLKDEGVELFAIGIKNADEVELKMIATDPDDTHAYNVADFESLSRIVDDLTINLCNSVKGPGDLEAPSNLVISERTHRSFRVSWTPPSDSVDRYKVEYYPVSGGKRQEFYVSRMETSTVLKDLKPETEYVVNVYSVVEDEYSEPLKGTEKTLPVPVVSLNIYDVGPTTMHVQWQPVGGATGYILSYKPVKDTEPTRPKEVRLGPTVNDMQLTDLVPNTEYAVTVQAVLHDLTSEPVTVREVTLPLPRPQDLKLRDVTHSTMNVFWEPVPGKVRKYIVRYKTPEEDVKEVEVDRSETSTSLKDLFSQTLYTVSVSAVHDEGESPPVTAQETTRPVPAPTNLKITEVTSEGFRGTWDHGASDVSLYRITWAPFGSSDKMETILNGDENTLVFENLNPNTIYEVSITAIYPDESESDDLIGSERTLPILTTQAPKSGPRNLQVYNATSNSLTVKWDPASGRVQKYRITYQPSTGEGNEQTTTIGGRQNSVVLQKLKPDTPYTITVSSLYPDGEGGRMTGRGKTKPLNTVRNLRVYDPSTSTLNVRWDHAEGNPRQYKLFYAPAAGGPEELVPIPGNTNYAILRNLQPDTSYTVTVVPVYTEGDGGRTSDTGRTLMRGLARNVQVYNPTPNSLDVRWDPAPGPVLQYRVVYSPVDGTRPSESIVVPGNTRMVHLERLIPDTLYSVNLVALYSDGEGNPSPAQGRTLPRSGPRNLRVFGETTNSLSVAWDHADGPVQQYRIIYSPTVGDPIDEYTTVPGRRNNVILQPLQPDTPYKITVIAVYEDGDGGHLTGNGRTVGLLPPQNIHISDEWYTRFRVSWDPSPSPVLGYKIVYKPVGSNEPMEAFVGEMTSYTLHNLNPSTTYDVNVYAQYDSGLSVPLTDQGTTLYLNVTDLKTYQIGWDTFCVKWSPHRAATSYRLKLSPADGTRGQEITVRGSETSHCFTGLSPDTDYGVTVFVQTPNLEGPGVSVKEHTTVKPTEAPTEPPTPPPPPTIPPARDVCKGAKADIVFLTDASWSIGDDNFNKVVKFIFNTVGGFDEISPAGIQVSFVQYSDEVKSEFKLNTYNDKALALGALQNIRYRGGNTRTGKALTFIKEKVLTWESGMRKNVPKVLVVVTDGRSQDEVKKAALVIQQSGFSVFVVGVADVDYNELANIASKPSERHVFIVDDFESFEKIEDNLITFVCETATSSCPLIYLDGYTSPGFKMLEAYNLTEKNFASVQGVSLESGSFPSYSAYRIQKNAFVNQPTADLHPNGLPPSYTIILLFRLLPETPSDPFAIWQITDRDYKPQVGVIADPSSKTLSFFNKDTRGEVQTVTFDTEEVKTLFYGSFHKVHIVVTSKSVKIYIDCYEIIEKDIKEAGNITTDGYEILGKLLKGERKSAAFQIQSFDIVCSPVWTSRDRCCDIPSRRDEGKCPAFPNSCTCTQDSVGPPGPPGPAGGPGAKGPRGERGISGAIGPPGPRGDIGPPGPQGPPGPQGPNGLSIPGEQGRQGMKGDAGEPGLPGRTGTPGLPGPPGPMGPPGDRGFTGKDGAMGPRGPPGPGSPGVTGPSGKPGKPGDHGRPGPSGLKGEKGDRGDIASQNMMRAVARQVCEQLISGQMNRFNQMLNQIPNDYQSSRNQPGPPGPPGPPGSAGARGEPGPGGRPGFPGTPGMQGPPGERGLPGEKGERGTGSSGPRGLPGPPGPQGESRTGPPGSTGSRGPPGPPGRPGNSGIRGPPGPPGYCDSSQCASIPYNGQGYPGTLLPL

SEQ ID NO: 3227 - protein, 2987 aa, Homo sapiens
MRSRLPPALAALGAALLLSSIEAEVDPPSDLNFKIIDENTVHMSWAKPVDPIVGYRITVDPTTDGPTKEFTLSASTTETLLSELVPETEYVVTITSYDEVEESVPVIGQLTIQTGSSTKPVEKKPGKTEIQKCSVSAWTDLVFLVDGSWSVGRNNFKYILDFIAALVSAFDIGEEKTRVGVVQYSSDTRTEFNLNQYYQRDELLAAIKKIPYKGGNTMTGDAIDYLVKNTFTESAGARVGFPKVAIIITDGKSQDEVEIPARELRNVGVEVFSLGIKAADAKELKQIASTPSLNHVFNVANFDAIVDIQNEIISQVCSGVDEQLGELVSGEEVVEPPSNLIAMEVSSKYVKLNWNPSPSPVTGYKVILTPMTAGSRQHALSVGPQTTTLSVRDLSADTEYQISVSAMKGMTSSEPISIMEKTQPMKVQVECSRGVDIKADIVFLVDGSYSIGIANFVKVRAFLEVLVKSFEISPNRVQISLVQYSRDPHTEFTLKKFTKVEDIIEAINTFPYRGGSTNTGKAMTYVREKIFVPSKGSRSNVPKVMILITDGKSSDAFRDPAIKLRNSDVEIFAVGVKDAVRSELEAIASPPAETHVFTVEDFDAFQRISFELTQSICLRIEQELAAIKKKAYVPPKDLSFSEVTSYGFKTNWSPAGENVFSYHITYKEAAGDDEVTVVEPASSTSVVLSSLKPETLYLVNVTAEYEDGFSIPLAGEETTEEVKGAPRNLKVTDETTDSFKITWTQAPGRVLRYRIIYRPVAGGESREVTTPPNQRRRTLENLIPDTKYEVSVIPEYFSGPGTPLTGNAATEEVRGNPRDLRVSDPTTSTMKLSWSGAPGKVKQYLVTYTPVAGGETQEVTVRGDTTNTVLQGLKEGTQYALSVTALYASGAGDALFGEGTTLEERGSPQDLVTKDITDTSIGAYWTSAPGMVRGYRVSWKSLYDDVDTGEKNLPEDAIHTMIENLQPETKYRISVFATYSSGEGEPLTGDATTELSQDSKTLKVDEETENTMRVTWKPAPGKVVNYRVVYRPHGRGKQMVAKVPPTVTSTVLKRLQPQTTYDITVLPIYKMGEGKLRQGSGTTASRFKSPRNLKTSDPTMSSFRVTWEPAPGEVKGYKVTFHPTGDDRRLGELVVGPYDNTVVLEELRAGTTYKVNVFGMFDGGESSPLVGQEMTTLSDTTVMPILSSGMECLTRAEADIVLLVDGSWSIGRANFRTVRSFISRIVEVFDIGPKRVQIALAQYSGDPRTEWQLNAHRDKKSLLQAVANLPYKGGNTLTGMALNFIRQQNFRTQAGMRPRARKIGVLITDGKSQDDVEAPSKKLKDEGVELFAIGIKNADEVELKMIATDPDDTHAYNVADFESLSRIVDDLTINLCNSVKGPGDLEAPSNLVISERTHRSFRVSWTPPSDSVDRYKVEYYPVSGGKRQEFYVSRMETSTVLKDLKPETEYVVNVYSVVEDEYSEPLKGTEKTLPVPVVSLNIYDVGPTTMHVQWQPVGGATGYILSYKPVKDTEPTRPKEVRLGPTVNDMQLTDLVPNTEYAVTVQAVLHDLTSEPVTVREVTLPLPRPQDLKLRDVTHSTMNVFWEPVPGKVRKYIVRYKTPEEDVKEVEVDRSETSTSLKDLFSQTLYTVSVSAVHDEGESPPVTAQETTRPVPAPTNLKITEVTSEGFRGTWDHGASDVSLYRITWAPFGSSDKMETILNGDENTLVFENLNPNTIYEVSITAIYPDESESDDLIGSERTLPILTTQAPKSGPRNLQVYNATSNSLTVKWDPASGRVQKYRITYQPSTGEGNEQTTTIGGRQNSVVLQKLKPDTPYTITVSSLYPDGEGGRMTGRGKTKPLNTVRNLRVYDPSTSTLNVRWDHAEGNPRQYKLFYAPAAGGPEELVPIPGNTNYAILRNLQPDTSYTVTVVPVYTEGDGGRTSDTGRTLMRGLARNVQVYNPTPNSLDVRWDPAPGPVLQYRVVYSPVDGTRPSESIVVPGNTRMVHLERLIPDTLYSVNLVALYSDGEGNPSPAQGRTLPRSGPRNLRVFGETTNSLSVAWDHADGPVQQYRIIYSPTVGDPIDEYTTVPGRRNNVILQPLQPDTPYKITVIAVYEDGDGGHLTGNGRTVGLLPPQNIHISDEWYTRFRVSWDPSPSPVLGYKIVYKPVGSNEPMEAFVGEMTSYTLHNLNPSTTYDVNVYAQYDSGLSVPLTDQGTTLYLNVTDLKTYQIGWDTFCVKWSPHRAATSYRLKLSPADGTRGQEITVRGSETSHCFTGLSPDTDYGVTVFVQTPNLEGPGVSVKEHTTVKPTEAPTEPPTPPPPPTIPPARDVCKGAKADIVFLTDASWSIGDDNFNKVVKFIFNTVGGFDEISPAGIQVSFVQYSDEVKSEFKLNTYNDKALALGALQNIRYRGGNTRTGKALTFIKEKVLTWESGMRKNVPKVLVVVTDGRSQDEVKKAALVIQQSGFSVFVVGVADVDYNELANIASKPSERHVFIVDDFESFEKIEDNLITFVCETATSSCPLIYLDGYTSPGFKMLEAYNLTEKNFASVQGVSLESGSFPSYSAYRIQKNAFVNQPTADLHPNGLPPSYTIILLFRLLPETPSDPFAIWQITDRDYKPQVGVIADPSSKTLSFFNKDTRGEVQTVTFDTEEVKTLFYGSFHKRDEGKCPAFPNSCTCTQDSVGPPGPPGPAGGPGAKGPRGERGISGAIGPPGPRGDIGPPGPQGPPGPQGPNGLSIPGEQGRQGMKGDAGEPGLPGRTGTPGLPGPPGPMGPPGDRGFTGKDGAMGPRGPPGPPGSPGSPGVTGPSGKPGKPGDHGRPGPSGLKGEKGDRGDIASQNMMRAVARQVCEQLISGQMNRFNQMLNQIPNDYQSSRNQPGPPGPPGPPGSAGARGEPGPGGRPGFPGTPGMQGPPGERGLPGEKGERGTGSSGPRGLPGPPGPQGESRTGPPGSTGSRGPPGPPGRPGNSGIRGPPGPPGYCDSSQCASIPYNGQGYPGSG

SEQ ID NO: 3228 - protein, 207 aa, Homo sapiens
VIQQSGFSVFVVGVADVDYNELANIASKPSERHVFIVDDFESFEKIEDNLITFVCETATSSCPLIYLDGYTSPGFKMLEAYNLTEKNFASVQGVSLESGSFPSYSAYRIQKNAFVNQPTADLHPNGLPPSYTIILLFRLLPETPSDPFAIWQITDRDYKPQVGVIADPSSKTLSFFNKDTRGEVQTVTFDTEEVKTLFYGSFHKVKT

SEQ ID NO: 3229 - protein, 756 aa, Homo sapiens
VSFVQYSDEVKSEFKLNTYNDKALALGALQNIRYRGGNTRTGKALTFIKEKVLTWESGMRKNVPKVLVVVTDGRSQDEVKKAALVIQQSGFSVFVVGVADVDYNELANIASKPSERHVFIVDDFESFEKIEDNLITFVCETATSSCPLIYLDGYTSPGFKMLEAYNLTEKNFASVQGVSLESGSFPSYSAYRIQKNAFVNQPTADLHPNGLPPSYTIILLFRLLPETPSDPFAIWQITDRDYKPQVGVIADPSSKTLSFFNKDTRGEVQTVTFDTEEVKTLFYGSFHKVHIVVTSKSVKIYIDCYEIIEKDIKEAGNITTDGYEILGKLLKGERKSAAFQIQSFDIVCSPVWTSRDRCCDIPSRRDEGKCPAFPNSCTCTQDSVGPPGPPGPAGGPGAKGPRGERGISGAIGPPGPRGDIGPPGPQGPPGPQGPNGLSIPGEQGRQGMKGDAGEPGLPGRTGTPGLPGPPGPMGPPGDRGFTGKDGAMGPRGPPGPPGSPGSPGVTGPSGKPGKPGDHGRPGPSGLKGEKGDRGDIASQNMMRAVARQVCEQLISGQMNRFNQMLNQIPNDYQSSRNQPGPPGPPGPPGSAGARGEPGPGGRPGFPGTPGMQGPPGERGLPGEKGERGTGSSGPRGLPGPPGPQGESRTGPPGSTGSRGPPGPPGRPGNSGIRGPPGPPGYCDSSQCASIPYNGQGYPEPYVPEGGAYLPEREPFIVPVEPERTAEYEDYGADEPAEEPPEPHRRWRRALPHGPGQ

SEQ ID NO: 3230 - protein, 638 aa, Homo sapiens
  SITE 1: note = misc_feature - Xaa can be any naturally occurring amino acid
XKSLLQAVANLPYKGGNTLTGMALNFIRQQNFRTQAGMRPRARKIGVLITDGKSQDDVEAPSKKLKDEGVELFAIGIKNADEVELKMIATDPDDTHAYNVADFESLSRIVDDLTINLCNSVKGPGDLEAPSNLVISERTHRSFRVSWTPPSDSVDRYKVEYYPVSGGKRQEFYVSRMETSTVLKDLKPETEYVVNVYSVVEDEYSEPLKGTEKTLPVPVVSLNIYDVGPTTMHVQWQPVGGATGYILSYKPVKDTEPTRPKEVRLGPTVNDMQLTDLVPNTEYAVTVQAVLHDLTSEPVTVREVTLPLPRPQDLKLRDVTHSTMNVFWEPVPGKVRKYIVRYKTPEEDVKEVEVDRSETSTSLKDLFSQTLYTVSVSAVHDEGESPPVTAQETTRPVPAPTNLKITEVTSEGFRGTWDHGASDVSLYRITWAPFGSSDKMETILNGDENTLVFENLNPNTIYEVSITAIYPDESESDDLIGSERTPPKSGPRNLQVYNATSNSLTVKWDPASGRVQKYRITYQPSTGEGNEQTTTIGGRQNSVVLQKLKPDTPYTITVSSLYPDGEGGRMTGRGKTKPLNTVRNLRVYDPSTSTLNVRWDHAEGNPRQYKLFYAPAAGGPEELVPIPGNTNYAILRNL

SEQ ID NO: 3231 - protein, 843 aa, Homo sapiens
FDVGSEKTRIGLAQYSGDPRIEWHLNAFSTKDEVIEAVRNLPYKGGNTLTGLALNYIFENSFKPEAGSRTGVSKIGILITDGKSQDDIIPPSRNLRESGVELFAIGVKNADVNELQEIASEPDSTHVYNVAEFDLMHTVVESLTRTLCSRVEEQDREIKASAHAITGPPTELITSEVTARSFMVNWTHAPGNVEKYRVVYYPTRGGKPDEVVVDGTVSSTVLKNLMSLTEYQIAVFAIYAHTASEGLRGTETTLALPMASDLLLYDVTENSMRVKWDAVPGASGYLILYAPLTEGLAGDEKEMKIGETHTDIELSGLLPNTEYTVTVYAMFGEEASDPVTGQETTLALSPPRNLRISNVGSNSARLTWDPTSRQINGYRIVYNNADGTEINEVEVDPITTFPLKGLTPLTEYTIAIFSIYDEGQSEPLTGVFTTEEVPAQQYLEIDEVTTDSFRVTWHPLSADEGLHKLMWIPVYGGKTEEVVLKEEQDSHVIEGLEPGTEYEVSLLAVLDDGSESEVVTAVGTTLDSFWTEPATTIVPTTSVTSVFQTGIRNLVVGDETTSSLRVKWDISDSDVQQFRVTYMTAQGDPEEEVIGTVMVPGSQNNLLLKPLLPDTEYKVTVTPIYTDGEGVSVSAPGKTLPSSGPQNLRVSEEWYNRLRITWDPPSSPVKGYRIVYKPVSVPGPTLETFVGADINTILITNLLSGMDYNVKIFASQASGFSDALTGMVKTLFLGVTNLQAKHVEMTSLCAHWQVHRHATAYRVVIESLQDRQKQESTVGGGTTRHCFYGLQPDSEYKISVYTKLQEIEGPSVSIMEKTQSLPTRPPTFPPTIPPAKEGKRIIE

SEQ ID NO: 3232 - protein, 149 aa, Homo sapiens
GPPGEPGRPGSPGAPGEQGPPGTPGFPGNAGVPGTPGERGLTGIKGEKGNPGVGTQGPRGPPGPAGPSGESRPGSPGPPGSPGPRGPPGHLGVPGPQGPSGQPGYCDPSSCSAYGVRGWMGIFLLDHPTLPSSPDHLPSLLFPGDGLLT

SEQ ID NO: 3233 - protein, 757 aa, Homo sapiens [sequence omitted]

SEQ ID NO: 3234 - protein, 1796 aa, Homo sapiens
MKIFQRKMRYWLLPPFLAIVYFCTIVQGQVAPPTRLRYNVISHDSIQISWKAPRGKFGGYKLLVTPTSGGKTNQLNLQNTATKAIIQGLMPDQNYTVQIIAYNKDKESKPAQGQFRIKDLEKRKDPKPRVKVVDRGNGSRPSSPEEVKFVCQTPAIADIVILVDGSWSIGRFNFRLVRHFLENLVTAFDVGSEKTRIGLAQYSGDPRIEWHLNAFSTKDEVIEAVRNLPYKGGNTLTGLALNYIFENSFKPEAGSRTGVSKIGILITDGKSQDDIIPPSRNLRESGVELFAIGVKNADVNELQEIASEPDSTHVYNVAEFDLMHTVVESLTRTLCSRVEEQDREIKASAHAITGPPTELITSEVTARSFMVNWTHAPGNVEKYRVVYYPTRGGKPDEVVVDGTVSSTVLKNLMSLTEYQIAVFAIYAHTASEGLRGTETTLALPMASDLLLYDVTENSMRVKWDAVPGASGYLILYAPLTEGLAGDEKEMKIGETHTDIELSGLLPNTEYTVTVYAMFGEEASDPVTGQETTLALSPPRNLRISNVGSNSARLTWDPTSRQINGYRIVYNNADGTEINEVEVDPITTFPLKGLTPLTEYTIAIFSIYDEGQSEPLTGVFTTEEVPAQQYLEIDEVTTDSFRVTWHPLSADEGLHKLMWIPVYGGKTEEVVLKEEQDSHVIEGLEPGTEYEVSLLAVLDDGSESEVVTAVGTTLDSFWTEPATTIVPTTSVTSVFQTGIRNLVVGDETTSSLRVKWDISDSDVQQFRVTYMTAQGDPEEEVIGTVMVPGSQNNLLLKPLLPDTEYKVTVTPIYTDGEGVSVSAPGKTLPSSGPQNLRVSEEWYNRLRITWDPPSSPVKGYRIVYKPVSVPGPTLETFVGADINTILITNLLSGMDYNVKIFASQASGFSDALTGMVKTLFLGVTNLQAKHVEMTSLCAHWQVHRHATAYRVVIESLQDRQKQESTVGGGTTRHCFYGLQPDSEYKISVYTKLQEIEGPSVSIMEKTQSLPTRPPTFPPTIPPAKEVCKAAKADLVFMVDGSWSIGDENFNKIISFLYSTVGALNKIGTDGTQVAMVQFTDDPRTEFKLNAYKTKETLLDAIKHISYKGGNTKTGKAIKYVRDTLFTAESGTRRGIPKVIVVITDGRSQDDVNKISREMQLDGYSIFAIGVADADYSELVSIGSKPSARHVFFVDDFDAFKKIEDELITFVCETASATCPVVHKDGIDLAGFKMMEMFGLVEKDFSSVEGVSMEPGTFNVFPCYQLHKDALVSQPTRYLHPEGLPSDYTISFLFRILPDTPQEPFALWEILNKNSDPLVGVILDNGGKTLTYFNYDQSGDFQTVTFEGPEIRKIFYGSFHKLHIVVSETLVKVVIDCKQVGEKAMNASANITSDGVEVLGKMVRSRGPGGNSAPFQLQMFDIVCSTSWANTDKCCELPGLRDDESCPDLPHSCSCSETNEVALGPAGPPGGPGLRGPKGQQGEPGPKGPDGPRGEIGLPGPQGPPGPQGPSGLSIQGMPGMPGEKGEKGDTGLPGPQGIPGGVGSPGRDGSPGQRGLPGKDGSSGPPGPPGPIGIPGTPGVPGITGSMGPQGALGPPGVPGAKGERGERGDLQSQAMVRSVARQVCEQLIQSHMARYTAILNQIPSHSSSIRTVQGPPGEPGRPGSPGAPGEQGPPGTPGFPGNAGVPGTPGERGLTGIKGEKGNPGVGTQGPRGPPGPAGPSGESRPGSPGPPGSPGPRGPPGHLGVPGPQGPSGQPGYCDPSSCSAYGVRAPHPDQPEFTPVQDELEAMELWGPGV

SEQ ID NO: 3235 - protein, 1780 aa, Homo sapiens
MKIFQRKMRYWLLPPFLAIVYFCTIVQGQVAPPTRLRYNVISHDSIQISWKAPRGKFGGYKLLVTPTSGGKTNQLNLQNTATKAIIQGLMPDQNYTVQIIAYNKDKESKPAQGQFRIKDLEKRKDPKPRVKVVDRGNGSRPSSPEEVKFVCQTPAIADIVILVDGSWSIGRFNFRLVRHFLENLVTAFDVGSEKTRIGLAQYSGDPRIEWHLNAFSTKDEVIEAVRNLPYKGGNTLTGLALNYIFENSFKPEAGSRTGVSKIGILITDGKSQDDIIPPSRNLRESGVELFAIGVKNADVNELQEIASEPDSTHVYNVAEFDLMHTVVESLTRTLCSRVEEQDREIKASAHAITGPPTELITSEVTARSFMVNWTHAPGNVEKYRVVYYPTRGGKPDEVVVDGTVSSTVLKNLMSLTEYQIAVFAIYAHTASEGLRGTETTLALPMASDLLLYDVTENSMRVKWDAVPGASGYLILYAPLTEGLAGDEKEMKIGETHTDIELSGLLPNTEYTVTVYAMFGEEASDPVTGQETTLALSPPRNLRISNVGSNSARLTWDPTSRQINGYRIVYNNADGTEINEVEVDPITTFPLKGLTPLTEYTIAIFSIYDEGQSEPLTGVFTTEEVPAQQYLEIDEVTTDSFRVTWHPLSADEGLHKLMWIPVYGGKTEEVVLKEEQDSHVIEGLEPGTEYEVSLLAVLDDGSESEVVTAVGTTLDSFWTEPATTIVPTTSVTSVFQTGIRNLVVGDETTSSLRVKWDISDSDVQQFRVTYMTAQGDPEEEVIGTVMVPGSQNNLLLKPLLPDTEYKVTVTPIYTDGEGVSVSAPGKTLPSSGPQNLRVSEEWYNRLRITWDPPSSPVKGYRIVYKPVSVPGPTLETFVGADINTILITNLLSGMDYNVKIFASQASGFSDALTGMVKTLFLGVTNLQAKHVEMTSLCAHWQVHRHATAYRVVIESLQDRQKQESTVGGGTTRHCFYGLQPDSEYKISVYTKLQEIEGPSVSIMEKTQSLPTRPPTFPPTIPPAKEVCKAAKADLVFMVDGSWSIGDENFNKIISFLYSTVGALNKIGTDGTQVAMVQFTDDPRTEFKLNAYKTKETLLDAIKHISYKGGNTKTGKAIKYVRDTLFTAESGTRRGIPKVIVVITDGRSQDDVNKISREMQLDGYSIFAIGVADADYSELVSIGSKPSARHVFFVDDFDAFKKIEDELITFVCETASATCPVVHKDGIDLAGFKMMEMFGLVEKDFSSVEGVSMEPGTFNVFPCYQLHKDALVSQPTRYLHPEGLPSDYTISFLFRILPDTPQEPFALWEILNKNSDPLVGVILDNGGKTLTYFNYDQSGDFQTVTFEGPEIRKIFYGSFHKLHIVVSETLVKVVIDCKQVGEKAMNASANITSDGVEVLGKMVRSRGPGGNSAPFQLQMFDIVCSTSWANTDKCCELPGLRDDESCPDLPHSCSCSETNEVALGPAGPPGGPGLRGPKGQQGEPGPKGPDGPRGEIGLPGPQGPPGPQGPSGLSIQGMPGMPGEKGEKGDTGLPGPQGIPGGVGSPGRDGSPGQRGLPGKDGSSGPPGPPGPIGIPGTPGVPGITGSMGPQGALGPPGVPGAKGERGERGDLQSQAMVRSVARQVCEQLIQSHMARYTAILNQIPSHSSSIRTVQGPPGEPGRPGSPGAPGEQGPPGTPGFPGNAGVPGTPGERGLTGIKGEKGNPGVGTQGPRGPPGPAGPSGESRPGSPGPPGSPGPRGPPGHLGVPGPQGPSGQPGYCDPSSCSAYGVRDLIPYNDYQH

SEQ ID NO: 3236 - protein, 534 aa, Homo sapiens
MKIFQRKMRYWLLPPFLAIVYFCTIVQGQVAPPTRLRYNVISHDSIQISWKAPRGKFGGYKLLVTPTSGGKTNQLNLQNTATKAIIQGLMPDQNYTVQIIAYNKDKESKPAQGQFRIKDLEKRKDPKPRVKVVDRGNGSRPSSPEEVKFVCQTPAIADIVILVDGSWSIGRFNFRLVRHFLENLVTAFDVGSEKTRIGLAQYSGDPRIEWHLNAFSTKDEVIEAVRNLPYKGGNTLTGLALNYIFENSFKPEAGSRTGVSKIGILITDGKSQDDIIPPSRNLRESGVELFAIGVKNADVNELQEIASEPDSTHVYNVAEFDLMHTVVESLTRTLCSRVEEQDREIKASAHAITGPPTELITSEVTARSFMVNWTHAPGNVEKYRVVYYPTRGGKPDEVVVDGTVSSTVLKNLMSLTEYQIAVFAIYAHTASEGLRGTETTLALPMASDLLLYDVTENSMRVKWDAVPGASGYLILYAPLTEGLAGDEKEMKIGETHTDIELSGLLPNTEYTVTVYAMFGEEASDPVTGQETTSP

SEQ ID NO: 3237 - protein, 534 aa, Homo sapiens; identical to SEQ ID NO: 3236

SEQ ID NO: 3238 - protein, 337 aa, Homo sapiens
  SITE 1: note = misc_feature - Xaa can be any naturally occurring amino acid
XVCQTPAIADIVILVDGSWSIGRFNFRLVRHFLENLVTAFDVGSEKTRIGVKNADVNELQEIASEPDSTHVYNVAEFDLMHTVVESLTRTLCSRVEEQDREIKASAHAITGPPTELITSEVTARSFMVNWTHAPGNVEKYRVVYYPTRGGKPDEVVVDGTVSSTVLKNLMSLTEYQIAVFAIYAHTASEGLRGTETTLALPMASDLLLYDVTENSMRVKWDAVPGASGYLILYAPLTEGLAGDEKEMKIGETHTDIELSGLLPNTEYTVTVYAMFGEEASDPVTGQETTLALSPPRNLRISNVGSNSARLTWDPTSRQINGYRIVYNNADGTEINEV

SEQ ID NO: 3239 - protein, 1388 aa, Homo sapiens
MAPRRNNGQCWCLLMLLSVSTPLPAVTQTRGATETASQGHLDLTQLIGVPLPSSVSFVTGYGGFPAYSFGPGANVGRPARTLIPSTFFRDFAISVVVKPSSTRGGVLFAITDAFQKVIYLGLRLSGVEDGHQRIILYYTEPGSHVSQEAAAFSVPVMTHRWNRFAMIVQGEEVTLLVNCEEHSRIPFQRSSQALAFESSAGIFMGNAGATGLERFTGSLQQLTVHPDPRTPEELCDPEESSASGETSGLQEADGVAEILEAVTYTQASPKEAKVEPINTPPTPSSPFEDMELSGEPVPEGTLETTNMSIIQHSSPKQGSGEILNDTLEGVHSVDGDPITDSGSGAGAFLDIAEEKNLAATAAGLAEVPISTAGEAEASSVPTGGPTLSMSTENPEEGVTPGPDNEERLAATAAGEAEALASMPGEVEASGVAPGELDLSMSAQSLGEEATVGPSSEDSLTTAAAATEVSLSTFEDEEASGVPTDGLAPLTATMAPERAVTSGPGDEEDLAAATTEEPLITAGGEESGSPPPDGPPLPLPTVAPERWITPAQREHVGMKGQAGPKGEKGDAGEELPGPPEPSGPVGPTAGAEAEGSGLGWGSDVGSGSGDLVGSEQLLRGPPGPPGPPGLPGIPGKPGTDVFMGPPGSPGEDGPAGEPGPPGPEGQPGVDGATGLPGMKGEKGARGPNGSVGEKGDPGNRGLPGPPGKKGQAGPPGVMGPPGPPGPPGPPGPGCTMGLGFEDTEGSGSTQLLNEPKLSRPTAAIGLKGEKGDRGPKGERGMDGASIVGPPGPRGPPGHIKVLSNSLINITHGFMNFSDIPELVGPPGPDGLPGLPGFPGPRGPKGDTGLPGFPGLKGEQGEKGEPGAILTEDIPLERLMGKKGEPGMHGAPGPMGPKGPPGHKGEFGLPGRPGRPGLNGLKGTKGDPGVIMQGPPGLPGPPGPPGPPGAVINIKGAIFPIPVRPHCKMPVDTAHPGSPELITFHGVKGEKGSWGLPGSKGEKGDQGAQGPPGPPLDLAYLRHFLNNLKGENGDKGFKGEKGEKGDINGSFLMSGPPGLPGNPGPAGQKGETVVGPQGPPGAPGLPGPPGFGRPGDPGPPGPPGPPGPPAILGAAVALPGPPGPPGQPGLPGSRNLVTAFSNMDDMLQKAHLVIEGTFIYLRDSTEFFIRVRDGWKKLQLGELIPIPADSPPPPALSSNPHQLLPPPNPISSANYEKPALHLAALNMPFSGDIRADFQCFKQARAAGLLSTYRAFLSSHLQDLSTIVRKAERYSLPIVNLKGQVLFNNWDSIFSGHGGQFNMHIPIYSFDGRDIMTDPSWPQKVIWHGSSPHGVRLVDNYCEAWRTADTAVTGLASPLSTGKILDQKAYSCANRLIVLCIENSFMTDARK

SEQ ID NO: 3240 - protein, 1374 aa, Homo sapiens
MLLSVSTPLPAVTQTRGATETASQGHLDLTQLIGVPLPSSVSFVTGYGGFPAYSFGPGANVGRPARTLIPSTFFRDFAISVVVKPSSTRGGVLFAITDAFQKVIYLGLRLSGVEDGHQRIILYYTEPGSHVSQEAAAFSVPVMTHRWNRFAMIVQGEEVTLLVNCEEHSRIPFQRSSQALAFESSAGIFMGNAGATGLERFTGSLQQLTVHPDPRTPEELCDPEESSASGETSGLQEADGVAEILEAVTYTQASPKEAKVEPINTPPTPSSPFEDMELSGEPVPEGTLETTNMSIIQHSSPKQGKGAILNDTLEGVHSVDGDPITDSGSGAGAFLDIAEEKNLAATAAGLAEVPISTAGEAEASSVPTGGPTLSMSTENPEEGVTPGPDNEERLAATAAGEAEALASMPGEVEASGVAPGELDLSMSAQSLGEEATVGPSSEDSLTTAAAATEVSLSTFEDEEASGVPTDGLAPLTATMAPERAVTSGPGDEEDLAAATTEEPLITAGGEESGSPPPDGPPLPLPTVAPERWITPAQREHVGMKGQAGPKGEKGDAGEELPGPPEPSGPVGPTAGAEAEGSGLGWGSDVGSGSGDLVGSEQLLRGPPGPPGPPGLPGIPGKPGTDVFMGPPGSPGEDGPAGEPGPPGPEGQPGVDGATGLPGMKGEKGARGPNGSVGEKGDPGNRGLPGPPGKKGQAGPPGVMGPPGPPGPPGPPGPGCTMGLGFEDTEGSGSTQLLNEPKLSRPTAAIGLKGEKGDRGPKGERGMDGASIVGPPGPRGPPGHIKVLSNSLINITHGFMNFSDIPELVGPPGPDGLPGLPGFPGPRGPKGDTGLPGFPGLKGEQGEKGEPGAILTEDIPLERLMGKKGEPGMHGAPGPMGPKGPPGHKGEFGLPGRPGRPGLNGLKGTKGDPGVIMQGPPGLPGPPGPPGPPGAVINIKGAIFPIPVRPHCKMPVDTAHPGSPELITFHGVKGEKGSWGLPGSKGEKGDQGAQGPPGPPLDLAYLRHFLNNLKGENGDKGFKGEKGEKGDINGSFLMSGPPGLPGNPGPAGQKGETVVGPQGPPGAPGLPGPPGFGRPGDPGPPGPPGPPGPPAILGAAVALPGPPGPPGQPGLPGSRNLVTAFSNMDDMLQKAHLVIEGTFIYLRDSTEFFIRVRDGWKKLQLGELIPIPADSPPPPALSSNPHQLLPPPNPISSANYEKPALHLAALNMPFSGDIRADFQCFKQARAAGLLSTYRAFLSSHLQDLSTIVRKAERYSLPIVNLKGQVLFNNWDSIFSGHGGQFNMHIPIYSFDGRDIMTDPSWPQKVIWHGSSPHGVRLVDNYCEAWRTADTAVTGLASPLSTGKILDQKAYSCANRLIVLCIENSFMTDARK

SEQ ID NO: 3241 - protein, 235 aa, Homo sapiens
GEPGPPGRGVQGPQGEPGAPGLPGIQGLPGPRGPPGPTGEKGAQGSPGVKGATGPVGPPGASVSGPPGRDGQQGQTGLRGTPGEKGPRGEKGEPGECSCPSQGDLIFSGMPGPPGIPGPPGPPGVPGLQGVPGNNGLPGQPGLTAELGSLPIEQHLLKSICGDCVQGQRAHPGYLVEKGEKGDQGIPGVPGLDNCAQCFLSLERPRAEEARGDNSEGDPGCVGSPGLPGPPGLPG

SEQ ID NO: 3242 - protein, 224 aa, Homo sapiens
GPPGSEGLPGPPGPAGPRGERGPQGNSGEKGDQGFQGQPGFPGPPGPPGFPGKVGSPGPPGPQAEKGPAGLDGLDGKDGKPGLRGDPGPAGPPGLMGPPGFKGKTGHPGLPGPKGDCGKPGPPGSTGRPGAEGEPGAMGPQGRPGPPGHVGPPGPPGQPGPAGISAVGLKGDRGATGERGLAGLPGQPGPPGHPGPPGEPGTDGAAGKEGPPGKQGFYGPPGPK

SEQ ID NO: 3243 - protein, 308 aa, Homo sapiens
KVYTRCFCLEEPQNSEVDAQLTGRISQKAERGAKVHQETAADECPPCVHGARDSNGGKGERGLPGPPGSKGEKGARGNDCVRISPDAPLQCAEGPKGEKGESGALGPSGLPGSTGEKGQKGEKGDGGIKGVPGKPGRDGRPGEICVIGPKGQKGDPGFVGPEGLAGEPGPPGLPGPPGIGLPGTPGDPGGPPGPKGDKGSSGIPGKEGPGGKPGKPGVKGEKGDPCEVCPTLPEGFQNFVGLPGKPGPKGEPGDPVPARGDPGIQGIKGEKGEPCLSCSSVVGAQHLVSSTGASGDVGSPGFGLPGLP

SEQ ID NO: 3244 - protein, 1604 aa, Homo sapiens
MWVSWAPGLWLLGLWATFGHGANTGAQCPPSQQEGLKLEHSSSLPANVTGFNLIHRLSLMKTSAIKKIRNPKGPLILRLGAAPVTQPTRRVFPRGLPEEFALVLTLLLKKHTHQKTWYLFQVTDANGYPQISLEVNSQERSLELRAQGQDGDFVSCIFPVPQLFDLRWHKLMLSVAGRVASVHVDCSSASSQPLGPRRPMRPVGHVFLGLDAEQGKPVSFDLQQVHIYCDPELVLEEGCCEILPAGCPPETSKARRDTQSNELIEINPQSEGKVYTRCFCLEEPQNSEVDAQLTGRISQKAERGAKVHQETAADECPPCVHGARDSNVTLAPSGPKGGKGERGLPGPPGSKGEKGARGNDCVRISPDAPLQCAEGPKGEKGESGALGPSGLPGSTGEKGQKGEKGDGGIKGVPGKPGRDGRPGEICVIGPKGQKGDPGFVGPEGLAGEPGPPGLPGPPGIGLPGTPGDPGGPPGPKGDKGSSGIPGKEGPGGKPGKPGVKGEKGDPCEVCPTLPEGFQNFVGLPGKPGPKGEPGDPVPARGDPGIQGIKGEKGEPCLSCSSVVGAQHLVSSTGASGDVGSPGFGLPGLPGRAGVPGLKGEKGNFGEAGPAGSPGPPGPVGPAGIKGAKGEPCEPCPALSNLQDGDVRVVALPGPSGEKGEPGPPGFGLPGKQGKAGERGLKGQKGDAGNPGDPGTPGTTGRPGLSGEPGVQGPAGPKGEKGDGCTACPSLQGTVTDMAGRPGQPGPKGEQGPEGVGRPGKPGQPGLPGVQGPPGLKGVQGEPGPPGRGVQGPQGEPGAPGLPGIQGLPGPRGPPGPTGEKGAQGSPGVKGATGPVGPPGASVSGPPGRDGQQGQTGLRGTPGEKGPRGEKGEPGECSCPSQGDLIFSGMPGAPGLWMGSSWQPGPQGPPGIPGPPGPPGVPGLQGVPGNNGLPGQPGLTAELGSLPIEQHLLKSICGDCVQGQRAHPGYLVEKGEKGDQGIPGVPGLDNCAQCFLSLERPRAEEARGDNSEGDPGCVGSPGLPGPPGLPGQRGEEGPPGMRGSPGPPGPIGPPGFPGAVGSPGLPGLQGERGLTGLTGDKGEPGPPGQPGYPGATGPPGLPGIKGERGYTGSAGEKGEPGPPGSEGLPGPPGPAGPRGERGPQGNSGEKGDQGFQGQPGFPGPPGPPGFPGKVGSPGPPGPQAEKGSEGIRGPSGLPGSPGPPGPPGIQGPAGLDGLDGKDGKPGLRGDPGPAGPPGLMGPPGFKGKTGHPGLPGPKGDCGKPGPPGSTGRPGAEGEPGAMGPQGRPGPPGHVGPPGPPGQPGPAGISAVGLKGDRGATGERGLAGLPGQPGPPGHPGPPGEPGTDGAAGKEGPPGKQGFYGPPGPKGDPGAAGQKGQAGEKGRAGMPGGPGKSGSMGPVGPPGPAGERGHPGAPGPSGSPGLPGVPGSMGDMVNYDEIKRFIRQEIIKMFDERMAYYTSRMQFPMEMAAAPGRPGPPGKDGAPGRPGAPGSPGLPGQIGREGRQGLPGVRGLPGTKGEKGDIGIGIAGENGLPGPPGPQGPPGYGKMGATGPMGQQGIPGIPGPPGPMGQPGKAGHCNPSDCFGAMPMEQQYPPMKTMKGPFG

SEQ ID NO: 3245 - protein, 966 aa, Homo sapiens
MWVSWAPGLWLLGLWATFGHGANTGAQCPPSQQEGLKLEHSSSLPANVTGFNLIHRLSLMKTSAIKKIRNPKGPLILRLGAAPVTQPTRRVFPRGLPEEFALVLTLLLKKHTHQKTWYLFQVTDANGYPQISLEVNSQERSLELRAQGQDGDFVSCIFPVPQLFDLRWHKLMLSVAGRVASVHVDCSSASSQPLGPRRPMRPVGHVFLGLDAEQGKPVSFDLQQVHIYCDPELVLEEGCCEILPAGCPPETSKARRDTQSNELIEINPQSEGKVYTRCFCLEEPQNSEVDAQLTGRISQKAERGAKVHQETAADECPPCVHGARDSNVTLAPSGPKGGKGERGLPGPPGSKGEKGARGNDCVRISPDAPLQCAEGPKGEKGESGALGPSGLPGSTGEKGQKGEKGDGGIKGVPGKPGRDGRPGEICVIGPKGQKGDPGFVGPEGLAGEPGPPGLPGPPGIGLPGTPGDPGGPPGPKGDKGSSGIPGKEGPGGKPGKPGVKGEKGDPCEVCPTLPEGFQNFVGLPGKPGPKGEPGDPVPARGDPGIQGIKGEKGEPCLSCSSVVGAQHLVSSTGASGDVGSPGFGLPGLPGRAGVPGLKGEKGNFGEAGPAGSPGPPGPVGPAGIKGAKGEPCEPCPALSNLQDGDVRVVALPGPSGEKGEPGPPGFGLPGKQGKAGERGLKGQKGDAGNPGDPGTPGTTGRPGLSGEPGVQGPAGPKGEKGDGCTACPSLQGTVTDMAGRPGQPGPKGEQGPEGVGRPGKPGQPGLPGVQGPPGLKGVQGEPGPPGRGVQGPQGEPGAPGLPGIQGLPGPRGPPGPTGEKGAQGSPGVKGATGPVGPPGASVSGPPGRDGQQGQTGLRGTPGEKGPRGEKGEPGECSCPSQGDLIFSGMPGPPGIPGPPGPPGVPGLQVKGEKRMRSLGGRAHGSGWLLPAGPQGCCSPTPKTQTCHFSLLCLPASQGGKEGPLSL

SEQ ID NO: 3246 - protein, 687 aa, Homo sapiens
GEVGADGVPGFPGLPGREGIAGPQGPKGDRGSRGEKGDPGKDGVGQPGLPGPPGPPGPVVYVSEQDGSVLSVPGPEGRPGFAGFPGPAGPKGNLGSKGERGSPGPKGEKGEPGSIFSPDGGALGPAQKGAKGEPGFRGPPGPYGRPGYKGEIGFPGRPGRPGMNGLKGEKGEPGDASLGFGMRGMPGPPGPPGPPGPPGTPVYDSNVFAESSRPGPPGLPGNQGPPGPKGAKGEVGPPGPPGQFPFDFLQLEAEMKGEKGDRGDAGQKGERGEPGGGGFFGSSLPGPPGPPGPPGPRGYPGIPGPKGESIRGQPGPPGPQGPPGIGYEGRQGPPGPPGPPGPPSFPGPHRQTISVPGPPGPPGPPGPPGTMGASSGQVRLWATRQAMLGQVHEVPEGWLIFVAEQEELYVRVQNGFRKVQLEARTPLPRGTDNEVAALQPPVVQLHDSNPYPRREHPHPTARPWRADDILASPPRLPEPQPYPGAPHHSSYVHLRPARPTSPPAHSHRDFQPVLHLVALNSPLSGGMRGIRGADFQCFQQARAVGLAGTFRAFLSSRLQDLYSIVRRADRAAVPIVNLKDELLFPSWEALFSGSEGPLKPGARIFSFDGKDVLRHPTWPQKSVWHGSDPNGRRLTESYCETWRTEAPSATGQASSLLGGRLLGQSAASCHHAYIVLCIENSFMTASK

SEQ ID NO: 3247 - protein, 1339 aa, Homo sapiens
MAPRCPWPWPRRRRLLDVLAPLVLLLGVRAASAEPERISEEVGLLQLLGDPPPQQVTQTDDPDVGLAYVFGPDANSGQVARYHFPSLFFRDFSLLFHIRPATEGPGVLFAITDSAQAMVLLGVKLSGVQDGHQDISLLYTEPGAGQTHTAASFRLPAFVGQWTHLALSVAGGFVALYVDCEEFQRMPLARSSRGLELEPGAGLFVAQAGGADPDKFQGVIAELKVRRDPQVSPMHCLDEEGDDSDGASGDSGSGLGDARELLREETGAALKPRLPAPPPVTTPPLAGGSSTEDSRSEEVEEQTTVASLGAQTLPGSDSVSTWDGSVRTPGGRVKEGGLKGQKGEPGVPGPPGRAGPPGSPCLPGPPGLPCPVSPLGPAGPALQTVPGPQGPPGPPGRDGTPGRDGEPGDPGEDGKPGDTGPQGFPGTPGDVGPKGDKGDPGVGERGPPGPQGPPGPPGPSFRHDKLTFIDMEGSGFGGDLEALRGPRGFPGPPGPPGVPGLPGEPGRFGVNSSDVPGPAGLPGVPGREGPPGFPGLPGPPGPPGREGPPGRTGQKGSLGEAGAPGHKGSKGAPGPAGARGESGLAGAPGPAGPPGPPGPPGPPGPGLPAGFDDMEGSGGPFWSTARSADGPQGPPGLPGLKGDPGVPGLPGAKGEVGADGVPGFPGLPGREGIAGPQGPKGDRGSRGEKGDPGKDGVGQPGLPGPPGPPGPVVYVSEQDGSVLSVPGPEGRPGFAGFPGPAGPKGNLGSKGERGSPGPKGEKGEPGSIFSPDGGALGPAQKGAKGEPGFRGPPGPYGRPGYKGEIGFPGRPGRPGMNGLKGEKGEPGDASLGFGMRGMPGPPGPPGPPGPPGTPVYDSNVFAESSRPGPPGLPGNQGPPGPKGAKGEVGPPGPPGQFPFDFLQLEAEMKGEKGDRGDAGQKGERGEPGGGGFFGSSLPGPPGPPGPPGPRGYPGIPGPKGESIRGQPGPPGPQGPPGIGYEGRQGPPGPPGPPGPPSFPGPHRQTISVPGPPGPPGPPGPPGTMGASSGVRLWATRQAMLGQVHEVPEGWLIFVAEQEELYVRVQNGFRKVQLEARTPLPRGTDNEVAALQPPVVQLHDSNPYPRREHPHPTARPWRADDILASPPRLPEPQPYPGAPHHSSYVHLRPARPTSPPAHSHRDFQPVLHLVALNSPLSGGMRGIRGADFQCFQQARAVGLAGTFRAFLSSRLQDLYSIVRRADRAAVPIVNLKDELLFPSWEALFSGSEGPLKPGARIFSFDGKDVLRHPTWPQKSVWHGSDPNGRRLTESYCETWRTEAPSATGQASSLLGGRLLGQSAASCHHAYIVLCIENSFMTASK

SEQ ID NO: 3248 - protein, 1519 aa, Homo sapiens
MAPYPCGCHILLLLFCCLAAARANLLNLNWLWFNNEDTSHAATTIPEPQGPLPVQPTADTTTHVTPRNGSTEPATAPGSPEPPSELLEDGQDTPTSAESPDAPEENIAGVGAEILNVAKGIRSFVQLWNDTVPTESLARAETLVLETPVGPLALAGPSSTPQENGTTLWPSRGIPSSPGAHTTEAGTLPAPTPSPPSLGRPWAPLTGPSVPPPSSERISEEVGLLQLLGDPPPQQVTQTDDPDVGLAYVFGPDANSGQVARYHFPSLFFRDFSLLFHIRPATEGPGVLFAITDSAQAMVLLGVKLSGVQDGHQDISLLYTEPGAGQTHTAASFRLPAFVGQWTHLALSVAGGFVALYVDCEEFQRMPLARSSRGLELEPGAGLFVAQAGGADPDKFQGVIAELKVRRDPQVSPMHCLDEEGDDSDGASGDSGSGLGDARELLREETGAALKPRLPAPPPVTTPPLAGGSSTEDSRSEEVEEQTTVASLGAQTLPGSDSVSTWDGSVRTPGGRVKEGGLKGQKGEPGVPGPPGRAGPPGSPCLPGPPGLPCPVSPLGPAGPALQTVPGPQGPPGPPGRDGTPGRDGEPGDPGEDGKPGDTGPQGFPGTPGDVGPKGDKGDPGVGERGPPGPQGPPGPPGPSFRHDKLTFIDMEGSGFGGDLEALRGPRGFPGPPGPPGVPGLPGEPGRFGVNSSDVPGPAGLPGVPGREGPPGFPGLPGPPGPPGREGPPGRTGQKGSLGEAGAPGHKGSKGAPGPAGARGESGLAGAPGPAGPPGPPGPPGPPGPGLPAGFDDMEGSGGPFWSTARSADGPQGPPGLPGLKGDPGVPGLPGAKGEVGADGVPGFPGLPGREGIAGPQGPKGDRGSRGEKGDPGKDGVGQPGLPGPPGPPGPVVYVSEQDGSVLSVPGPEGRPGFAGFPGPAGPKGNLGSKGERGSPGPKGEKGEPGSIFSPDGGALGPAQKGAKGEPGFRGPPGPYGRPGYKGEIGFPGRPGRPGMNGLKGEKGEPGDASLGFGMRGMPGPPGPPGPPGPPGTPVYDSNVFAESSRPGPPGLPGNQGPPGPKGAKGEVGPPGPPGQFPFDFLQLEAEMKGEKGDRGDAGQKGERGEPGGGGFFGSSLPGPPGPPGPPGPRGYPGIPGPKGESIRGQPGPPGPQGPPGIGYEGRQGPPGPPGPPGPPSFPGPHRQTISVPGPPGPPGPPGPPGTMGASSGVRLWATRQAMLGQVHEVPEGWLIFVAEQEELYVRVQNGFRKVQLEARTPLPRGTDNEVAALQPPVVQLHDSNPYPRREHPHPTARPWRADDILASPPRLPEPQPYPGAPHHSSYVHLRPARPTSPPAHSHRDFQPVLHLVALNSPLSGGMRGIRGADFQCFQQARAVGLAGTFRAFLSSRLQDLYSIVRRADRAAVPIVNLKDELLFPSWEALFSGSEGPLKPGARIFSFDGKDVLRHPTWPQKSVWHGSDPNGRRLTESYCETWRTEAPSATGQASSLLGGRLLGQSAASCHHAYIVLCIENSFMTASK

SEQ ID NO: 3249 - protein, 1754 aa, Homo sapiens
MAPYPCGCHILLLLFCCLAAARANLLNLNWLWFNNEDTSHAATTIPEPQGPLPVQPTADTTTHVTPRNGSTEPATAPGSPEPPSELLEDGQDTPTSAESPDAPEENIAGVGAEILNVAKGIRSFVQLWNDTVPTESLARAETLVLETPVGPLALAGPSSTPQENGTTLWPSRGIPSSPGAHTTEAGTLPAPTPSPPSLGRPWAPLTGPSVPPPSSGRASLSSLLGGAPPWGSLQDPDSQGLSPAAAAPSQQLQRPDVRLRTPLLHPLVMGSLGKHAAPSAFSSGLPGALSQVAVTTLTRDSGAWVSHVANSVGPGLANNSALLGADPEAPAGRCLPLPPSLPVCGHLGISRFWLPNHLHHESGEQVRAGARAWGGLLQTHCHPFLAWFFCLLLVPPCGSVPPPAPPPCCQFCEALQDACWSRLGGGRLPVACASLPTQEDGYCVLIGPAAERISEEVGLLQLLGDPPPQQVTQTDDPDVGLAYVFGPDANSGQVARYHFPSLFFRDFSLLFHIRPATEGPGVLFAITDSAQAMVLLGVKLSGVQDGHQDISLLYTEPGAGQTHTAASFRLPAFVGQWTHLALSVAGGFVALYVDCEEFQRMPLARSSRGLELEPGAGLFVAQAGGADPDKFQGVIAELKVRRDPQVSPMHCLDEEGDDSDGASGDSGSGLGDARELLREETGAALKPRLPAPPPVTTPPLAGGSSTEDSRSEEVEEQTTVASLGAQTLPGSDSVSTWDGSVRTPGGRVKEGGLKGQKGEPGVPGPPGRAGPPGSPCLPGPPGLPCPVSPLGPAGPALQTVPGPQGPPGPPGRDGTPGRDGEPGDPGEDGKPGDTGPQGFPGTPGDVGPKGDKGDPGVGERGPPGPQGPPGPPGPSFRHDKLTFIDMEGSGFGGDLEALRGPRGFPGPPGPPGVPGLPGEPGRFGVNSSDVPGPAGLPGVPGREGPPGFPGLPGPPGPPGREGPPGRTGQKGSLGEAGAPGHKGSKGAPGPAGARGESGLAGAPGPAGPPGPPGPPGPPGPGLPAGFDDMEGSGGPFWSTARSADGPQGPPGLPGLKGDPGVPGLPGAKGEVGADGVPGFPGLPGREGIAGPQGPKGDRGSRGEKGDPGKDGVGQPGLPGPPGPPGPVVYVSEQDGSVLSVPGPEGRPGFAGFPGPAGPKGNLGSKGERGSPGPKGEKGEPGSIFSPDGGALGPAQKGAKGEPGFRGPPGPYGRPGYKGEIGFPGRPGRPGMNGLKGEKGEPGDASLGFGMRGMPGPPGPPGPPGPPGTPVYDSNVFAESSRPGPPGLPGNQGPPGPKGAKGEVGPPGPPGQFPFDFLQLEAEMKGEKGDRGDAGQKGERGEPGGGGFFGSSLPGPPGPPGPPGPRGYPGIPGPKGESIRGQPGPPGPQGPPGIGYEGRQGPPGPPGPPGPPSFPGPHRQTISVPGPPGPPGPPGPPGTMGASSGVRLWATRQAMLGQVHEVPEGWLIFVAEQEELYVRVQNGFRKVQLEARTPLPRGTDNEVAALQPPVVQLHDSNPYPRREHPHPTARPWRADDILASPPRLPEPQPYPGAPHHSSYVHLRPARPTSPPAHSHRDFQPVLHLVALNSPLSGGMRGIRGADFQCFQQARAVGLAGTFRAFLSSRLQDLYSIVRRADRAAVPIVNLKDELLFPSWEALFSGSEGPLKPGARIFSFDGKDVLRHPTWPQKSVWHGSDPNGRRLTESYCETWRTEAPSATGQASSLLGGRLLGQSAASCHHAYIVLCIENSFMTASK

SEQ ID NO: 3250 - protein, 280 aa, Homo sapiens
  SITE 1: note = misc_feature - Xaa can be any naturally occurring amino acid
XISVPGPPGPPGPPGPPGTMGASSGVRLWATRQAMLGQVHEVPEGWLIFVAEQEELYVRVQNGFRKVQDNEVAALQPPVVQLHDSNPYPRREHPHPTARPWRADDILASPPRLPEPQPYPGAPHHSSYVHLRPARPTSPPAHSHRDFQPVLHLVALNSPLSGGMRGIRGADFQCFQQARAVGLAGTFRAFLSSRLQDLYSIVRRADRAAVPIVNLKDELLFPSWEALFSGSEGPLKPGARIFSFDGKDVLRHPTWPQKSVWHGSDPNGRRLTESYCETWR

SEQ ID NO: 3251 - protein, 36 aa, Homo sapiens
GPPGIQGIHQTLGGYYNKDNKGNDEHEAGGLKGDKV

SEQ ID NO: 3252 - protein, 1142 aa, Homo sapiens
MRLTGPWKLWLWMSIFLLPASTSVTVRDKTEESCPILRIEGHQLTYDNINKLEVSGFDLGDSFSLRRAFCESDKTCFKLGSALLIRDTIKIFPKGLPEEYSVAAMFRVRRNAKKERWFLWQVLNQQNIPQISIVVDGGKKVVEFMFQATEGDVLNYIFRNRELRPLFDRQWHKLGISIQSQVISLYMDCNLIARRQTDEKDTVDFHGRTVIATRASDGKPVDIELHQLKIYCSANLIAQETCCEISDTKCPEQDGFGNIASSWVTAHASKMSSYLPAKQELKDQCQCIPNKGEAGLPGAPGSPGQKGHKGEPGENGLHGAPGFPGQKGEQGFEGSKGETGEKGEQGEKGDPALAGLNGENGLKGDLGPHGPPGPKGEKGDTGPPGPPALPGSLGIQGPQGPPGKEGQRGRRGKTGPPGKPGPPGPPGPPGIQGIHQTLGGYYNKDNKGNDEHEAGGLKGDKGETGLPGFPGSVGPKGQKGEPGEPFTKGEKGDRGEPGVIGSQGVKGEPGDPGPPGLIGSPGLKGQQGSAGSMGPRGPPGDVGLPGEHGIPGKQGIKGEKGDPGGIIGPPGLPGPKGEAGPPGKSLPGEPGLDGNPGAPGPRGPKGERGLPGVHGSPGDIGPQGIGIPGRTGAQGPAGEPGIQGPRGLPGLPGTPGTPGNDGVPGRDGKPGLPGPPGDPIALPLLGDIGALLKNFCGNCQASVPGLKSNKGEEGGAGEPGKYDSMARKGDIGPRGPPGIPGREGPKGSKGERGYPGIPGEKGDEGLQGIPGIPGAPGPTGPPGLMGRTGHPGPTGAKGEKGSDGPPGKPGPPGPPGIPFNERNGMSSLYKIKGGVNVPSYPGPPGPPGPKGDPGPVGEPGAMGLPGLEGFPGVKGDRGPAGPPGIAGMSGKPGAPGPPGVPGEPGERGPVGDIGFPGPEGPSGKPGINGKDGIPGAQGIMGKPGDRGPKGERGDQGIPGDRGSQGERGKPGLTGMKGAIGPMGPPGNKGSMGSPGHQGPPGSPGIPGIPADAVSFEEIKKYINQEVLRIFEERMAVFLSQLKLPAAMLAAQAYGRPGPPGKDGLPGPPGDPGPQGYRGQKGERGEPGIGLPGSPGLPGTSALGLPGSPGAPGPQGPPGPSGRCNPEDCLYPVSHAHQRTGGN

SEQ ID NO: 3253 - protein, 60 aa, Homo sapiens
MRLTGPWKLWLWMSIFLLPASTSVTVRDKTGIQANSLPNHQMLFIAFKSLKQILLRLKRP

SEQ ID NO: 3254 - protein, 1464 aa, Homo sapiens
MFSFVDLRLLLLLAATALLTHGQEEGQVEGQDEDIPPITCVQNGLRYHDRDVWKPEPCRICVCDNGKVLCDDVICDETKNCPGAEVPEGECCPVCPDGSESPTDQETTGVEGPKGDTGPRGPRGPAGPPGRDGIPGQPGLPGPPGPPGPPGPPGLGGNFAPQLSYGYDEKSTGGISVPGPMGPSGPRGLPGPPGAPGPQGFQGPPGEPGEPGASGPMGPRGPPGPPGKNGDDGEAGKPGRPGERGPPGPQGARGLPGTAGLPGMKGHRGFSGLDGAKGDAGPAGPKGEPGSPGENGAPGQMGPRGLPGERGRPGAPGPAGARGNDGATGAAGPPGPTGPAGPPGFPGAVGAKGEAGPQGPRGSEGPQGVRGEPGPPGPAGAAGPAGNPGADGQPGAKGANGAPGIAGAPGFPGARGPSGPQGPGGPPGPKGNSGEPGAPGSKGDTGAKGEPGPVGVQGPPGPAGEEGKRGARGEPGPTGLPGPPGERGGPGSRGFPGADGVAGPKGPAGERGSPGPAGPKGSPGEAGRPGEAGLPGAKGLTGSPGSPGPDGKTGPPGPAGQDGRPGPPGPPGARGQAGVMGFPGPKGAAGEPGKAGERGVPGPPGAVGPAGKDGEAGAQGPPGPAGPAGERGEQGPAGSPGFQGLPGPAGPPGEAGKPGEQGVPGDLGAPGPSGARGERGFPGERGVQGPPGPAGPRGANGAPGNDGAKGDAGAPGAPGSQGAPGLQGMPGERGAAGLPGPKGDRGDAGPKGADGSPGKDGVRGLTGPIGPPGPAGAPGDKGESGPSGPAGPTGARGAPGDRGEPGPPGPAGFAGPPGADGQPGAKGEPGDAGAKGDAGPPGPAGPAGPPGPIGNVGAPGAKGARGSAGPPGATGFPGAAGRVGPPGPSGNAGPPGPPGPAGKEGGKGPRGETGPAGRPGEVGPPGPPGPAGEKGSPGADGPAGAPGTPGPQGIAGQRGVVGLPGQRGERGFPGLPGPSGEPGKQGPSGASGERGPPGPMGPPGLAGPPGESGREGAPGAEGSPGRDGSPGAKGDRGETGPAGPPGAPGAPGAPGPVGPAGKSGDRGETGPAGPAGPVGPVGARGPAGPQGPRGDKGETGEQGDRGIKGHRGFSGLQGPPGPPGSPGEQGPSGASGPAGPRGPPGSAGAPGKDGLNGLPGPIGPPGPRGRTGDAGPVGPPGPPGPPGPPGPPSAGFDFSFLPQPPQEKAHDGGRYYRADDANVVRDRDLEVDTTLKSLSQQIENIRSPEGSRKNPARTCRDLKMCHSDWKSGEYWIDPNQGCNLDAIKVFCNMETGETCVYPTQPSVAQKNWYISKNPKDKRHVWFGESMTDGFQFEYGGQGSDPADVAIQLTFLRLMSTEASQNITYHCKNSVAYMDQQTGNLKKALLLQGSNEIEIRAEGNSRFTYSVTVDGCTSHTGAWGKTVIEYKTTKTSRLPIIDVAPLDVGAPDQEFGFDVGPVCFL

SEQ ID NO: 3255 - protein, 154 aa, Homo sapiens
MRSRRAFKDLRKEERGEGREVKNPSVPLRPGGKVVKLGVAVTTDNAPLPPVPVPPITCVQNGLRYHDRDVWKPEPCRICVCDNGKVLCDDVICDETKNCPGAEVPEGECCPVCPDGSESPTDQETTGVEGPKGDTGPRGPRGPAGPPGRDGIPG

SEQ ID NO: 3256 - protein, 1364 aa, Homo sapiens
MLSFVDTRTLLLLAVTLCLATCQFFETVRKGPAGDRGPRGERGPPGPPGRDGEDGPTGPPGPPGPPGPPGLGGNFAAQYDGKGVGLGPGPMGLMGPRGPPGAAGAPGPQGFQGPAGEPGEPGQTGPAGARGPAGPPGKAGEDGHPGKPGRPGERGVVGPQGARGFPGTPGLPGFKGIRGHNGLDGLKGQPGAPGVKGEPGAPGENGTPGQTGARGLPGERGRVGAPGPAGARGSDGSVGPVGPAGPIGSAGPPGFPGAPGPKGEIGAVGNAGPAGPAGPRGEVGLPGLSGPVGPPGNPGANGLTGAKGAAGLPGVAGAPGLPGPRGIPGPVGAAGATGARGLVGEPGPAGSKGESGNKGEPGSAGPQGPPGPSGEEGKRGPNGEAGSAGPPGPPGLRGSPGSRGLPGADGRAGVMGPPGSRGASGPAGVRGPNGDAGRPGEPGLMGPRGLPGSPGNIGPAGKEGPVGLPGIDGRPGPIGPAGARGEPGNIGFPGPKGPTGDPGKNGDKGHAGLAGARGAPGPDGNNGAQGPPGPQGVQGGKGEQGPPGPPGFQGLPGPSGPAGEVGKPGERGLHGEFGLPGPAGPRGERGPPGESGAAGPTGPIGSRGPSGPPGPDGNKGEPGVVGAVGTAGPSGPSGLPGERGAAGIPGGKGEKGEPGLRGEIGNPGRDGARGAPGAVGAPGPAGATGDRGEAGAAGPAGPAGPRGSPGERGEVGPAGPNGFAGPAGAAGQPGAKGERGAKGPKGENGVVGPTGPVGAAGPAGPNGPPGPAGSRGDGGPPGMTGFPGAAGRTGPPGPSGISGPPGPPGPAGKEGLRGPRGDQGPVGRTGEVGAVGPPGFAGEKGPSGEAGTAGPPGTPGPQGLLGAPGILGLPGSRGERGLPGVAGAVGEPGPLGIAGPPGARGPPGAVGSPGVNGAPGEAGRDGNPGNDGPPGRDGQPGHKGERGYPGNIGPVGAAGAPGPHGPVGPAGKHGNRGETGPSGPVGPAGAVGPRGPSGPQGIRGDKGEPGEKGPRGLPGLKGHNGLQGLPGIAGHHGDQGAPGSVGPAGPRGPAGPSGPAGKDGRTGHPGTVGPAGIRGPQGHQGPAGPPGPPGPPGPPGVSGGGYDFGYDGDFYRADQPRSAPSLRPKDYEVDATLKSLNNQIETLLTPEGSRKNPARTCRDLRLSHPEWSSGYYWIDPNQGCTMDAIKVYCDFSTGETCIRAQPENIPAKNWYRSSKDKKHVWLGETINAGSQFEYNVEGVTSKEMATQLAFMRLLANYASQNITYHCKNSIAYMDEETGNLKKAVILQGSNDVELVAEGNSRFTYTVLVDGCSKKTNEWGKTIIEYKTNKPSRLPFLDIAPLDIGGADQEFFVDIGPVCFK

SEQ ID NO: 3257 - protein, 1366 aa, Homo sapiens
MLSFVDTRTLLLLAVTLCLATCQSLQEETVRKGPAGDRGPRGERGPPGPPGRDGEDGPTGPPGPPGPPGPPGLGGNFAAQYDGKGVGLGPGPMGLMGPRGPPGAAGAPGPQGFQGPAGEPGEPGQTGPAGARGPAGPPGKAGEDGHPGKPGRPGERGVVGPQGARGFPGTPGLPGFKGIRGHNGLDGLKGQPGAPGVKGEPGAPGENGTPGQTGARGLPGERGRVGAPGPAGARGSDGSVGPVGPAGPIGSAGPPGFPGAPGPKGEIGAVGNAGPAGPAGPRGEVGLPGLSGPVGPPGNPGANGLTGAKGAAGLPGVAGAPGLPGPRGIPGPVGAAGATGARGLVGEPGPAGSKGESGNKGEPGSAGPQGPPGPSGEEGKRGPNGEAGSAGPPGPPGLRGSPGSRGLPGADGRAGVMGPPGSRGASGPAGVRGPNGDAGRPGEPGLMGPRGLPGSPGNIGPAGKEGPVGLPGIDGRPGPIGPAGARGEPGNIGFPGPKGPTGDPGKNGDKGHAGLAGARGAPGPDGNNGAQGPPGPQGVQGGKGEQGPPGPPGFQGLPGPSGPAGEVGKPGERGLHGEFGLPGPAGPRGERGPPGESGAAGPTGPIGSRGPSGPPGPDGNKGEPGVVGAVGTAGPSGPSGLPGERGAAGIPGGKGEKGEPGLRGEIGNPGRDGARGAPGAVGAPGPAGATGDRGEAGAAGPAGPAGPRGSPGERGEVGPAGPNGFAGPAGAAGQPGAKGERGAKGPKGENGVVGPTGPVGAAGPAGPNGPPGPAGSRGDGGPPGMTGFPGAAGRTGPPGPSGISGPPGPPGPAGKEGLRGPRGDQGPVGRTGEVGAVGPPGFAGEKGPSGEAGTAGPPGTPGPQGLLGAPGILGLPGSRGERGLPGVAGAVGEPGPLGIAGPPGARGPPGAVGSPGVNGAPGEAGRDGNPGNDGPPGRDGQPGHKGERGYPGNIGPVGAAGAPGPHGPVGPAGKHGNRGETGPSGPVGPAGAVGPRGPSGPQGIRGDKGEPGEKGPRGLPGLKGHNGLQGLPGIAGHHGDQGAPGSVGPAGPRGPAGPSGPAGKDGRTGHPGTVGPAGIRGPQGHQGPAGPPGPPGPPGPPGVSGGGYDFGYDGDFYRADQPRSAPSLRPKDYEVDATLKSLNNQIETLLTPEGSRKNPARTCRDLRLSHPEWSSGYYWIDPNQGCTMDAIKVYCDFSTGETCIRAQPENIPAKNWYRSSKDKKHVWLGETINAGSQFEYNVEGVTSKEMATQLAFMRLLANYASQNITYHCKNSIAYMDEETGNLKKAVILQGSNDVELVAEGNSRFTYTVLVDGCSKKTNEWGKTIIEYKTNKPSRLPFLDIAPLDIGGADQEFFVDIGPVCFK

SEQ ID NO: 3258 - protein, 401 aa, Homo sapiens
EHTIVFLVRLLPETPREAFALWQMTAEDFQPLLGVLLDAGKKSLTYFHRDPRAALQEATFDPQEVRKIFFGSFHKVHVAVGRSKVRLYVDCRKVAERPLGEMGSPPAAGFVTLGRLAKARGPRSSSAAFQLQMLQIVCSDTWADEDRCCELPASRDGETCPAFVSACSCSSETPGPPGPQGPPGLPGRNGTPGEQGFPGPRGEPGPPGQMGPEGPGGQQGSPGTQGRAVQGPVGPPGVKGEKGDHGLPGLQGHPGHQGIPGRVGLQGPKGMRGLEGTAGLPGPPGPRGFQGMAGARGTSGERGPPGTVGPTGLPGPKGERGEKGEPQSLATLYQLVSQACESAIQTHVSKFDSFHENTRPPMPILEQKLEPGTEPLGSPGTRSKALVPGEWGRGGRHLEGR

SEQ ID NO: 3259 - protein, 250 aa, Homo sapiens
ERPLGEMGSPPAAGFVTLGRLAKARGPRSSSAAFQLQMLQIVCSDTWADEDRCCELPASRDGETCPAFVSACSCSSETPGPPGPQGPPGPPGVKGEKGDHGLPGLQGHPGHQGIPGRVGLQGPKGMRGLEGTAGLPGPPGPRGFQGMAGARGTSGERGPPGTVGPTGLPGPKGERGEKGEPQSLATLYQLVSQACESAIQTHVSKFDSFHENTRPPMPILEQKLEPGTEPLGSPGTRSKALVPGEWGRGG

SEQ ID NO: 3260 - protein, 1284 aa, Homo sapiens
MSSGDPAHLGLCLWLWLGATLGREQVQASGLLRLAVLPEDRLQMKWRESEGSGLGYLVQVKPMAGDSEQEVILTTKTPKATVGGLSPSKGYTLQIFELTGSGRFLLARREFVIEDLKSSSLDRSSQRPLGSGAPEPTPSHTGSPDPEQASEPQVAFTPSQDPRTPAGPQFRCLPPVPADMVFLVDGSWSIGHSHFQQVKDFLASVIAPFEIGPDKVQVGLTQYSGDAQTEWDLNSLSTKEQVLAAVRRLRYKGGNTFTGLALTHVLGQNLQPAAGLRPEAAKVVILVTDGKSQDDVHTAARVLKDLGVNVFAVGVKNADEAELRLLASPPRDITVHSVLDFLQLGALAGLLSRLICQRLQGGSPRQGPAAAPALDTLPAPTSLVLSQVTSSSIRLSWTPAPRHPLKYLIVWRASRGGTPREVVVEGPAASTELHNLASRTEYLVSVFPIYEGGVGEGLRGLVTTAPLPPPRALTLAAVTPRTVHLTWQPSAGATHYLVRCSPASPKGEEEEREVQVGRPEVLLDGLEPGRDYEVSVQSLRGPEGSEARGIRARTPTLAPPRHLGFSDVSHDAARVFWEGAPRPVRLVRVTYVSSEGGHSGQTEAPGNATSATLGPLSSSTTYTVRVTCLYPGGGSSTLTGRVTTKKAPSPSQLSMTELPGDAVQLAWVAAAPSGVLVYQITWTPLGEGKAHEISVPGNLGTAVLPGLGRHTEYDVTILAYYRDGARSDPVSLRYTPSTVSRSPPSNLALASETPDSLQVSWTPPLGRVLHYWLTYAPASGLGPEKSVSVPGARSHVTLPDLQAATKYRVLVSAIYAAGRSEAVSATGQTACPALRPDGSLPGFDLMVAFSLVEKAYASIRGVAMEPSAFGGTPTFTLFKDAQLTRRVSDVYPAPLPPEHTIVFLVRLLPETPREAFALWQMTAEDFQPLLGVLLDAGKKSLTYFHRDPRAALQEATFDPQEVRKIFFGSFHKVHVAVGRSKVRLYVDCRKVAERPLGEMGSPPAAGFVTLGRLAKARGPRSSSAAFQLQMLQIVCSDTWADEDRCCELPASRDGETCPAFVSACSCSSETPGPPGPQGPPGLPGRNGTPGEQGFPGPRGPPGVKGEKGDHGLPGLQGHPGHQGIPGRVGLQGPKGMRGLEGTAGLPGPPGPRGFQGMAGARGTSGERGPPGTVGPTGLPGPKGERGEKGEPQSLATLYQLVSQASHVSKFDSFHENTRPPMPILEQKLEPGTEPLGSPGTRSKALVPGEWGRGGRHLEGRGEPGAVGQMGSPGQQGASTQGLWE

SEQ ID NO: 3261 - protein, 1297 aa, Homo sapiens
MSSGDPAHLGLCLWLWLGATLGREQVQASGLLRLAVLPEDRLQMKWRESEGSGLGYLVQVKPMAGDSEQEVILTTKTPKATVGGLSPSKGYTLQIFELTGSGRFLLARREFVIEDLKSSSLDRSSQRPLGSGAPEPTPSHTGSPDPEQASEPQVAFTPSQDPRTPGGSEWRETGPQFRCLPPVPADMVFLVDGSWSIGHSHFQQVKDFLASVIAPFEIGPDKVQVGLTQYSGDAQTEWDLNSLSTKEQVLAAVRRLRYKGGNTFTGLALTHVLGQNLQPAAGLRPEAAKVVILVTDGKSQDDVHTAARVLKDLGVNVFAVGVKNADEAELRLLASPPRDITVHSVLDFLQLGALAGLLSRLICQRLQGGSPRQGPAAAPALDTLPAPTSLVLSQVTSSSIRLSWTPAPRHPLKYLIVWRASRGGTPREVVVEGPAASTELHNLASRTEYLVSVFPIYEGGVGEGLRGLVTTAPLPPPRALTLAAVTPRTVHLTWQPSAGATHYLVRCSPASPKGEEEEREVQVGRPEVLLDGLEPGRDYEVSVQSLRGPEGSEARGIRARTPTLAPPRHLGFSDVSHDAARVFWEGAPRPVRLVRVTYVSSEGGHSGQTEAPGNATSATLGPLSSSTTYTVRVTCLYPGGGSSTLTGRVTTKKAPSPSQLSMTELPGDAVQLAWVAAAPSGVLVYQITWTPLGEGKAHEISVPGNLGTAVLPGLGRHTEYDVTILAYYRDGARSDPVSLRYTPSTVSRSPPSNLALASETPDSLQVSWTPPLGRVLHYWLTYAPASGLGPEKSVSVPGARSHVTLPDLQAATKYRVLVSAIYAAGRSEAVSATGQTACPALRPDGSLPGFDLMVAFSLVEKAYASIRGVAMEPSAFGGTPTFTLFKDAQLTRRVSDVYPAPLPPEHTIVFLVRLLPETPREAFALWQMTAEDFQPLLGVLLDAGKKSLTYFHRDPRAALQEATFDPQEVRKIFFGSFHKVHVAVGRSKVRLYVDCRKVAERPLGEMGSPPAAGFVTLGRLAKARGPRSSSAAFQLQMLQIVCSDTWADEDRCCELPASRDGETCPAFVSACSCSSETPGPPGPQGPPGLPGRNGTPGEQGFPGPRGPPGVKGEKGDHGLPGLQGHPGHQGIPGRVGLQGPKGMRGLEGTAGLPGPPGPRGFQGMAGARGTSGERGPPGTVGPTGLPGPKGERGEKGEPQSLATLYQLVSQACESAIQTHVSKFDSFHENTRPPMPILEQKLEPGTEPLGSPGTRSKALVPGEWGRGGRHLEGRGEPGAVGQMGSPGQQGASTQGLWE

SEQ ID NO: 3262 - protein, 79 aa, Homo sapiens
AKGDKGSPGFYGKKGAKGEKGNAGFPGLPGPAGEPGRHGKDGLMGSPGFKGEAGSPGAPGQDGTRGEPTCAYEFSHVKE

SEQ ID NO: 3263 - protein, 136 aa, Homo sapiens
MAHYITFLCMVLVLLLQNSVLAEDGEVRSSCRTAPTDLVFILDGSYSVGPENFEIVKKWLVNITKNFDIGPKFIQVGVVQYSDYPVLEIPLGSYDSGEHLTAAVESILYLGGNTKTGKAIQFALDYLFAKSSRFLT

SEQ ID NO: 3264 - protein, 957 aa, Homo sapiens
MAHYITFLCMVLVLLLQNSVLAEDGEVRSSCRTAPTDLVFILDGSYSVGPENFEIVKKWLVNITKNFDIGPKFIQVGVVQYSDYPVLEIPLGSYDSGEHLTAAVESILYLGGNTKTGKAIQFALDYLFAKSSRFLTKIAVVLTDGKSQDDVKDAAQAARDSKITLFAIGVGSETEDAELRAIANKPSSTYVFYVEDYIAISKIREVMKQKLCEESVCPTRIPVAARDERGFDILLGLDVNKKVKKRIQLSPKKIKGYEVTSKVDLSELTSNVFPEGLPPSYVFVSTQRFKVKKIWDLWRILTIDGRPQIAVTLNGVDKILLFTTTSVINGSQVVTFANPQVKTLFDEGWHQIRLLVTEQDVTLYIDDQQIENKPLHPVLGILINGQTQIGKYSGKEETVQFDVQKLRIYCDPEQNNRETACEIPGFNGECLNGPSDVGSTPAPCICPPGKPGLQGPKGDPGLPGNPGYPGQPGQDGKPGYQGIAGTPGVPGSPGIQGARGLPGYKGEPGRDGDKGDRGLPGFPGLHGMPGSKGEMGAKGDKGSPGFYGKKGAKGEKGNAGFPGLPGPAGEPGRHGKDGLMGSPGFKGEAGSPGAPGQDGTRGEPGIPGFPGNRGLMGQKGEIGPPGQQGKKGAPGMPGLMGSNGSPGQPGTPGSKGSKGEPGIQGMPGASGLKGEPGATGSPGEPGYMGLPGIQGKKGDKGNQGEKGIQGQKGENGRQGIPGQQGIQGHHGAKGERGEKGEPGVRGAIGSKGESGVDGLMGPAGPKGQPGDPGPQGPPGLDGKPGREFSEQFIRQVCTDVIRAQLPVLLQSGRIRNCDHCLSQHGSPGIPGPPGPIGPEGPRGLPGLPGRDGVPGLVGVPGRPGVRGLKGLPGRNGEKGSQGFGYPGEQGPPGPPGPEGPPGISKEGPPGDPGLPGKDGDHGKPGIQGQPGPPGICDPSLCFSVIARRDPFRKGPNY

SEQ ID NO: 3265 - protein, 954 aa, Homo sapiens
MAHYITFLCMVLVLLLQNSVLAEDGEVRSSCRTAPTDLVFILDGSYSVGPENFEIVKKWLVNITKNFDIGPKFIQVGVVQYSDYPVLEIPLGSYDSGEHLTAAVESILYLGGNTKTGKAIQFALDYLFAKSSRFLTKIAVVLTDGKSQDDVKDAAQAARDSKITLFAIGVGSETEDAELRAIANKPSSTYVFYVEDYIAISKIREVMKQKLCEESVCPTRIPVAARDERGFDILLGLDVNKKVKKRIQLSPKKIKGYEVTSKVDLSELTSNVFPEGLPPSYVFVSTQRFKVKKIWDLWRILTIDGRPQIAVTLNGVDKILLFTTTSVINGSQVVTFANPQVKTLFDEGWHQIRLLVTEQDVTLYIDDQQIENKPLHPVLGILINGQTQIGKYSGKEETVQFDVQKLRIYCDPEQNNRETACEIPGFCLNGPSDVGSTPAPCICPPGKPGLQGPKGDPGLPGNPGYPGQPGQDGKPGYQGIAGTPGVPGSPGIQGARGLPGYKGEPGRDGDKGDRGLPGFPGLHGMPGSKGEMGAKGDKGSPGFYGKKGAKGEKGNAGFPGLPGPAGEPGRHGKDGLMGSPGFKGEAGSPGAPGQDGTRGEPGIPGFPGNRGLMGQKGEIGPPGQQGKKGAPGMPGLMGSNGSPGQPGTPGSKGSKGEPGIQGMPGASGLKGEPGATGSPGEPGYMGLPGIQGKKGDKGNQGEKGIQGQKGENGRQGIPGQQGIQGHHGAKGERGEKGEPGVRGAIGSKGESGVDGLMGPAGPKGQPGDPGPQGPPGLDGKPGREFSEQFIRQVCTDVIRAQLPVLLQSGRIRNCDHCLSQHGSPGIPGPPGPIGPEGPRGLPGLPGRDGVPGLVGVPGRPGVRGLKGLPGRNGEKGSQGFGYPGEQGPPGPPGPEGPPGISKEGPPGDPGLPGKDGDHGKPGIQGQPGPPGICDPSLCFSVIARRDPFRKGPNY

SEQ ID NO: 3266 - protein, 956 aa, Homo sapiens [sequence omitted]

SEQ ID NO: 3267 - protein, 125 aa, Homo sapiens
  SITE 1: note = misc_feature - Xaa can be any naturally occurring amino acid
XRETACEIPGFNGECLNGPSDVGSTPAPCICPPGKPGLQGPKGYQGIAGTPGVPGSPGIQGARGLPGYKGEPGRDGDKGDRGLPGFPGLHGMPGSKGEMGAKGDKGSPGFYGKKGSIDHTTKYSY

SEQ ID NO: 3268 - protein, 65 aa, Homo sapiens
GEPGELGEPGLPGEVGMRGPQGPPGLPGPPGRVGAPVSEGTCLGRGSTPSPGIKNQVLASSSTCI

SEQ ID NO: 3269 - protein, 1626 aa, Homo sapiens
MAGLRGNAVAGLLWMLLLWSGGGGCQAQRAGCKSVHYDLVFLLDTSSSVGKEDFEKVRQWVANLVDTFEVGPDRTRVGVVRYSDRPTTAFELGLFGSQEEVKAAARRLAYHGGNTNTGDALRYITARSFSPHAGGRPRDRAYKQVAILLTDGRSQDLVLDAAAAAHRAGIRIFAVGVGEALKEELEEIASEPKSAHVFHVSDFNAIDKIRGKLRRRLCENVLCPSVRVEGDRFKHTNGGTKEITGFDLMDLFSVKEILGKRENGAQSSYVRMGSFPVVQSTEDVFPQGLPDEYAFVTTFRFRKTSRKEDWYIWQVIDQYSIPQVSIRLDGENKAVEYNAVGAMKDAVRVVFRGSRVNDLFDRDWHKMALSIQAQNVSLHIDCALVQTLPIEERENIDIQGKTVIGKRLYDSVPIDFDLQRIVIYCDSRHAELETCCDIPSGPCQVTVVTEPPPPPPPQRPPTPGSEQIGFLKTINCSCPAGEKGEMGVAGPMGLPGPKGDIGAIGPVGAPGPKGEKGDVGIGPFGQGEKGEKGSLGLPGPPGRDGSKGMRGEPGELGEPGLPGEVGMRGPQGPPGLPGPPGRVGAPGLQGERGEKGTRGEKGERGLDGFPGKPGDTGQQGRPGPSGVAGPQGEKGDVGPAGPPGVPGSVVQQEGLKGEQGAPGPRGHQGAPGPPGARGPIGPEGRDGPPGLQGLRGKKGDMGPPGIPGLLGLQGPPGPPGVPGPPGPGGSPGLPGEIGFPGKPGPPGPTGPPGKDGPNGPPGPPGTKGEPGERGEDGLPGKPGLRGEIGEQGLAGRPGEKGEAGLPGAPGFPGVRGEKGDQGEKGELGLPGLKGDRGEKGEAGPAGPPGLPGTTSLFTPHPRMPGEQGPKGEKGDPGLPGEPGLQGRPGELGPQGPTGPPGAKGQEGAHGAPGAAGNPGAPGHVGAPGPSGPPGSVGAPGLRGTPGKDGERGEKGAAGEEGSPGPVGPRGDPGAPGLPGPPGKGKDGEPGLRGSPGLPGPLGTKAACGKVRGSENCALGGQCVKGDRGAPGIPGSPGSRGDPGIGVAGPPGPSGPPGDKGSPGSRGLPGFPGPQGPAGRDGAPGNPGERGPPGKPGLSSLLSPGDINLLAKDVCNDCPPGPPGLPGLPGFKGDKGVPGKPGREGTEGKKGEAGPPGLPGPPGIAGPQGSQGERGADGEVGQKGDQGHPGVPGFMGPPGNPGPPGADGIAGAAGPPGIQGSPGKEGPPGPQGPSGLPGIPGEEGKEGRDGKPGPPGEPGKAGEPGLPGPEGARGPPGFKGHTGDSGAPGPRGESGAMGLPGQEGLPGKDGDTGPTGPQGPQGPRGPPGKNGSPGSPGEPGPSGTPGQKGSKGENGSPGLPGFLGPRGPPGEPGEKGVPGKEGVPGKPGEPGFKGERGDPGIKGDKGPPGGKGQPGDPGIPGHKGHTGLMGPQGLPGENGPVGPPGPPGQPGFPGLRGESPSMETLRRLIQEELGKQLETRLAYLLAQMPPAYMKSSQGRPGPPGPPGKDGLPGRAGPMGEPGRPGQGGLEGPSGPIGPKGERGAKGDPGAPGVGLRGEMGPPGIPGQPGEPGYAKDGLPGIPGPQGETGPAGHPGLPGPPGPPGQCDPSQCAYFASLAARPGNVKGP

SEQ ID NO: 3270 - protein, 1319 aa, Homo sapiens
MAGLRGNAVAGLLWMLLLWSGGGGCQAQRAGCKSVHYDLVFLLDTSSSVGKEDFEKVRQWVANLVDTFEVGPDRTRVGVVRYSDRPTTAFELGLFGSQEEVKAAARRLAYHGGNTNTGDALRYITARSFSPHAGGRPRDRAYKQVAILLTDGRSQDLVLDAAAAAHRAGIRIFAVGVGEALKEELEEIASEPKSAHVFHVSDFNAIDKIRGKLRRRLCENVLCPSVRVEGDRFKHTNGGTKEITGFDLMDLFSVKEILGKRENGAQSSYVRMGSFPVVQSTEDVFPQGLPDEYAFVTTFRFRKTSRKEDWYIWQVIDQYSIPQVSIRLDGENKAVEYNAVAGPQGEKGDVGPAGPPGVPGSVVQQEGLKGEQGAPGPRGHQGAPGPPGARGPIGPEGRDGPPGLQGLRGKKGDMGPPGIPGLLGLQGPPGPPGVPGPPGPGGSPGLPGEIGFPGKPGPPGPTGPPGKDGPNGPPGPPGTKGEPGERGEDGLPGKPGLRGEIGEQGLAGRPGEKGEAGLPGAPGFPGVRGEKGDQGEKGELGLPGLKGDRGEKGEAGPAGPPGLPGTTSLFTPHPRMPGEQGPKGEKGDPGLPGEPGLQGRPGELGPQGPTGPPGAKGQEGAHGAPGAAGNPGAPGHVGAPGPSGPPGSVGAPGLRGTPGKDGERGEKGAAGEEGSPGPVGPRGDPGAPGLPGPPGKGKDGEPGLRGSPGLPGPLGTKGDRGAPGIPGSPGSRGDPGIGVAGPPGPSGPPGDKGSPGSRGLPGFPGPQGPAGRDGAPGNPGERGPPGKPGLSSLLSPGDINLLAKDVCNDCPPGPPGLPGLPGFKGDKGVPGKPGREGTEGKKGEAGPPGLPGPPGIAGPQGSQGERGADGEVGQKGDQGHPGVPGFMGPPGNPGPPGADGIAGAAGPPGIQGSPGKEGPPGPQGPSGLPGIPGEEGKEGRDGKPGPPGEPGKAGEPGLPGPEGARGPPGFKGHTGDSGAPGPRGESGAMGLPGQEGLPGKDGDTGPTGPQGPQGPRGPPGKNGSPGSPGEPGPSGTPGQKGSKGENGSPGLPGFLGPRGPPGEPGEKGVPGKEGVPGKPGEPGFKGERGDPGIKGDKGPPGGKGQPGDPGIPGHKGHTGLMGPQGLPGENGPVGPPGPPGQPGFPGLRGESPSMETLRRLIQEELGKQLETRLAYLLAQMPPAYMKSSQGRPGPPGPPGKDGLPGRAGPMGEPGRPGQGGLEGPSGPIGPKGERGAKGDPGAPGVGLRGEMGPPGIPGQPGEPGYAKDGLPGIPGPQGETGPAGHPGLPGPPGPPGQCDPSQCAYFASLAARPGNVKGP

SEQ ID NO: 3271 - protein, 81 aa, Homo sapiens
MHLRAHRTRRGKVSPTAKTKSLLHFIVLCVAGVVVHAQEQGIDILHQLGLGGKDVRHSSPATAVPSASTPLPQGVHLTESG

SEQ ID NO: 3272 - protein, 1714 aa, Homo sapiens
MHLRAHRTRRGKVSPTAKTKSLLHFIVLCVAGVVVHAQEQGIDILHQLGLGGKDVRHSSPATAVPSASTPLPQGVHLTESGVIFKNDAYIETPFVKILPVNLGQPFTILTGLQSHRVNNAFLFSIRNKNRLQLGVQLLPKKLVVHIRGKQPAVFNYSVHDEQWHSFAITIRNQSVSMFVECGKKYFSTETIPEVQTFDSNSVFTLGSMNNNSIHFEGIVCQLDIIPSAEASADYCRYVKQQCRQADKYQPETSIPCTTLIPTKIPEHSPPPKLFAEKVLSEDTFTEGKSIPNIIKNDSETVYKRQEHQISRSQLSSLQSGNVSAVDLTNHGIQAKEMITEEDTQTNFSLSVTTHRISEAKMNTKEKFSSLLNMSDNITQHDDRVTGLSLFKKMPSILPQIKQDTITNLKKAITANLHTNELMEMQPILNTSLHRVTNEPSVDNHLDLRKEGEFYPDATYPIENSYETELYDYYYYEDLNTMLEMEYLRGPKGDTGPPGPPGPAGIPGPSGKRGPRGIPGPHGNPGLPGLPGPKGPKGDPGFSPGQPVPGEKGDQGLSGLMGPPGMQGDKGLKGHPGLPGLPGEQGIPGFAGNIGSPGYPGRQGLAGPEGNPGPKGAQGFIGSPGEAGQLGPEGERGIPGIRGKKGFKGRQGFPGDFGDRGPAGLDGSPGLVGGTGPPGFPGLRGSVGPVGPIGPAGIPGPMGLSGNKGLPGIKGDKGEQGTAGELGEPGYPGDKGAVGLPGPPGMRGKSGPSGQTGDPGLQGPSGPPGPEGFPGDIGIPGQNGPEGPKGLLGNRGPPGPPGLKGTQGEEGPIGAFGELGPRGKPGQKGYAGEPGPEGLKGEVGDQGNIGKIGETGPVGLPGEVGMTGSIGEKGERGSPGPLGPQGEKGVMGYPGPPGVPGPIGPLGLPGHVGARGPPGSQGPKGQRGSRGPDGLLGEQGIQGAKGEKGDQGKRGPHGLIGKTGNPGERGFQGKPGLQGLPGSTGDRGLPGEPGLRGLQGDVGPPGEMGMEGPPGTEGESGLQGEPGAKGDVGTAGSVGGTGEPGLRGEPGAPGEEGLQGKDGLKGVPGGRGLPGEDGEKGEMGLPGIIGPLGRSGQTGLPGPEGIVGIPGQRGRPGKKGDKGQIGPTGEVGSRGPPGKIGKSGPKGARGTRGAVGHLGLMGPDGEPGIPGYRGHQGQPGPSGLPGPKGEKGYPGEDSTVLGPPGPRGEPGPVGDQGERGEPGAEGYKGHVGVPGLRGATGQQGPPGEPGDQGEQGLKGERGSEGNKGKKGAPGPSGKPGIPGLQGLLGPKGIQGYHGADGISGNPGKIGPPGKQGLPGIRGGPGRTGLAGAPGPPGVKGSSGLPGSPGIQGPKGEQGLPGQPGIQGKRGHRGAQGDQGPCGDPGLKGQPGEYGVQGLTGFQGFPGPKGPEGDAGIVGISGPKGPIGHRGNTGPLGREGIIGPTGRTGPRGEKGFRGETGPQGPRGQPGPPGPPGAPGPRKQMDINAAIQALIESNTALQMESYQNTEVTLIDHSEEIFKTLNYLSNLLHSIKNPLGTRDNPARICKDLLNCEQKVSDGKYWIDPNLGCPSDAIEVFCNFSAGGQTCLPPVSVTKLEFGVGKVQMNFLHLLSSEATHIITIHCLNTPRWTSTQTSGPGLPIGFKGWNGQIFKVNTLLEPKVLSDDCKIQDGSWHKATFLFHTQEPNQLPVIEVQKLPHLKTERKYYIDSSSVCFL

SEQ ID NO: 3273 - protein, 890 aa, Homo sapiens
MHLRAHRTRRGKVSPTAKTKSLLHFIVLCVAGVVVHAQEQGIDILHQLGLGGKDVRHSSPATAVPSASTPLPQGVHLTESGVIFKNDAYIETPFVKILPVNLGQPFTILTGLQSHRVNNAFLFSIRNKNRLQLGVQLLPKKLVVHIRGKQPAVFNYSVHDEQWHSFAITIRNQSVSMFVECGKKYFSTETIPEVQTFDSNSVFTLGSMNNNSIHFEGIVCQLDIIPSAEASADYCRYVKQQCRQADKYQPETSIPCTTLIPTKIPEHSPPPKLFAEKVLSEDTFTEGKSIPNIIKNDSETVYKRQEHQISRSQLSSLQSGNVSAVDLTNHGIQAKEMITEEDTQTNFSLSVTTHRISEAKMNTKEKFSSLLNMSDNITQHDDRVTGLSLFKKMPSILPQIKQDTITNLKKAITANLHTNELMEMQPILNTSLHRVTNEPSVDNHLDLRKEGEFYPDATYPIENSYETELYDYYYYEDLNTMLEMEYLRGPKGDTGPPGPPGPAGIPGPSGKRGPRGIPGPHGNPGLPGLPGPKGPKGDPGFSPGQPVPGEKGDQGLSGLMGPPGMQGDKGLKGHPGLPGLPGEQGIPGFAGNIGSPGYPGRQGLAGPEGNPGPKGAQGFIGSPGEAGQLGPEGERGIPGIRGKKGFKGRQGFPGDFGDRGPAGLDGSPGLVGGTGPPGFPGLRGSVGPVGPIGPAGIPGPMGLSGNKGLPGIKGDKGEQGTAGELGEPGYPGDKGAVGLPGPPGMRGKSGPSGQTGDPGLQGPSGPPGPEGFPGDIGIPGQNGPEGPKGLLGNRGPPGPPGLKGTQGEEGPIGAFGELGPRGKPGQKGYAGEPGPEGLKGEVGDQGNIGKIGETMESCSVTQAGAQWHDLGSLHPLPPGFKRFSCLSLPG

SEQ ID NO: 3274 - protein, 166 aa, Homo sapiens
  SITE 1: note = misc_feature - Xaa can be any naturally occurring amino acid
XIKNPLGTRDNPARICKDLLNCEQKVSDGKYWIDPNLGCPSDAIEVFCNFSAGGQTCLPPVSVTKAFTIITPEIEEGRILPFLGNHEPLIKSSMIVLLPKYPHHHPHSSGSWHRIIIEGKKMGLCELCRGNRSSGEADSSCFHDQITSLISLIHKLNPRKTREVLG

SEQ ID NO: 3275 - protein, 439 aa, Homo sapiens
MKLALLLPWACCCLCGSALATGFLYPFSAAALQQHGYPEPGAGSPGSGYASRRHWCHHTVTRTVSCQVQNGSETVVQRVYQSCRWPGPCANLVRTLIRPTYRVSYRTVTVLEWRCCPGFTGSNCDEECMNCTRLSDMSERLTTLEAKVLLLEAAERPSSPDNDLPAPESTPPTWNEDFLPDAIPLAHPVPRQRRPTGPAGPPGQTGPPGPAGPPGSKGDRGQTGEKGPAGPPGLLGPPGPRGLPGEMGRPGPPGPPGPAGNPGPSPNSPQGALYSLQPPTDKDNGDSRLASAIVDTVLAGVPGPRGPPGPPGPPGPRGPPGPPGTPGSQGLAGERGTVGPSGEPGVKGEEGEKAATAEGEGVQQLREALKILAERVLILEHMIGIHDPLASPEGGSGQDAALRANLKMKRGGAQPDGVLAALLGPDPGQKSVDQASSRK

SEQ ID NO: 3276 - protein, 441 aa, Homo sapiens
MKLALLLPWACCCLCGSALATGFLYPFSAAALQQHGYPEPGAGSPGSGYASRRHWCHHTVTRTVSCQVQNGSETVVQRVYQSCRWPGPCANLVSYRTLIRPTYRVSYRTVTVLEWRCCPGFTGSNCDEECMNCTRLSDMSERLTTLEAKVLLLEAAERPSSPDNDLPAPESTPPTWNEDFLPDAIPLAHPVPRQRRPTGPAGPPGQTGPPGPAGPPGSKGDRGQTGEKGPAGPPGLLGPPGPRGLPGEMGRPGPPGPPGPAGNPGPSPNSPQGALYSLQPPTDKDNGDSRLASAIVDTVLAGVPGPRGPPGPPGPPGPRGPPGPPGTPGSQGLAGERGTVGPSGEPGVKGEEGEKAATAEGEGVQQLREALKILAERVLILEHMIGIHDPLASPEGGSGQDAALRANLKMKRGGAQPDGVLAALLGPDPGQKSVDQASSRK

SEQ ID NO: 3277 - protein, 714 aa, Homo sapiens
LSWTKAGSPAPPGVIPFQSGFIFTQRARLQAPTGTVIPAALGTELALVLSLCSHRVNHAFLFAVRSQKRKLQLGLQFLPGKTVVHLGSRRSVAFDLDMHDGRWHHLALELRGRTVTLVTACGQRRVPVLLPFHRDPALDPGGSFLFGKMNPHAVQFEGALCQFSIYPVTQVAHNYCTHLRKQCGQADTYQSPLGPLFSQDSGRPFTFQSDLALLGLENLTTATPALGSLPAGRGPRGTVAPATPTKPQRTSPTNPHQHMAVGGPAQTPLLPAKLSASNALDPMLPASVGGSTRTPRPAAAQPSQKITATKIPKSLPTKPSAPSTSIVPIKSPHPTQKTAPSSFTKSALPTQKQVPPTSRPVPARVSRPAEKPIQRNPGMPRPPPPSTRPLPPTTSSSKKPIPTLARTEAKITSHASKPASARTSTHKPPPFTALSSSPAPTPGSTRSTRPPATMVPPTSGTSTPRTAPAVPTPGSAPTGSKKPIGSEASKKAGPKSSPRKPVPLRPGKAARDVPLSDLTTRPSPRQPQPSQQTTPALVLAPAQFLSSSPRPTSSGYSIFHLAGSTPFPLLMGPPGPKGDCGLPGPPGLPGLPGIPGARGPRGPPGPYGNPGLPGPPGAKGDMGLPGLSGNPGPPGRKGLPGPVGDPGPKGSRGYIGLPGLFGLPGSDGERGLPGVPGKRGKMGMPVLLPQSSEARGGNSMPSEGALAGRHGSHL

SEQ ID NO: 3278 - protein, 1860 aa, Homo sapiens
MGAGSARGARGTAAAAAARGGGFLFSWILVSFACHLASTQGAPEDVDILQRLGLSWTKAGSPAPPGVIPFQSGFIFTQRARLQAPTGTVIPAALGTELALVLSLCSHRVNHAFLFAVRSQKRKLQLGLQFLPGKTVVHLGSRRSVAFDLDMHDGRWHHLALELRGRTVTLVTACGQRRVPVLLPFHRDPALDPGGSFLFGKMNPHAVQFEGALCQFSIYPVTQVAHNYCTHLRKQCGQADTYQSPLGPLFSQDSGRPFTFQSDLALLGLENLTTATPALGSLPAGRGPRGTVAPATPTKPQRTSPTNPHQHMAVGGPAQTPLLPAKLSASNALDPMLPASVGGSTRTPRPAAAQPSQKITATKIPKSLPTKPSAPSTSIVPIKSPHPTQKTAPSSFTKSALPTQKQVPPTSRPVPARVSRPAEKPIQRNPGMPRPPPPSTRPLPPTTSSSKKPIPTLARTEAKITSHASKPASARTSTHKPPPFTALSSSPAPTPGSTRSTRPPATMVPPTSGTSTPRTAPAVPTPGSAPTGSKKPIGSEASKKAGPKSSPRKPVPLRPGKAARDVPLSDLTTRPSPRQPQPSQQTTPALVLAPAQFLSSSPRPTSSGYSIFHLAGSTPFPLLMGPPGPKGDCGLPGPPGLPGLPGIPGARGPRGPPGPYGNPGLPGPPGAKGQKGDPGLSPGKAHDGAKGDMGLPGLSGNPGPPGRKGHKGYPGPAGHPGEQGQPGPEGSPGAKGYPGRQGLPGPVGDPGPKGSRGYIGLPGLFGLPGSDGERGLPGVPGKRGKMGMPGFPGVFGERGPPGLDGNPGELGLPGPPGVPGLIGDLGVLGPIGYPGPKGMKGLMGSVGEPGLKGDKGEQGVPGVSGDPGFQGDKGSQGLPGFPGARGKPGPLGKVGDKGSIGFPGPPGPEGFPGDIGPPGDNGPEGMKGKPGARGLPGPRGQLGPEGDEGPMGPPGAPGLEGQPGRKGFPGRPGLDGVKGEPGDPGRPGPVGEQGFMGFIGLVGEPGIVGEKGDRGMMGPPGVPGPKGSMGHPGMPGGMGTPGEPGPQGPPGSRGPPGMRGAKGRRGPRGPDGPAGEQGSRGLKGPPGPQGRPGRPGQQGVAGERGHLGSRGFPGIPGPSGPPGTKGLPGEPGPQGPQGPIGPPGEMGPKGPPGAVGEPGLPGEAGMKGDLGPLGTPGEQGLIGQRGEPGLEGDSGPMGPDGLKGDRGDPGPDGEHGEKGQEGLMGEDGPPGPPGVTGVRGPEGKSGKQGEKGRTGAKGAKGYQGQLGEMGVPGDPGPPGTPGPKGSRGSLGPTGAPGRMGAQGEPGLAGYDGHKGIVGPLGPPGPKGEKGEQGEDGKAEGPPGPPGDRGPVGDRGDRGEPGDPGYPGQEGVQGLRGKPGQQGQPGHPGPRGWPGPKGSKGAEGPKGKQGKAGAPGRRGVQGLQGLPGPRGVVGRQGLEGIAGPDGLPGRDGQAGQQGEQGDDGDPGPMGPAGKRGNPGVAGLPGAQGPPGFKGESGLPGQLGPPGKRGTEGRTGLPGNQGEPGSKGQPGDSGEMGFPGMAGLFGPKGPPGDIGFKGIQGPRGPPGLMGKEGIVGPLGILGPSGLPGPKGDKGSRGDWGLQGPRGPPGPRGRPGPPGPPGGPIQLQQDDLGAAFQTWMDTSGALRPESYSYPDRLVLDQGGEIFKTLHYLSNLIQSIKTPLGTKENPARVCRDLMDCEQKMVDGTYWVDPNLGCSSDTIEVSCNFTHGGQTCLKPITASKVEFAISRVQMNFLHLLSSEVTQHITIHCLNMTVWQEGTGQTPAKQAVRFRAWNGQIFEAGGQFRPEVSMDGCKVQDGRWHQTLFTFRTQDPQQLPIISVDNLPPASSGKQYRLEVGPACFL

SEQ ID NO: 3279 - protein, 485 aa, Homo sapiens
  SITE 1: note = misc_feature - Xaa can be any naturally occurring amino acid
XAAQPSQKITATKIPKSLPTKPSAPSTSIVPIKSPHPTQKTAPSSFTKSALPTQKQVPPTSRPVPARVSRPAEKPIQRNPGMPRPPPPSTRPLPPTTSSSKKPIPTLARTEAKITSHASKPASARTSTHKPPPFTALSSSPAPTPGSTRSTRPPATMVPPTSGTSTPRTAPAVPTPGSAPTGSKKPIGSEASKKAGPKSSPRKPVPLRPGKAARDVPLSDLTTRPSPRQPQPSQQTTPALVLAPAQFLSSSPRPTSSGYSIFHLAGSTPFPLLMGPPGPKGDCGLPGPPGLPGLPGIPGARGPRGPPGPYGNPGLPGPPGAKGDMGLPGLSGNPGPPGRKGHKGYPGPAGHPGEQGQPGPEGSPGAKGYPGRQGLPGPVGDPGPKGSRGYIGLPGLFGLPGSDGERGLPGVPGKRGKMGMPGFPGVFGERGPPGLDGNPGELGLPGPPGVPGLIGDLGVLGPIGYPGPKGMKGLMGSVGEPGLKG

SEQ ID NO: 3280 - protein, 80 aa, Homo sapiens
ATTSSEATTTPRPLLSTPVDGAEDPRCLEALKPGNCGEYVVRWYYDKQVNSCARFWFSGCNGSGNRFNSEKECQETCIQG

SEQ ID NO: 3281 - protein, 142 aa, Homo sapiens
FDSYLVQIFGSSSPQPGFGMSGEELSESTPEPQKEISESLSVTRDQDEDDKAPEPTWADDLPATTSSEATTTPRPLLSTPVDGAEDPRCLEALKPGNCGEYVVRWYYDKQVNSCARFWFSGCNGSGNRFNSEKECQETCIQG

SEQ ID NO: 3282 - protein, 130 aa, Homo sapiens
GMPGTSIPGPPGPKGDRGGPGIPGFKGEPGLSIRGPKGVQGPRGPVGAPGLKGDGYPGVPGPRGLPGPPGPMGLRGVGDTGAKTLNTSHGLEDPSCPDCSFCHFSLAADIQPKWPALLQLIPASGTRQDG

SEQ ID NO: 3283 - protein, 67 aa, Homo sapiens
KGNPGNAQKGEAGERGPGGIPGYKGDKQYSREDREVEHNNEKYVACLLPSPALLQQSSLTHHGTCSH

SEQ ID NO: 3284 - protein, 1125 aa, Homo sapiens
MWNRYFVFYLLLLSAFTSQTVSGQRKKGPKSNLLARKSDVQGSICFIDIVFIVDSSESSKIALFDKQKDFVDSLSDKIFQLTPGRSLEYDIKLAALQFSSSVQIDPPFSSWKDLQTFKQKVKSMNLIGQGTFSYYAISNATRLLKREGRKDGVKVVLLMTDGIDHPKNPDVQSISEDARISGISFITIALSTVVNEAKLRLISGDSSSEPTLLLSDPTLVDKIQDRLDILFEKKCERKICECEKGDPGDPGPPGTHGNPGIKGERGPKGNPGNAQKGEAGERGPGGIPGYKGDKGERGECGKPGIKGDKGSPGPYGPKGPRGIQGITGPPGDPGPKGFQGNKGEPGPPGPYGSPGAPGIGQQGIKGERGQEGRPGAPGPIGVGEPGQPGPRGPEGVPGERGLPGEGFPGPKGEKGSEGPTGPQGLQGLSIKGEKGDIGPVGPQGPMGIPGIGSQGEQGIQGPIGPPGPQGPAGQGLPGSKGEVGQMGPTGPRGPVGIGVQGPKGEPGSIGLPGQPGVPGEDGAAGKKGEAGLPGARGPEGPPGKGQPGPKGDEGKKGSKGNQGQRGLPGPEGPKGEPGIMGPFGMPGTSIPGPPGPKGDRGGPGIPGFKGEPGLSIRGPKGVQGPRGPVGAPGLKGDGYPGVPGPRGLPGPPGPMGLRGVGDTGAKGEPGVRGPPGPSGPRGVGTQGPKGDTGQKGLPGPPGPPGYGSQGIKGEQGPQGFPGPKGTMGHGLPGQKGEHGERGDVGKKGDKGEIGEPGSPGKQGLQGPKGDLGLTKEEIIKLITEICGCGPKCKETPLELVFVIDSSESVGPENFQIIKNFVKTMADRVALDLATARIGIINYSHKVEKVANLKQFSSKDDFKLAVDNMQYLGEGTYTATALQAANDMFEDARPGVKKVALVITDGQTDSRDKEKLTEVVKNASDTNVEIFVIGVVKKNDPNFEIFHKEMNLIATDPEHVYQFDDFFTLQDTLKQKLFQKICEDFDSYLVQIFGSSSPQPGFGMSGEELSESTPEPQKEISESLSVTRDQDEDDKAPEPTWADDLPATTSSEATTTPRPLLSTPVDGAEDPRCLEALKPGNCGEYVVRWYYDKQVNSCARFWFSGCNGSGNRFNSEKECQETCIQG

SEQ ID NO: 3285 - protein, 1487 aa, Homo sapiens
MIRLGAPQTLVLLTLLVAAVLRCQGQDVQEAGSCVQDGQRYNDKDVWKPEPCRICVCDTGTVLCDDIICEDVKDCLSPEIPFGECCPICPTDLATASGQPGPKGQKGEPGDIKDIVGPKGPPGPQGPAGEQGPRGDRGDKGEKGAPGPRGRDGEPGTPGNPGPPGPPGPPGPPGLGGNFAAQMAGGFDEKAGGAQLGVMQGPMGPMGPRGPPGPAGAPGPQGFQGNPGEPGEPGVSGPMGPRGPPGPPGKPGDDGEAGKPGKAGERGPPGPQGARGFPGTPGLPGVKGHRGYPGLDGAKGEAGAPGVKGESGSPGENGSPGPMGPRGLPGERGRTGPAGAAGARGNDGQPGPAGPPGPVGPAGGPGFPGAPGAKGEAGPTGARGPEGAQGPRGEPGTPGSPGPAGASGNPGTDGIPGAKGSAGAPGIAGAPGFPGPRGPPGPQGATGPLGPKGQTGEPGIAGFKGEQGPKGEPGPAGPQGAPGPAGEEGKRGARGEPGGVGPIGPPGERGAPGNRGFPGQDGLAGPKGAPGERGPSGLAGPKGANGDPGRPGEPGLPGARGLTGRPGDAGPQGKVGPSGAPGEDGRPGPPGPQGARGQPGVMGFPGPKGANGEPGKAGEKGLPGAPGLRGLPGKDGETGAAGPPGPAGPAGERGEQGAPGPSGFQGLPGPPGPPGEGGKPGDQGVPGEAGAPGLVGPRGERGFPGERGSPGAQGLQGPRGLPGTPGTDGPKGASGPAGPPGAQGPPGLQGMPGERGAAGIAGPKGDRGDVGEKGPEGAPGKDGGRGLTGPIGPPGPAGANGEKGEVGPPGPAGSAGARGAPGERGETGPPGPAGFAGPPGADGQPGAKGEQGEAGQKGDAGAPGPQGPSGAPGPQGPTGVTGPKGARGAQGPPGATGFPGAAGRVGPPGSNGNPGPPGPPGPSGKDGPKGARGDSGPPGRAGEPGLQGPAGPPGEKGEPGDDGPSGAEGPPGPQGLAGQRGIVGLPGQRGERGFPGLPGPSGEPGKQGAPGASGDRGPPGPVGPPGLTGPAGEPGREGSPGADGPPGRDGAAGVKGDRGETGAVGAPGAPGPPGSPGPAGPTGKQGDRGEAGAQGPMGPSGPAGARGIQGPQGPRGDKGEAGEPGERGLKGHRGFTGLQGLPGPPGPSGDQGASGPAGPSGPRGPPGPVGPSGKDGANGIPGPIGPPGPRGRSGETGPAGPPGNPGPPGPPGPPGPGIDMSAFAGLGPREKGPDPLQYMRADQAAGGLRQHDAEVDATLKSLNNQIESIRSPEGSRKNPARTCRDLKLCHPEWKSGDYWIDPNQGCTLDAMKVFCNMETGETCVYPNPANVPKKNWWSSKSKEKKHIWFGETINGGFHFSYGDDNLAPNTANVQMTFLRLLSTEGSQNITYHCKNSIAYLDEAAGNLKKALLIQGSNDVEIRAEGNSRFTYTALKDGCTKHTGKWGKTVIEYRSQKTSRLPIIDIAPMDIGGPEQEFGVDIGPVCFL

SEQ ID NO: 3286 - protein, 1418 aa, Homo sapiens
MIRLGAPQTLVLLTLLVAAVLRCQGQDVRQPGPKGQKGEPGDIKDIVGPKGPPGPQGPAGEQGPRGDRGDKGEKGAPGPRGRDGEPGTPGNPGPPGPPGPPGPPGLGGNFAAQMAGGFDEKAGGAQLGVMQGPMGPMGPRGPPGPAGAPGPQGFQGNPGEPGEPGVSGPMGPRGPPGPPGKPGDDGEAGKPGKAGERGPPGPQGARGFPGTPGLPGVKGHRGYPGLDGAKGEAGAPGVKGESGSPGENGSPGPMGPRGLPGERGRTGPAGAAGARGNDGQPGPAGPPGPVGPAGGPGFPGAPGAKGEAGPTGARGPEGAQGPRGEPGTPGSPGPAGASGNPGTDGIPGAKGSAGAPGIAGAPGFPGPRGPPGPQGATGPLGPKGQTGEPGIAGFKGEQGPKGEPGPAGPQGAPGPAGEEGKRGARGEPGGVGPIGPPGERGAPGNRGFPGQDGLAGPKGAPGERGPSGLAGPKGANGDPGRPGEPGLPGARGLTGRPGDAGPQGKVGPSGAPGEDGRPGPPGPQGARGQPGVMGFPGPKGANGEPGKAGEKGLPGAPGLRGLPGKDGETGAAGPPGPAGPAGERGEQGAPGPSGFQGLPGPPGPPGEGGKPGDQGVPGEAGAPGLVGPRGERGFPGERGSPGAQGLQGPRGLPGTPGTDGPKGASGPAGPPGAQGPPGLQGMPGERGAAGIAGPKGDRGDVGEKGPEGAPGKDGGRGLTGPIGPPGPAGANGEKGEVGPPGPAGSAGARGAPGERGETGPPGPAGFAGPPGADGQPGAKGEQGEAGQKGDAGAPGPQGPSGAPGPQGPTGVTGPKGARGAQGPPGATGFPGAAGRVGPPGSNGNPGPPGPPGPSGKDGPKGARGDSGPPGRAGEPGLQGPAGPPGEKGEPGDDGPSGAEGPPGPQGLAGQRGIVGLPGQRGERGFPGLPGPSGEPGKQGAPGASGDRGPPGPVGPPGLTGPAGEPGREGSPGADGPPGRDGAAGVKGDRGETGAVGAPGAPGPPGSPGPAGPTGKQGDRGEAGAQGPMGPSGPAGARGIQGPQGPRGDKGEAGEPGERGLKGHRGFTGLQGLPGPPGPSGDQGASGPAGPSGPRGPPGPVGPSGKDGANGIPGPIGPPGPRGRSGETGPAGPPGNPGPPGPPGPPGPGIDMSAFAGLGPREKGPDPLQYMRADQAAGGLRQHDAEVDATLKSLNNQIESIRSPEGSRKNPARTCRDLKLCHPEWKSGDYWIDPNQGCTLDAMKVFCNMETGETCVYPNPANVPKKNWWSSKSKEKKHIWFGETINGGFHFSYGDDNLAPNTANVQMTFLRLLSTEGSQNITYHCKNSIAYLDEAAGNLKKALLIQGSNDVEIRAEGNSRFTYTALKDGCTKHTGKWGKTVIEYRSQKTSRLPIIDIAPMDIGGPEQEFGVDIGPVCFL

SEQ ID NO: 3287 - protein, 1466 aa, Homo sapiens
MMSFVQKGSWLLLALLHPTIILAQQEAVEGGCSHLGQSYADRDVWKPEPCQICVCDSGSVLCDDIICDDQELDCPNPEIPFGECCAVCPQPPTAPTRPPNGQGPQGPKGDPGPPGIPGRNGDPGIPGQPGSPGSPGPPGICESCPTGPQNYSPQYDSYDVKSGVAVGGLAGYPGPAGPPGPPGPPGTSGHPGSPGSPGYQGPPGEPGQAGPSGPPGPPGAIGPSGPAGKDGESGRPGRPGERGLPGPPGIKGPAGIPGFPGMKGHRGFDGRNGEKGETGAPGLKGENGLPGENGAPGPMGPRGAPGERGRPGLPGAAGARGNDGARGSDGQPGPPGPPGTAGFPGSPGAKGEVGPAGSPGSNGAPGQRGEPGPQGHAGAQGPPGPPGINGSPGGKGEMGPAGIPGAPGLMGARGPPGPAGANGAPGLRGGAGEPGKNGAKGEPGPRGERGEAGIPGVPGAKGEDGKDGSPGEPGANGLPGAAGERGAPGFRGPAGPNGIPGEKGPAGERGAPGPAGPRGAAGEPGRDGVPGGPGMRGMPGSPGGPGSDGKPGPPGSQGESGRPGPPGPSGPRGQPGVMGFPGPKGNDGAPGKNGERGGPGGPGPQGPPGKNGETGPQGPPGPTGPGGDKGDTGPPGPQGLQGLPGTGGPPGENGKPGEPGPKGDAGAPGAPGGKGDAGAPGERGPPGLAGAPGLRGGAGPPGPEGGKGAAGPPGPPGAAGTPGLQGMPGERGGLGSPGPKGDKGEPGGPGADGVPGKDGPRGPTGPIGPPGPAGQPGDKGEGGAPGLPGIAGPRGSPGERGETGPPGPAGFPGAPGQNGEPGGKGERGAPGEKGEGGPPGVAGPPGGSGPAGPPGPQGVKGERGSPGGPGAAGFPGARGLPGPPGSNGNPGPPGPSGSPGKDGPPGPAGNTGAPGSPGVSGPKGDAGQPGEKGSPGAQGPPGAPGPLGIAGITGARGLAGPPGMPGPRGSPGPQGVKGESGKPGANGLSGERGPPGPQGLPGLAGTAGEPGRDGNPGSDGLPGRDGSPGGKGDRGENGSPGAPGAPGHPGPPGPVGPAGKSGDRGESGPAGPAGAPGPAGSRGAPGPQGPRGDKGETGERGAAGIKGHRGFPGNPGAPGSPGPAGQQGAIGSPGPAGPRGPVGPSGPPGKDGTSGHPGPIGPPGPRGNRGERGSEGSPGHPGQPGPPGPPGAPGPCCGGVGAAAIAGIGGEKAGGFAPYYGDEPMDFKINTDEIMTSLKSVNGQIESLISPDGSRKNPARNCRDLKFCHPELKSGEYWVDPNQGCKLDAIKVFCNMETGETCISANPLNVPRKHWWTDSSAEKKHVWFGESMDGGFQFSYGNPELPEDVLDVHLAFLRLLSSRASQNITYHCKNSIAYMDQASGNVKKALKLMGSNEGEFKAEGNSKFTYTVLEDGCTKHTGEWSKTVFEYRTRKAVRLPIVDIAPYDIGGPDQEFGVDVGPVCFL

SEQ ID NO: 3288 - protein, 1163 aa, Homo sapiens
MMSFVQKGSWLLLALLHPTIILAQQEAVEGGCSHLGQSYADRDVWKPEPCQICVCDSGSVLCDDIICDDQELDCPNPEIPFGECCAVCPQPPTAPTRPPNGQGPQGPKGDPGPPGIPGRNGDPGIPGQPGSPGSPGPPGICESCPTGPQNYSPQYDSYDVKSGVAVGGLAGYPGPAGPPGPPGPPGTSGHPGSPGSPGYQGPPGEPGQAGPSGPPGPPGAIGPSGPAGKDGESGRPGRPGERGLPGPPGIKGPAGIPGFPGMKGHRGFDGRNGEKGETGAPGLKGENGLPGENGAPGPMGPRGAPGERGRPGLPGAAGARGNDGARGSDGQPGPPGPPGTAGFPGSPGAKGEVGPAGSPGSNGAPGQRGEPGPQGHAGAQGPPGPPGINGSPGGKGEMGPAGIPGAPGLMGARGPPGPAGANGAPGLRGGAGEPGKNGAKGEPGPRGERGEAGIPGVPGAKGEDGKDGSPGEPGANGLPGAAGERGAPGFRGPAGPNGIPGEKGPAGERGAPGPAGPRGAAGEPGRDGVPGGPGMRGMPGSPGGPGSDGKPGPPGSQGESGRPGPPGPSGPRGQPGVMGFPGPKGNDGAPGKNGERGGPGGPGPQGPPGKNGETGPQGPPGPTGPGGDKGDTGPPGPQGLQGLPGTGGPPGENGKPGEPGPKGDAGAPGAPGGKGDAGAPGERGPPGLAGAPGLRGGAGPPGPEGGKGAAGPPGPPGAAGTPGLQGMPGERGGLGSPGPKGDKGEPGGPGADGVPGKDGPRGPTGPIGPPGPAGQPGDKGEGGAPGLPGIAGPRGSPGERGETGPPGPAGFPGAPGQNGEPGGKGERGAPGEKGEGGPPGVAGPPGKDGTSGHPGPIGPPGPRGNRGERGSEGSPGHPGQPGPPGPPGAPGPCCGGVGAAAIAGIGGEKAGGFAPYYGDEPMDFKINTDEIMTSLKSVNGQIESLISPDGSRKNPARNCRDLKFCHPELKSGEYWVDPNQGCKLDAIKVFCNMETGETCISANPLNVPRKHWWTDSSAEKKHVWFGESMDGGFQFSYGNPELPEDVLDVHLAFLRLLSSRASQNITYHCKNSIAYMDQASGNVKKALKLMGSNEGEFKAEGNSKFTYTVLEDGCTKHTGEWSKTVFEYRTRKAVRLPIVDIAPYDIGGPDQEFGVDVGPVCFL

SEQ ID NO: 3289 - protein, 90 aa, Homo sapiens
  SITE 1: note = misc_feature - Xaa can be any naturally occurring amino acid
XRGAPGERGRPGLPGAAGARGNDGARGSDGQPGPPGPPGTAGFPGSPGAKGPPGINGSPGGKGEMGPAGIPGAPGLMGARGPPGPAGANG

SEQ ID NO: 3290 - protein, 1669 aa, Homo sapiens
MGPRLSVWLLLLPAALLLHEEHSRAAAKGGCAGSGCGKCDCHGVKGQKGERGLPGLQGVIGFPGMQGPEGPQGPPGQKGDTGEPGLPGTKGTRGPPGASGYPGNPGLPGIPGQDGPPGPPGIPGCNGTKGERGPLGPPGLPGFAGNPGPPGLPGMKGDPGEILGHVPGMLLKGERGFPGIPGTPGPPGLPGLQGPVGPPGFTGPPGPPGPPGPPGEKGQMGLSFQGPKGDKGDQGVSGPPGVPGQAQVQEKGDFATKGEKGQKGEPGFQGMPGVGEKGEPGKPGPRGKPGKDGDKGEKGSPGFPGEPGYPGLIGRQGPQGEKGEAGPPGPPGIVIGTGPLGEKGERGYPGTPGPRGEPGPKGFPGLPGQPGPPGLPVPGQAGAPGFPGERGEKGDRGFPGTSLPGPSGRDGLPGPPGSPGPPGQPGYTNGIVECQPGPPGDQGPPGIPGQPGFIGEIGEKGQKGESCLICDIDGYRGPPGPQGPPGEIGFPGQPGAKGDRGLPGRDGVAGVPGPQGTPGLIGQPGAKGEPGEFYFDLRLKGDKGDPGFPGQPGMPGRAGSPGRDGHPGLPGPKGSPGSVGLKGERGPPGGVGFPGSRGDTGPPGPPGYGPAGPIGDKGQAGFPGGPGSPGLPGPKGEPGKIVPLPGPPGAEGLPGSPGFPGPQGDRGFPGTPGRPGLPGEKGAVGQPGIGFPGPPGPKGVDGLPGDMGPPGTPGRPGFNGLPGNPGVQGQKGEPGVGLPGLKGLPGLPGIPGTPGEKGSIGVPGVPGEHGAIGPPGLQGIRGEPGPPGLPGSVGSPGVPGIGPPGARGPPGGQGPPGLSGPPGIKGEKGFPGFPGLDMPGPKGDKGAQGLPGITGQSGLPGLPGQQGAPGIPGFPGSKGEMGVMGTPGQPGSPGPVGAPGLPGEKGDHGFPGSSGPRGDPGLKGDKGDVGLPGKPGSMDKVDMGSMKGQKGDQGEKGQIGPIGEKGSRGDPGTPGVPGKDGQAGQPGQPGPKGDPGISGTPGAPGLPGPKGSVGGMGLPGTPGEKGVPGIPGPQGSPGLPGDKGAKGEKGQAGPPGIGIPGLRGEKGDQGIAGFPGSPGEKGEKGSIGIPGMPGSPGLKGSPGSVGYPGSPGLPGEKGDKGLPGLDGIPGVKGEAGLPGTPGPTGPAGQKGEPGSDGIPGSAGEKGEPGLPGRGFPGFPGAKGDKGSKGEVGFPGLAGSPGIPGSKGEQGFMGPPGPQGQPGLPGSPGHATEGPKGDRGPQGQPGLPGLPGPMGPPGLPGIDGVKGDKGNPGWPGAPGVPGPKGDPGFQGMPGIGGSPGITGSKGDMGPPGVPGFQGPKGLPGLQGIKGDQGDQGVPGAKGLPGPPGPPGPYDIIKGEPGLPGPEGPPGLKGLQGLPGPKGQQGVTGLVGIPGPPGIPGFDGAPGQKGEMGPAGPTGPRGFPGPPGPDGLPGSMGPPGTPSVDHGFLVTRHSQTIDDPQCPSGTKILYHGYSLLYVQGNERAHGQDLGTAGSCLRKFSTMPFLFCNINNVCNFASRNDYSYWLSTPEPMPMSMAPITGENIRPFISRCAVCEAPAMVMAVHSQTIQIPPCPSGWSSLWIGYSFVMHTSAGAEGSGQALASPGSCLEEFRSAPFIECHGRGTCNYYANAYSFWLATIERSEMFKKPTPSTLKAGELRTHVSRCQVCMRRT

SEQ ID NO: 3291 - protein, 519 aa, Homo sapiens
MGPRLSVWLLLLPAALLLHEEHSRAAAKGGCAGSGCGKCDCHGVKGQKGERGLPGLQGVIGFPGMQGPEGPQGPPGQKGDTGEPGLPGTKGTRGPPGASGYPGNPGLPGIPGQDGPPGPPGIPGCNGTKGERGPLGPPGLPGFAGNPGPPGLPGMKGDPGEILGHVPGMLLKGERGFPGIPGTPGPPGLPGLQGPVGPPGFTGPPGPPGPPGPPGEKGQMGLSFQGPKGDKGDQGVSGPPGVPGQAQVQEKGDFATKGEKGQKGEPGFQGMPGVGEKGEPGKPGPRGKPGKDGDKGEKGSPGFPGEPGYPGLIGRQGPQGEKGEAGPPGPPGIVIGTGPLGEKGERGYPGTPGPRGEPGPKGFPGLPGQPGPPGLPVPGQAGAPGFPGERGEKGDRGFPGTSLPGPSGRDGLPGPPGSPGPPGQPGYTNGIVECQPGPPGDQGPPGIPGQPGFIGEIGEKGQKGESCLICDIDGYRGPPGPQGPPGEIGFPGQPGAKGDRGLPGRDGVAGVPLLFQIHK

SEQ ID NO: 3292 - protein, 223 aa, Homo sapiens
MQGPEGPQGPPGQKGDTGEPGLPGTKGTRGPPGASGYPGNPGLPGIPGQDGPPGPPGIPGCNGTKGERGPLGPPGLPGFAGNPGPPGLPGMKGDPGEILGHVPGMLLKGERGFPGIPGTPGPPGLPGLQGPVGPPGFTGPPGPPGPPGPPGEKGQMGLSFQGPKGDKGDQGVSGPPGVPGQAQVQEKGDFATKGEKGQKGEPGFQGMPGVGEKGEPGKPGPRV

SEQ ID NO: 3293 - protein, 105 aa, Homo sapiens
MGRDQRAVAGPALRRWLLLGTVTVGFLAQSVLAGVKKFDVPCGGRDCSGGCQCYPEKGGRGQPGPVGPQGYNGPPGLQGFPGLQGRKGDKGERGAPGVTGPKGDV

SEQ ID NO: 3294 - protein, 1712 aa, Homo sapiens
MGRDQRAVAGPALRRWLLLGTVTVGFLAQSVLAGVKKFDVPCGGRDCSGGCQCYPEKGGRGQPGPVGPQGYNGPPGLQGFPGLQGRKGDKGERGAPGVTGPKGDVGARGVSGFPGADGIPGHPGQGGPRGRPGYDGCNGTQGDSGPQGPPGSEGFTGPPGPQGPKGQKGEPYALPKEERDRYRGEPGEPGLVGFQGPPGRPGHVGQMGPVGAPGRPGPPGPPGPKGQQGNRGLGFYGVKGEKGDVGQPGPNGIPSDTLHPIIAPTGVTFHPDQYKGEKGSEGEPGIRGISLKGEEGIMGFPGLRGYPGLSGEKGSPGQKGSRGLDGYQGPDGPRGPKGEAGDPGPPGLPAYSPHPSLAKGARGDPGFPGAQGEPGSQGEPGDPGLPGPPGLSIGDGDQRRGLPGEMGPKGFIGDPGIPALYGGPPGPDGKRGPPGPPGLPGPPGPDGFLFGLKGAKGRAGFPGLPGSPGARGPKGWKGDAGECRCTEGDEAIKGLPGLPGPKGFAGINGEPGRKGDRGDPGQHGLPGFPGLKGVPGNIGAPGPKGAKGDSRTITTKGERGQPGVPGVPGMKGDDGSPGRDGLDGFPGLPGPPGDGIKGPPGDPGYPGIPGTKGTPGEMGPPGLGLPGLKGQRGFPGDAGLPGPPGFLGPPGPAGTPGQIDCDTDVKRAVGGDRQEAIQPGCIGGPKGLPGLPGPPGPTGAKGLRGIPGFAGADGGPGPRGLPGDAGREGFPGPPGFIGPRGSKGAVGLPGPDGSPGPIGLPGPDGPPGERGLPGEVLGAQPGPRGDAGVPGQPGLKGLPGDRGPPGFRGSQGMPGMPGLKGQPGLPGPSGQPGLYGPPGLHGFPGAPGQEGPLGLPGIPGREGLPGDRGDPGDTGAPGPVGMKGLSGDRGDAGFTGEQGHPGSPGFKGIDGMPGTPGLKGDRGSPGMDGFQGMPGLKGRPGFPGSKGEAGFFGIPGLKGLAGEPGFKGSRGDPGPPGPPPVILPGMKDIKGEKGDEGPMGLKGYLGAKGIQGMPGIPGLSGIPGLPGRPGHIKGVKGDIGVPGIPGLPGFPGVAGPPGITGFPGFIGSRGDKGAPGRAGLYGEIGATGDFGDIGDTINLPGRPGLKGERGTTGIPGLKGFFGEKGTEGDIGFPGITGVTGVQGPPGLKGQTGFPGLTGPPGSQGELGRIGLPGGKGDDGWPGAPGLPGFPGLRGIRGLHGLPGTKGFPGSPGSDIHGDPGFPGPPGERGDPGEANTLPGPVGVPGQKGDQGAPGERGPPGSPGLQGFPGITPPSNISGAPGDKGAPGIFGLKGYRGPPGPPGSAALPGSKGDTGNPGAPGTPGTKGWAGDSGPQGRPGVFGLPGEKGPRGEQGFMGNTGPTGAVGDRGPKGPKGDPGFPGAPGTVGAPGIAGIPQKIAVQPGTVGPQGRRGPPGAPGEMGPQGPPGEPGFRGAPGKAGPQGRGGVSAVPGFRGDEGPIGHQGPIGQEGAPGRPGSPGLPGMPGRSVSIGYLLVKHSQTDQEPMCPVGMNKLWSGYSLLYFEGQEKAHNQDLGLAGSCLARFSTMPFLYCNPGDVCYYASRNDKSYWLSTTAPLPMMPVAEDEIKPYISRCSVCEAPAIAIAVHSQDVSIPHCPAGWRSLWIGYSFLMHTAAGDEGGGQSLVSPGSCLEDFRATPFIECNGGRGTCHYYANKYSFWLTTIPEQSFQGSPSADTLKAGLIRTHISRCQVCMKNL

SEQ ID NO: 3295 - protein, 42 aa, Homo sapiens
  SITE 1: note = misc_feature - Xaa can be any naturally occurring amino acid
XGDPGQHGLPGFPGLKVRSNFIMKLARHSEASPGVPFLPFIS

SEQ ID NO: 3296 - protein, 199 aa, Homo sapiens
ATWTTRGFVFTRHSQTTAIPSCPEGTVPLYSGFSFLFVQGNQRAHGQDLGTLGSCLQRFTTMPFLFCNVNDVCNFASRNDYSYWLSTPALMPMNMAPITGRALEPYISRCTVCEGPAIAIAVHSQTTDIPPCPHGWISLWKGFSFIMKAYSINCESWGIRKNNKSLSGVHEEKTLKLKKTAELLFFILKNKVMTEHAVI

SEQ ID NO: 3297 - protein, 156 aa, Homo sapiens
GNPGEKGNRGVPGMPGLKGLKGLPGPAGPPGPRGDLGSTGNPGEPGLRGIPGSMGNMGMPGSKGKRGTLGFPGRAGRPGLPGIHGLQGDKGEPGYSEGTRPGPPGPTGDPGLPGDMGKKGEMGQPGPPGHLGPAGPEGAPGSPGSPGLPVPAAPSL

SEQ ID NO: 3298 - protein, 1670 aa, Homo sapiens
MSARTAPRPQVLLLPLLLVLLAAAPAASKGCVCKDKGQCFCDGAKGEKGEKGFPGPPGSPGQKGFTGPEGLPGPQGPKGFPGLPGLTGSKGVRGISGLPGFSGSPGLPGTPGNTGPYGLVGVPGCSGSKGEQGFPGLPGTLGYPGIPGAAGLKGQKGAPAKEEDIELDAKGDPGLPGAPGPQGLPGPPGFPGPVGPPGPPGFFGFPGAMGPRGPKGHMGERVIGHKGERGVKGLTGPPGPPGTVIVTLTGPDNRTDLKGEKGDKGAMGEPGPPGPSGLPGESYGSEKGAPGDPGLQGKPGKDGVPGFPGSEGVKGNRGFPGLMGEDGIKGQKGDIGPPGFRGPTEYYDTYQEKGDEGTPGPPGPRGARGPQGPSGPPGVPGSPGSSRPGLRGAPGWPGLKGSKGERGRPGKDAMGTPGSPGCAGSPGLPGSPGPPGPPGDIVFRKGPPGDHGLPGYLGSPGIPGVDGPKGEPGLLCTQCPYIPGPPGLPGLPGLHGVKGIPGRQGAAGLKGSPGSPGNTGLPGFPGFPGAQGDPGLKGEKGETLQPEGQVGVPGDPGLRGQPGRKGLDGIPGTPGVKGLPGPKGELALSGEKGDQGPPGDPGSPGSPGPAGPAGPPGYGPQGEPGLQGTQGVPGAPGPPGEAGPRGELSVSTPVPGPPGPPGPPGHPGPQGPPGIPGSLGKCGDPGLPGPDGEPGIPGIGFPGPPGPKGDQGFPGTKGSLGCPGKMGEPGLPGKPGLPGAKGEPAVAMPGGPGTPGFPGERGNSGEHGEIGLPGLPGLPGTPGNEGLDGPRGDPGQPGPPGEQGPPGRCIEGPRGAQGLPGLNGLKGQQGRRGKTGPKGDPGIPGLDRSGFPGETGSPGIPGHQGEMGPLGQRGYPGNPGILGPPGEDGVIGMMGFPGAIGPPGPPGNPGTPGQRGSPGIPGVKGQRGTPGAKGEQGDKGNPGPSEISHVIGDKGEPGLKGFAGNPGEKGNRGVPGMPGLKGLKGLPGPAGPPGPRGDLGSTGNPGEPGLRGIPGSMGNMGMPGSKGKRGTLGFPGRAGRPGLPGIHGLQGDKGEPGYSEGTRPGPPGPTGDPGLPGDMGKKGEMGQPGPPGHLGPAGPEGAPGSPGSPGLPGKPGPHGDLGFKGIKGLLGPPGIRGPPGLPGFPGSPGPMGIRGDQGRDGIPGPAGEKGETGLLRAPPGPRGNPGAQGAKGDRGAPGFPGLPGRKGAMGDAGPRGPTGIEGFPGPPGLPGAIIPGQTGNRGPPGSRGSPGAPGPPGPPGSHVIGIKGDKGSMGHPGPKGPPGTAGDMGPPGRLGAPGTPGLPGPRGDPGFQGFPGVKGEKGNPGFLGSIGPPGPIGPKGPPGVRGDPGTLKIISLPGSPGPPGTPGEPGMQGEPGPPGPPGNLGPCGPRGKPGKDGKPGTPGPAGEKGNKGSKGEPGPAGSDGLPGLKGKRGDSGSPATWTTRGFVFTRHSQTTAIPSCPEGTVPLYSGFSFLFVQGNQRAHGQDLGTLGSCLQRFTTMPFLFCNVNDVCNFASRNDYSYWLSTPALMPMNMAPITGRALEPYISRCTVCEGPAIAIAVHSQTTDIPPCPHGWISLWKGFSFIMFTSAGSEGTGQALASPGSCLEEFRASPFLECHGRGTCNYYSNSYSFWLASLNPERMFRKPIPSTVKAGELEKIISRCQVCMKKRH

SEQ ID NO: 3299 - protein, 155 aa, Homo sapiens
VRGDPGTLKIISLPGSPGPPGTPGEPGMQGEPGPPGPPGNLGPCGPRGKPGKDGKPGTPGPAGEKGNKGSKGEPGPAGSDGLPGLKGKRGDSGSPATWTTRGFVFTRHSQTTAIPSCPEGTVPLYSGFSFLFVQGNQRAHGQDLDALFVKVLRSP

SEQ ID NO: 3300 - protein, 1690 aa, Homo sapiens
MWSLHIVLMRCSFRLTKSLATGPWSLILILFSVQYVYGSGKKYIGPCGGRDCSVCHCVPEKGSRGPPGPPGPQGPIGPLGAPGPIGLSGEKGMRGDRGPPGAAGDKGDKGPTGVPGFPGLDGIPGHPGPPGPRGKPGMSGHNGSRGDPGFPGGRGALGPGGPLGHPGEKGEKGNSVFILGAVKGIQGDRGDPGLPGLPGSWGAGGPAGPTGYPGEPGLVGPPGQPGRPGLKGNPGVGVKGQMGDPGEVGQQGSPGPTLLVEPPDFCLYKGEKGIKGIPGMVGLPGPPGRKGESGIGAKGEKGIPGFPGPRGDPGSYGSPGFPGLKGELGLVGDPGLFGLIGPKGDPGNRGHPGPPGVLVTPPLPLKGPPGDPGFPGRYGETGDVGPPGPPGLLGRPGEACAGMIGPPGPQGFPGLPGLPGEAGIPGRPDSAPGKPGKPGSPGLPGAPGLQGLPGSSVIYCSVGNPGPQGIKGKVGPPGGRGPKGEKGNEGLCACEPGPMGPPGPPGLPGRQGSKGDLGLPGWLGTKGDPGPPGAEGPPGLPGKHGASGPPGNKGAKGDMVVSRVKGHKGERGPDGPPGFPGQPGSHGRDGHAGEKGDPGPPGDHEDATPGGKGFPGPLGPPGKAGPVGPPGLGFPGPPGERGHPGVPGHPGVRGPDGLKGQKGDTISCNVTYPGRHGPPGFDGPPGPKGFPGPQGAPGLSGSDGHKGRPGTPGTAEIPGPPGFRGDMGDPGFGGEKGSSPVGPPGPPGSPGVNGQKGIPGDPAFGHLGPPGKRGLSGVPGIKGPRGDPGCPGAEGPAGIPGFLGLKGPKGREGHAGFPGVPGPPGHSCERGAPGIPGQPGLPGYPGSPGAPGGKGQPGDVGPPGPAGMKGLPGLPGRPGAHGPPGLPGIPGPFGDDGLPGPPGPKGPRGLPGFPGFPGERGKPGAEGCPGAKGEPGEKGMSGLPGDRGLRGAKGAIGPPGDEGEMAIISQKGTPGEPGPPGDDGFPGERGDKGTPGMQGRRGEPGRYGPPGFHRGEPGEKGQPGPPGPPGPPGSTGLRGFIGFPGLPGDQGEPGSPGPPGFSGIDGARGPKGNKGDPASHFGPPGPKGEPGSPGCPGHFGASGEQGLPGIQGPRGSPGRPGPPGSSGPPGCPGDHGMPGLRGQPGEMGDPGPRGLQGDPGIPGPPGIKGPSGSPGLNGLHGLKGQKGTKGASGLHDVGPPGPVGIPGLKGERGDPGSPGISPPGPRGKKGPPGPPGSSGPPGPAGATGRAPKDIPDPGPPGDQGPPGPDGPRGAPGPPGLPGSVDLLRGEPGDCGLPGPPGPPGPPGPPGYKGFPGCDGKDGQKGPVGFPGPQGPHGFPGPPGEKGLPGPPGRKGPTGLPGPRGEPGPPADVDDCPRIPGLPGAPGMRGPEGAMGLPGMRGPSGPGCKGEPGLDGRRGVDGVPGSPGPPGRKGDTGEDGYPGGPGPPGPIGDPGPKGFGPGYLGGFLLVLHSQTDQEPTCPLGMPRLWTGYSLLYLEGQEKAHNQDLGLAGSCLPVFSTLPFAYCNIHQVCHYAQRNDRSYWLASAAPLPMMPLSEEAIRPYVSRCAVCEAPAQAVAVHSQDQSIPPCPQTWRSLWIGYSFLMHTGAGDQGGGQALMSPGSCLEDFRAAPFLECQGRQGTCHFFANKYSFWLTTVKADLQFSSAPAPDTLKESQAQRQKISRCQVCVKYS

SEQ ID NO: 3301 - protein, 296 aa, Homo sapiens
MWSLHIVLMRCSFRLTKSLATGPWSLILILFSVQYVYGSGKKYIGPCGGRDCSVCHCVPEKGSRGPPGPPGPQGPIGPLGAPGPIGLSGEKGMRGDRGPPGAAGDKGDKGPTGVPGFPGLDGIPGHPGPPGPRGKPGMSGHNGSRGDPGFPGGRGALGPGGPLGHPGEKGEKGNSVFILGAVKGIQGDRGDPGLPGLPGSWGAGGPAGPTGYPGEPGLVGPPGQPGRPGLKGNPGVGVKGQMGDPGEVGQQGSPGPTLLVEPPDFCLYKGEKGIKGIPGMVGLPGPPGRKGESGIG

SEQ ID NO: 3302 - protein, 73 aa, Homo sapiens
FASRNDYSYWLSTPEPMPMSMQPLKGQSIQPFISRCAVCEAPAVVIAVHSQTIQIPHCPQGWDSLWIGYSFMM

SEQ ID NO: 3303 - protein, 695 aa, Homo sapiens
MGPPGPPGFPGERGQKGDEGPPGISIPGPPGLDGQPGAPGLPGPPGPAGPHIPPSDEICEPGPPGPPGSPGDKGLQGEQGVKGDKGDTCFNCIGTGISGPPGQPGLPGLPGPPGSLGFPGQKGEKGQAGATGPKGLPGIPGAPGAPGFPGSKGEPGDILTFPGMKGDKGELGSPGAPGLPGLPGTPGQDGLPGLPGPKGEPGGITFKGERGPPGNPGLPGLPGNIGPMGPPGFGPPGPVGEKGIQGVAGNPGQPGIPGPKGDPGQTITQPGKPGLPGNPGRDGDVGLPGDPGLPGQPGLPGIPGSKGEPGIPGIGLPGPPGPKGFPGIPGPPGAPGTPGRIGLEGPPGPPGFPGPKGEPGFALPGPPGPPGLPGFKGALGPKGDRGFPGPPGPPGRTGLDGLPGPKGDVGPNGQPGPMGPPGLPGIGVQGPPGPPGIPGPIGQPGLHGIPGEKGDPGPPGLDVPGPPGERGSPGIPGAPGPIGPPGSPGLPGKAGASGFPGTKGEMGMMGPPGPPGPLGIPGRSGVPGLKGDDGLQGQPGLPGPTGEKGSKGEPGLPGPPGPMDPNLLGSKGEKGEPGLPGIPGVSGPKGYQGLPGDPGQPGLSGQPGLPGPPGPKGNPGLPGQPGLIGPPGLKGTIGDMGFPGPQGVEGPPGPSGVPGQPGSPGLPGQKGDKGDPGISSIGLPGLPGPKVIFGI

SEQ ID NO: 3304 - protein, 1691 aa, Homo sapiens
MKLRGVSLAAGLFLLALSLWGQPAEAAACYGCSPGSKCDCSGIKGEKGERGFPGLEGHPGLPGFPGPEGPPGPRGQKGDDGIPGPPGPKGIRGPPGLPGFPGTPGLPGMPGHDGAPGPQGIPGCNGTKGERGFPGSPGFPGLQGPPGPPGIPGMKGEPGSIIMSSLPGPKGNPGYPGPPGIQGLPGPTGIPGPIGPPGPPGLMGPPGPPGLPGPKGNMGLNFQGPKGEKGEQGLQGPPGPPGQISEQKRPIDVEFQKGDQGLPGDRGPPGPPGIRGPPGPPGGEKGEKGEQGEPGKRGKPGKDGENGQPGIPGLPGDPGYPGEPGRDGEKGQKGDTGPPGPPGLVIPRPGTGITIGEKGNIGLPGLPGEKGERGFPGIQGPPGLPGPPGAAVMGPPGPPGFPGERGQKGDEGPPGISIPGPPGLDGQPGAPGLPGPPGPAGPHIPPSDEICEPGPPGPPGSPGDKGLQGEQGVKGDKGDTCFNCIGTGISGPPGQPGLPGLPGPPGSLGFPGQKGEKGQAGATGPKGLPGIPGAPGAPGFPGSKGEPGDILTFPGMKGDKGELGSPGAPGLPGLPGTPGQDGLPGLPGPKGEPGGITFKGERGPPGNPGLPGLPGNIGPMGPPGFGPPGPVGEKGIQGVAGNPGQPGIPGPKGDPGQTITQPGKPGLPGNPGRDGDVGLPGDPGLPGQPGLPGIPGSKGEPGIPGIGLPGPPGPKGFPGIPGPPGAPGTPGRIGLEGPPGPPGFPGPKGEPGFALPGPPGPPGLPGFKGALGPKGDRGFPGPPGPPGRTGLDGLPGPKGDVGPNGQPGPMGPPGLPGIGVQGPPGPPGIPGPIGQPGLHGIPGEKGDPGPPGLDVPGPPGERGSPGIPGAPGPIGPPGSPGLPGKAGASGFPGTKGEMGMMGPPGPPGPLGIPGRSGVPGLKGDDGLQGQPGLPGPTGEKGSKGEPGLPGPPGPMDPNLLGSKGEKGEPGLPGIPGVSGPKGYQGLPGDPGQPGLSGQPGLPGPPGPKGNPGLPGQPGLIGPPGLKGTIGDMGFPGPQGVEGPPGPSGVPGQPGSPGLPGQKGDKGDPGISSIGLPGLPGPKGEPGLPGYPGNPGIKGSVGDPGLPGLPGTPGAKGQPGLPGFPGTPGPPGPKGISGPPGNPGLPGEPGPVGGGGHPGQPGPPGEKGKPGQDGIPGPAGQKGEPGQPGFGNPGPPGLPGLSGQKGDGGLPGIPGNPGLPGPKGEPGFHGFPGVQGPPGPPGSPGPALEGPKGNPGPQGPPGRPGPTGFQGLPGPEGPPGLPGNGGIKGEKGNPGQPGLPGLPGLKGDQGPPGLQGNPGRPGLNGMKGDPGLPGVPGFPGMKGPSGVPGSAGPEGEPGLIGPPGPPGLPGPSGQSIIIKGDAGPPGIPGQPGLKGLPGPQGPQGLPGPTGPPGDPGRNGLPGFDGAGGRKGDPGLPGQPGTRGLDGPPGPDGLQGPPGPPGTSSVAHGFLITRHSQTTDAPQCPQGTLQVYEGFSLLYVQGNKRAHGQDLGTAGSCLRRFSTMPFMFCNINNVCNFASRNDYSYWLSTPEPMPMSMQPLKGQSIQPFISRCAVCEAPAVVIAVHSQTIQIPHCPQGWDSLWIGYSFMMHTSAGAEGSGQALASPGSCLEEFRSAPFIECHGRGTCNYYANSYSFWLATVDVSDMFSKPQSETLKAGDLRTRISRCQVCMKRT

SEQ ID NO: 3305 - protein, 1685 aa, Homo sapiens
MKLRGVSLAAGLFLLALSLWGQPAEAAACYGCSPGSKCDCSGIKGEKGERGFPGLEGHPGLPGFPGPEGPPGPRGQKGDDGIPGPPGPKGIRGPPGLPGFPGTPGLPGMPGHDGAPGPQGIPGCNGTKGERGFPGSPGFPGLQGPPGPPGIPGMKGEPGSIIMSSLPGPKGNPGYPGPPGIQGLPGPTGIPGPIGPPGPPGLMGPPGPPGLPGPKGNMGLNFQGPKGEKGEQGLQGPPGPPGQISEQKRPIDVEFQKGDQGLPGDRGPPGPPGIRGPPGPPGGEKGEKGEQGEPGKRGKPGKDGENGQPGIPGLPGDPGYPGEPGRDGEKGQKGDTGPPGPPGLVIPRPGTGITIGEKGNIGLPGLPGEKGERGFPGIQGPPGLPGPPGAAVMGPPGPPGFPGERGQKGDEGPPGISIPGPPGLDGQPGAPGLPGPPGPAGPHIPPSDEICEPGPPGPPGSPGDKGLQGEQGVKGDKGDTCFNCIGTGISGPPGQPGLPGLPGPPGSLGFPGQKGEKGQAGATGPKGLPGIPGAPGAPGFPGSKGEPGDILTFPGMKGDKGELGSPGAPGLPGLPGTPGQDGLPGLPGPKGEPGGITFKGERGPPGNPGLPGLPGNIGPMGPPGFGPPGPVGEKGIQGVAGNPGQPGIPGPKGDPGQTITQPGKPGLPGNPGRDGDVGLPGDPGLPGQPGLPGIPGSKGEPGIPGIGLPGPPGPKGFPGIPGPPGAPGTPGRIGLEGPPGPPGFPGPKGEPGFALPGPPGPPGLPGFKGALGPKGDRGFPGPPGPPGRTGLDGLPGPKGDVGPNGQPGPMGPPGLPGIGVQGPPGPPGIPGPIGQPGLHGIPGEKGDPGPPGLDVPGPPGERGSPGIPGAPGPIGPPGSPGLPGKAGASGFPGTKGEMGMMGPPGPPGPLGIPGRSGVPGLKGDDGLQGQPGLPGPTGEKGSKGEPGLPGPPGPMDPNLLGSKGEKGEPGLPGIPGVSGPKGYQGLPGDPGQPGLSGQPGLPGPPGPKGNPGLPGQPGLIGPPGLKGTIGDMGFPGPQGVEGPPGPSGVPGQPGSPGLPGQKGDKGDPGISSIGLPGLPGPKGEPGLPGYPGNPGIKGSVGDPGLPGLPGTPGAKGQPGLPGFPGTPGPPGPKGISGPPGNPGLPGEPGPVGGGGHPGQPGPPGEKGKPGQDGIPGPAGQKGEPGQPGFGNPGPPGLPGLSGQKGDGGLPGIPGNPGLPGPKGEPGFHGFPGVQGPPGPPGSPGPALEGPKGNPGPQGPPGRPGLPGPEGPPGLPGNGGIKGEKGNPGQPGLPGLPGLKGDQGPPGLQGNPGRPGLNGMKGDPGLPGVPGFPGMKGPSGVPGSAGPEGEPGLIGPPGPPGLPGPSGQSIIIKGDAGPPGIPGQPGLKGLPGPQGPQGLPGPTGPPGDPGRNGLPGFDGAGGRKGDPGLPGQPGTRGLDGPPGPDGLQGPPGPPGTSSVAHGFLITRHSQTTDAPQCPQGTLQVYEGFSLLYVQGNKRAHGQDLGTAGSCLRRFSTMPFMFCNINNVCNFASRNDYSYWLSTPEPMPMSMQPLKGQSIQPFISRCAVCEAPAVVIAVHSQTIQIPHCPQGWDSLWIGYSFMMHTSAGAEGSGQALASPGSCLEEFRSAPFIECHGRGTCNYYANSYSFWLATVDVSDMFSKPQSETLKAGDLRTRISRCQVCMKRT

SEQ ID NO: 3306 - protein, 40 aa, Homo sapiens
MKLRGVSLAAGLFLLALSLWGQPAEAAEETLFATPVTQAF

SEQ ID NO: 3307 - protein, 174 aa, Homo sapiens
  SITE 1: note = misc_feature - Xaa can be any naturally occurring amino acid
XDDGLQGQPGLPGPTGEKGSKGEPGLPGPPGPMDPNLLGSKGEKGEPGLPGIPGVSGPKGYQGLPGDPGQPGLSGQPGLPGPPGPKGNPGLPGQPGLIGPPGLKGTIGDMGFPGPQGVEGPPGPSGVPGQPGSPGLPGQKGDKGDPGISSIGLPGLPGPKMIRRYVLGFVASPK

SEQ ID NO: 3308 - protein, 115 aa, Homo sapiens
  SITE 1: note = misc_feature - Xaa can be any naturally occurring amino acid
XGLPGPTGPPGDPGRNGLPGFDGAGGRKGDPGLPGQPGTRGLDGPPGPDGLQGPPGPPGTSSVAHGFLITRHSQTTDAPQCPQGTLQVYEGFSLLYVQGNKRAHGQDLVNLSQKR

SEQ ID NO: 3309 - protein, 1690 aa, Homo sapiens
MHPGLWLLLVTLCLTEELAAAGEKSYGKPCGGQDCSGSCQCFPEKGARGRPGPIGIQGPTGPQGFTGSTGLSGLKGERGFPGLLGPYGPKGDKGPMGVPGFLGINGIPGHPGQPGPRGPPGLDGCNGTQGAVGFPGPDGYPGLLGPPGLPGQKGSKGDPVLAPGSFKGMKGDPGLPGLDGITGPQGAPGFPGAVGPAGPPGLQGPPGPPGPLGPDGNMGLGFQGEKGVKGDVGLPGPAGPPPSTGELEFMGFPKGKKGSKGEPGPKGFPGISGPPGFPGLGTTGEKGEKGEKGIPGLPGPRGPMGSEGVQGPPGQQGKKGTLGFPGLNGFQGIEGQKGDIGLPGPDVFIDIDGAVISGNPGDPGVPGLPGLKGDEGIQGLRGPSGVPGLPALSGVPGALGPQGFPGLKGDQGNPGRTTIGAAGLPGRDGLPGPPGPPGPPSPEFETETLHNKESGFPGLRGEQGPKGNLGLKGIKGDSGFCACDGGVPNTGPPGEPGPPGPWGLIGLPGLKGARGDRGSGGAQGPAGAPGLVGPLGPSGPKGKKGEPILSTIQGMPGDRGDSGSQGFRGVIGEPGKDGVPGLPGLPGLPGDGGQGFPGEKGLPGLPGEKGHPGPPGLPGNGLPGLPGPRGLPGDKGKDGLPGQQGLPGSKGITLPCIIPGSYGPSGFPGTPGFPGPKGSRGLPGTPGQPGSSGSKGEPGSPGLVHLPELPGFPGPRGEKGLPGFPGLPGKDGLPGMIGSPGLPGSKGATGDIFGAENGAPGEQGLQGLTGHKGFLGDSGLPGLKGVHGKPGLLGPKGERGSPGTPGQVGQPGTPGSSGPYGIKGKSGLPGAPGFPGISGHPGKKGTRGKKGPPGSIVKKGLPGLKGLPGNPGLVGLKGSPGSPGVAGLPALSGPKGEKGSVGFVGFPGIPGLPGIPGTRGLKGIPGSTGKMGPSGRAGTPGEKGDRGNPGPVGIPSPRRPMSNLWLKGDKGSQGSAGSNGFPGPRGDKGEAGRPGPPGLPGAPGLPGIIKGVSGKPGPPGFMGIRGLPGLKGSSGITGFPGMPGESGSQGIRGSPGLPGASGLPGLKGDNGQTVEISGSPGPKGQPGESGFKGTKGRDGLIGNIGFPGNKGEDGKVGVSGDVGLPGAPGFPGVAGMRGEPGLPGSSGHQGAIGPLGSPGLIGPKGFPGFPGLHGLNGLPGTKGTHGTPGPSITGVPGPAGLPGPKGEKGYPGIGIGAPGKPGLRGQKGDRGFPGLQGPAGLPGAPGISLPSLIAGQPGDPGRPGLDGERGRPGPAGPPGPPGPSSNQGDTGDPGFPGIPGPKGPKGDQGIPGFSGLPGELGLKGMRGEPGFMGTPGKVGPPGDPGFPGMKGKAGPRGSSGLQGDPGQTPTAEAVQVPPGPLGLPGIDGIPGLTGDPGAQGPVGLQGSKGLPGIPGKDGPSGLPGPPGALGDPGLPGLQGPPGFEGAPGQQGPFGMPGMPGQSMRVGYTLVKHSQSEQVPPCPIGMSQLWVGYSLLFVEGQEKAHNQDLGFAGSCLPRFSTMPFIYCNINEVCHYARRNDKSYWLSTTAPIPMMPVSQTQIPQYISRCSVCEAPSQAIAVHSQDITIPQCPLGWRSLWIGYSFLMHTAAGAEGGGQSLVSPGSCLEDFRATPFIECSGARGTCHYFANKYSFWLTTVEERQQFGELPVSETLKAGQLHTRVSRCQVCMKSL

SEQ ID NO: 3310 - protein, 1707 aa, Homo sapiens
MHPGLWLLLVTLCLTEELAAAGEKSYGKPCGGQDCSGSCQCFPEKGARGRPGPIGIQGPTGPQGFTGSTGLSGLKGERGFPGLLGPYGPKGDKGPMGVPGFLGINGIPGHPGQPGPRGPPGLDGCNGTQGAVGFPGPDGYPGLLGPPGLPGQKGSKGDPVLAPGSFKGMKGDPGLPGLDGITGPQGAPGFPGAVGPAGPPGLQGPPGPPGPLGPDGNMGLGFQGEKGVKGDVGLPGPAGPPPSTGELEFMGFPKGKKGSKGEPGPKGFPGISGPPGFPGLGTTGEKGEKGEKGIPGLPGPRGPMGSEGVQGPPGQQGKKGTLGFPGLNGFQGIEGQKGDIGLPGPDVFIDIDGAVISGNPGDPGVPGLPGLKGDEGIQGLRGPSGVPGLPALSGVPGALGPQGFPGLKGDQGNPGRTTIGAAGLPGRDGLPGPPGPPGPPSPEFETETLHNKESGFPGLRGEQGPKGNLGLKGIKGDSGFCACDGGVPNTGPPGEPGPPGPWGLIGLPGLKGARGDRGSGGAQGPAGAPGLVGPLGPSGPKGKKGEPILSTIQGMPGDRGDSGSQGFRGVIGEPGKDGVPGLPGLPGLPGDGGQGFPGEKGLPGLPGEKGHPGPPGLPGNGLPGLPGPRGLPGDKGKDGLPGQQGLPGSKGDCCCREVGKGDLDTERGITLPCIIPGSYGPSGFPGTPGFPGPKGSRGLPGTPGQPGSSGSKGEPGSPGLVHLPELPGFPGPRGEKGLPGFPGLPGKDGLPGMIGSPGLPGSKGATGDIFGAENGAPGEQGLQGLTGHKGFLGDSGLPGLKGVHGKPGLLGPKGERGSPGTPGQVGQPGTPGSSGPYGIKGKSGLPGAPGFPGISGHPGKKGTRGKKGPPGSIVKKGLPGLKGLPGNPGLVGLKGSPGSPGVAGLPALSGPKGEKGSVGFVGFPGIPGLPGIPGTRGLKGIPGSTGKMGPSGRAGTPGEKGDRGNPGPVGIPSPRRPMSNLWLKGDKGSQGSAGSNGFPGPRGDKGEAGRPGPPGLPGAPGLPGIIKGVSGKPGPPGFMGIRGLPGLKGSSGITGFPGMPGESGSQGIRGSPGLPGASGLPGLKGDNGQTVEISGSPGPKGQPGESGFKGTKGRDGLIGNIGFPGNKGEDGKVGVSGDVGLPGAPGFPGVAGMRGEPGLPGSSGHQGAIGPLGSPGLIGPKGFPGFPGLHGLNGLPGTKGTHGTPGPSITGVPGPAGLPGPKGEKGYPGIGIGAPGKPGLRGQKGDRGFPGLQGPAGLPGAPGISLPSLIAGQPGDPGRPGLDGERGRPGPAGPPGPPGPSSNQGDTGDPGFPGIPGPKGPKGDQGIPGFSGLPGELGLKGMRGEPGFMGTPGKVGPPGDPGFPGMKGKAGPRGSSGLQGDPGQTPTAEAVQVPPGPLGLPGIDGIPGLTGDPGAQGPVGLQGSKGLPGIPGKDGPSGLPGPPGALGDPGLPGLQGPPGFEGAPGQQGPFGMPGMPGQSMRVGYTLVKHSQSEQVPPCPIGMSQLWVGYSLLFVEGQEKAHNQDLGFAGSCLPRFSTMPFIYCNINEVCHYARRNDKSYWLSTTAPIPMMPVSQTQIPQYISRCSVCEAPSQAIAVHSQDITIPQCPLGWRSLWIGYSFLMHTAAGAEGGGQSLVSPGSCLEDFRATPFIECSGARGTCHYFANKYSFWLTTVEERQQFGELPVSETLKAGQLHTRVSRCQVCMKSL

SEQ ID NO: 3311 - protein, 1633 aa, Homo sapiens
MHPGLWLLLVTLCLTEELAAAGEKSYGKPCGGQDCSGSCQCFPEKGARGRPGPIGIQGPTGPQGFTGSTGLSGLKGERGFPGLLGPYGPKGDKGPMGVPGFLGINGIPGHPGQPGPRGPPGLDGCNGTQGAVGFPGPDGYPGLLGPPGLPGQKGSKGDPVLAPGSFKGMKGDPGLPGLDGITGPQGAPGFPGAVGPAGPPGLQGPPGPPGPLGPDGNMGLGFQGEKGVKGDVGLPGPAGPPPSTGELEFMGFPKGKKGSKGEPGPKGFPGISGPPGFPGLGTTGEKGEKGEKGIPGLPGPRGPMGSEGVQGPPGQQGKKGTLGFPGLNGFQGIEGQKGDIGLPGPDVFIDIDGAVISGNPGDPGVPGLPGLKGDEGIQGLRGPSGVPGLPALSGVPGALGPQGFPGLKGDQGNPGRTTIGAAGLPGRDGLPGPPGPPGPPSPEFETETLHNKESGFPGLRGEQGPKGNLGLKGIKGDSGFCACDGGVPNTGPPGEPGPPGPWGLIGLPGLKGARGDRGSGGAQGPAGAPGLVGPLGPSGPKGKKGEPILSTIQGMPGDRGDSGSQGFRGVIGEPGKDGVPGLPGLPGLPGDGGQGFPGEKGLPGLPGEKGHPGPPGLPGNGLPGLPGPRGLPGDKGKDGLPGQQGLPGSKGITLPCIIPGSYGPSGFPGTPGFPGPKGSRGLPGTPGQPGSSGSKGEPGSPGLVHLPELPGFPGPRGEKGLPGFPGLPGKDGLPGMIGSPGLPGSKGATGDIFGAENGAPGEQGLQGLTGHKGFLGDSGLPGLKGVHGKPGLLGPKGERGSPGTPGQVGQPGTPGSSGPYGIKGKSGLPGAPGFPGISGHPGKKGTRGKKGPPGSIVKKGLPGLKGLPGNPGLVGLKGSPGSPGVAGLPALSGPKGEKGSVGFVGFPGIPGLPGIPGTRGLKGIPGSTGKMGPSGRAGTPGEKGDRGNPGPVGIPSPRRPMSNLWLKGDKGSQGSAGSNGFPGPRGDKGEAGRPGPPGLPGAPGLPGIIKGVSGKPGPPGFMGIRGLPGLKGSSGITGFPGMPGESGSQGIRGSPGLPGASGLPGLKGDNGQTVEISGSPGPKGQPGESGFKGTKGRDGLIGNIGFPGNKGEDGKVGVSGDVGLPGAPGFPGVAGMRGEPGLPGSSGHQGAIGPLGSPGLIGPKGPSITGVPGPAGLPGPKGEKGYPGIGIGAPGKPGLRGQKGDRGFPGLQGPAGLPGAPGISLPSLIAGQPGDPGRPGLDGERGRPGPAGPPGPPGPSSNQGDTGDPGFPGIPGPKGPKGDQGIPGFSGLPGELGLKGSSGLQGDPGQTPTAEAVQVPPGPLGLPGIDGIPGLTGDPGAQGPVGLQGSKGLPGIPGKDGPSGLPGPPGALGDPGLPGLQGPPGFEGAPGQQGPFGMPGMPGQSMRVGYTLVKHSQSEQVPPCPIGMSQLWVGYSLLFVEGQEKAHNQDLGFAGSCLPRFSTMPFIYCNINEVCHYARRNDKSYWLSTTAPIPMMPVSQTQIPQYISRCSVCEAPSQAIAVHSQDITIPQCPLGWRSLWIGYSFLMHTAAGAEGGGQSLVSPGSCLEDFRATPFIECSGARGTCHYFANKYSFWLTTVEERQQFGELPVSETLKAGQLHTRVSRCQVCMKSL

SEQ ID NO: 3312 - protein, 1678 aa, Homo sapiens
MHPGLWLLLVTLCLTEELAAAGEKSYGKPCGGQDCSGSCQCFPEKGARGRPGPIGIQGPTGPQGFTGSTGLSGLKGERGFPGLLGPYGPKGDKGPMGVPGFLGINGIPGHPGQPGPRGPPGLDGCNGTQGAVGFPGPDGYPGLLGPPGLPGQKGSKGDPVLAPGSFKGMKGDPGLPGLDGITGPQGAPGFPGAVGPAGPPGLQGPPGPPGPLGPDGNMGLGFQGEKGVKGDVGLPGPAGPPPSTGELEFMGFPKGKKGSKGEPGPKGFPGISGPPGFPGLGTTGEKGEKGEKGIPGLPGPRGPMGSEGVQGPPGQQGKKGTLGFPGLNGFQGIEGQKGDIGLPGPDVFIDIDGAVISGNPGDPGVPGLPGLKGDEGIQGLRGPSGVPGLPALSGVPGALGPQGFPGLKGDQGNPGRTTIGAAGLPGRDGLPGPPGPPGPPSPEFETETLHNKESGFPGLRGEQGPKGNLGLKGIKGDSGFCACDGGVPNTGPPGEPGPPGPWGLIGLPGLKGARGDRGSGGAQGPAGAPGLVGPLGPSGPKGKKGEPILSTIQGMPGDRGDSGSQGFRGVIGEPGKDGVPGLPGLPGLPGDGGQGFPGEKGLPGLPGEKGHPGPPGLPGNGLPGLPGPRGLPGDKGKDGLPGQQGLPGSKGITLPCIIPGSYGPSGFPGTPGFPGPKGSRGLPGTPGQPGSSGSKGEPGSPGLVHLPELPGFPGPRGEKGLPGFPGLPGKDGLPGMIGSPGLPGSKGATGDIFGAENGAPGEQGLQGLTGHKGFLGDSGLPGLKGVHGKPGLLGPKGERGSPGTPGQVGQPGTPGSSGPYGIKGKSGLPGAPGFPGISGHPGKKGTRGKKGPPGSIVKKGLPGLKGLPGNPGLVGLKGSPGSPGVAGLPALSGPKGEKGSVGFVGFPGIPGLPGIPGTRGLKGIPGSTGKMGPSGRAGTPGEKGDRGNPGPVGIPSPRRPMSNLWLKGDKGSQGSAGSNGFPGPRGDKGEAGRPGPPGLPGAPGLPGIIKGVSGKPGPPGFMGIRGLPGLKGSSGITGFPGMPGESGSQGIRGSPGLPGASGLPGLKGDNGQTVEISGSPGPKGQPGESGFKGTKGRDGLIGNIGFPGNKGEDGKVGVSGDVGLPGAPGFPGVAGMRGEPGLPGSSGHQGAIGPLGSPGLIGPKGFPGFPGLHGLNGLPGTKGTHGTPGPSITGVPGPAGLPGPKGEKGYPGIGIGAPGKPGLRGQKGDRGFPGLQGPAGLPGAPGISLPSLIAGQPGDPGRPGLDGERGRPGPAGPPGPPGPSSNQGDTGDPGFPGIPGFSGLPGELGLKGMRGEPGFMGTPGKVGPPGDPGFPGMKGKAGPRGSSGLQGDPGQTPTAEAVQVPPGPLGLPGIDGIPGLTGDPGAQGPVGLQGSKGLPGIPGKDGPSGLPGPPGALGDPGLPGLQGPPGFEGAPGQQGPFGMPGMPGQSMRVGYTLVKHSQSEQVPPCPIGMSQLWVGYSLLFVEGQEKAHNQDLGFAGSCLPRFSTMPFIYCNINEVCHYARRNDKSYWLSTTAPIPMMPVSQTQIPQYISRCSVCEAPSQAIAVHSQDITIPQCPLGWRSLWIGYSFLMHTAAGAEGGGQSLVSPGSCLEDFRATPFIECSGARGTCHYFANKYSFWLTTVEERQQFGELPVSETLKAGQLHTRVSRCQVCMKSL

SEQ ID NO: 3313 - protein, 1666 aa, Homo sapiens
MHPGLWLLLVTLCLTEELAAAGEKSYGKPCGGQDCSGSCQCFPEKGARGRPGPIGIQGPTGPQGFTGSTGLSGLKGERGFPGLLGPYGPKGDKGPMGVPGFLGINGIPGHPGQPGPRGPPGLDGCNGTQGAVGFPGPDGYPGLLGPPGLPGQKGSKGDPVLAPGSFKGMKGDPGLPGLDGITGPQGAPGFPGAVGPAGPPGLQGPPGPPGPLGPDGNMGLGFQGEKGVKGDVGLPGPAGPPPSTGELEFMGFPKGKKGSKGEPGPKGFPGISGPPGFPGLGTTGEKGEKGEKGIPGLPGPRGPMGSEGVQGPPGQQGKKGTLGFPGLNGFQGIEGQKGDIGLPGPDVFIDIDGAVISGNPGDPGVPGLPGLKGDEGIQGLRGPSGVPGLPALSGVPGALGPQGFPGLKGDQGNPGRTTIGAAGLPGRDGLPGPPGPPGPPSPEFETETLHNKESGFPGLRGEQGPKGNLGLKGIKGDSGFCACDGGVPNTGPPGEPGPPGPWGLIGLPGLKGARGDRGSGGAQGPAGAPGLVGPLGPSGPKGKKGEPILSTIQGMPGDRGDSGSQGFRGVIGEPGKDGVPGLPGLPGLPGDGGQGFPGEKGLPGLPGEKGHPGPPGLPGNGLPGLPGPRGLPGDKGKDGLPGQQGLPGSKGITLPCIIPGSYGPSGFPGTPGFPGPKGSRGLPGTPGQPGSSGSKGEPGSPGLVHLPELPGFPGPRGEKGLPGFPGLPGKDGLPGMIGSPGLPGSKGATGDIFGAENGAPGEQGLQGLTGHKGFLGDSGLPGLKGVHGKPGLLGPKGERGSPGTPGQVGQPGTPGSSGPYGIKGKSGLPGAPGFPGISGHPGKKGTRGKKGPPGSIVKKGLPGLKGLPGNPGLVGLKGSPGSPGVAGLPALSGPKGEKGSVGFVGFPGIPGLPGIPGTRGLKGIPGSTGKMGPSGRAGTPGEKGDRGNPGPVGIPSPRRPMSNLWLKGDKGSQGSAGSNGFPGPRGDKGEAGRPGPPGLPGAPGLPGIIKGVSGKPGPPGFMGIRGLPGLKGSSGITGFPGMPGESGSQGIRGSPGLPGASGLPGLKGDNGQTVEISGSPGPKGQPGESGFKGTKGRDGLIGNIGFPGNKGEDGKVGVSGDVGLPGAPGFPGVAGMRGEPGLPGSSGHQGAIGPLGSPGLIGPKGPSITGVPGPAGLPGPKGEKGYPGIGIGAPGKPGLRGQKGDRGFPGLQGPAGLPGAPGISLPSLIAGQPGDPGRPGLDGERGRPGPAGPPGPPGPSSNQGDTGDPGFPGIPGPKGPKGDQGIPGFSGLPGELGLKGMRGEPGFMGTPGKVGPPGDPGFPGMKGKAGPRGSSGLQGDPGQTPTAEAVQVPPGPLGLPGIDGIPGLTGDPGAQGPVGLQGSKGLPGIPGKDGPSGLPGPPGALGDPGLPGLQGPPGFEGAPGQQGPFGMPGMPGQSMRVGYTLVKHSQSEQVPPCPIGMSQLWVGYSLLFVEGQEKAHNQDLGFAGSCLPRFSTMPFIYCNINEVCHYARRNDKSYWLSTTAPIPMMPVSQTQIPQYISRCSVCEAPSQAIAVHSQDITIPQCPLGWRSLWIGYSFLMHTAAGAEGGGQSLVSPGSCLEDFRATPFIECSGARGTCHYFANKYSFWLTTVEERQQFGELPVSETLKAGQLHTRVSRCQVCMKSL

SEQ ID NO: 3314 - protein, 1691 aa, Homo sapiens
MLINKLWLLLVTLCLTEELAAAGEKSYGKPCGGQDCSGSCQCFPEKGARGRPGPIGIQGPTGPQGFTGSTGLSGLKGERGFPGLLGPYGPKGDKGPMGVPGFLGINGIPGHPGQPGPRGPPGLDGCNGTQGAVGFPGPDGYPGLLGPPGLPGQKGSKGDPVLAPGSFKGMKGDPGLPGLDGITGPQGAPGFPGAVGPAGPPGLQGPPGPPGPLGPDGNMGLGFQGEKGVKGDVGLPGPAGPPPSTGELEFMGFPKGKKGSKGEPGPKGFPGISGPPGFPGLGTTGEKGEKGEKGIPGLPGPRGPMGSEGVQGPPGQQGKKGTLGFPGLNGFQGIEGQKGDIGLPGPDVFIDIDGAVISGNPGDPGVPGLPGLKGDEGIQGLRGPSGVPGLPALSGVPGALGPQGFPGLKGDQGNPGRTTIGAAGLPGRDGLPGPPGPPGPPSPEFETETLHNKESGFPGLRGEQGPKGNLGLKGIKGDSGFCACDGGVPNTGPPGEPGPPGPWGLIGLPGLKGARGDRGSGGAQGPAGAPGLVGPLGPSGPKGKKGEPILSTIQGMPGDRGDSGSQGFRGVIGEPGKDGVPGLPGLPGLPGDGGQGFPGEKGLPGLPGEKGHPGPPGLPGNGLPGLPGPRGLPGDKGKDGLPGQQGLPGSKGITLPCIIPGSYGPSGFPGTPGFPGPKGSRGLPGTPGQPGSSGSKGEPGSPGLVHLPELPGFPGPRGEKGLPGFPGLPGKDGLPGMIGSPGLPGSKGATGDIFGAENGAPGEQGLQGLTGHKGFLGDSGLPGLKGVHGKPGLLGPKGERGSPGTPGQVGQPGTPGSSGPYGIKGKSGLPGAPGFPGISGHPGKKGTRGKKGPPGSIVKKGLPGLKGLPGNPGLVGLKGSPGSPGVAGLPALSGPKGEKGSVGFVGFPGIPGLPGIPGTRGLKGIPGSTGKMGPSGRAGTPGEKGDRGNPGPVGIPSPRRPMSNLWLKGDKGSQGSAGSNGFPGPRGDKGEAGRPGPPGLPGAPGLPGIIKGVSGKPGPPGFMGIRGLPGLKGSSGITGFPGMPGESGSQGIRGSPGLPGASGLPGLKGDNGQTVEISGSPGPKGQPGESGFKGTKGRDGLIGNIGFPGNKGEDGKVGVSGDVGLPGAPGFPGVAGMRGEPGLPGSSGHQGAIGPLGSPGLIGPKGFPGFPGLHGLNGLPGTKGTHGTPGPSITGVPGPAGLPGPKGEKGYPGIGIGAPGKPGLRGQKGDRGFPGLQGPAGLPGAPGISLPSLIAGQPGDPGRPGLDGERGRPGPAGPPGPPGPSSNQGDTGDPGFPGIPGPKGPKGDQGIPGFSGLPGELGLKGMRGEPGFMGTPGKVGPPGDPGFPGMKGKAGPRGSSGLQGDPGQTPTAEAVQVPPGPLGLPGIDGIPGLTGDPGAQGPVGLQGSKGLPGIPGKDGPSGLPGPPGALGDPGLPGLQGPPGFEGAPGQQGPFGMPGMPGQSMRVGYTLVKHSQSEQVPPCPIGMSQLWVGYSLLFVEGQEKAHNQDLGFAGSCLPRFSTMPFIYCNINEVCHYARRNDKSYWLSTTAPIPMMPVSQTQIPQYISRCSVCEAPSQAIAVHSQDITIPQCPLGWRSLWIGYSFLMHTAAGAEGGGQSLVSPGSCLEDFRATPFIECSGARGTCHYFANKYSFWLTTVEERQQFGELPVSETLKAGQLHTRVSRCQVCMKSL

SEQ ID NO: 3315 - protein, 1838 aa, Homo sapiens
MDVHTRWKARSALRPGAPLLPPLLLLLLWAPPPSRAAQPADLLKVLDFHNLPDGITKTTGFCATRRSSKGPDVAYRVTKDAQLSAPTKQLYPASAFPEDFSILTTVKAKKGSQAFLVSIYNEQGIQQIGLELGRSPVFLYEDHTGKPGPEDYPLFRGINLSDGKWHRIALSVHKKNVTLILDCKKKTTKFLDRSDHPMIDINGIIVFGTRILDEEVFEGDIQQLLFVSDHRAAYDYCEHYSPDCDTAVPDTPQSQDPNPDEYYTEGDGEGETYYYEYPYYEDPEDLGKEPTPSKKPVEAAKETTEVPEELTPTPTEAAPMPETSEGAGKEEDVGIGDYDYVPSEDYYTPSPYDDLTYGEGEENPDQPTDPGAGAEIPTSTADTSNSSNPAPPPGEGADDLEGEFTEETIRNLDENYYDPYYDPTSSPSEIGPGMPANQDTIYEGIGGPRGEKGQKGEPAIIEPGMLIEGPPGPEGPAGLPGPPGTMGPTGQVGDPGERGPPGRPGLPGADGLPGPPGTMLMLPFRFGGGGDAGSKGPMVSAQESQAQAILQQARLALRGPAGPMGLTGRPGPVGPPGSGGLKGEPGDVGPQGPRGVQGPPGPAGKPGRRGRAGSDGARGMPGQTGPKGDRGFDGLAGLPGEKGHRGDPGPSGPPGPPGDDGERGDDGEVGPRGLPGEPGPRGLLGPKGPPGPPGPPGVTGMDGQPGPKGNVGPQGEPGPPGQQGNPGAQGLPGPQGAIGPPGEKGPLGKPGLPGMPGADGPPGHPGKEGPPGEKGGQGPPGPQGPIGYPGPRGVKGADGIRGLKGTKGEKGEDGFPGFKGDMGIKGDRGEIGPPGPRGEDGPEGPKGRGGPNGDPGPLGPPGEKGKLGVPGLPGYPGRQGPKGSIGFPGFPGANGEKGGRGTPGKPGPRGQRGPTGPRGERGPRGITGKPGPKGNSGGDGPAGPPGERGPNGPQGPTGFPGPKGPPGPPGKDGLPGHPGQRGETGFQGKTGPPGPPGVVGPQGPTGETGPMGERGHPGPPGPPGEQGLPGLAGKEGTKGDPGPAGLPGKDGPPGLRGFPGDRGLPGPVGALGLKGNEGPPGPPGPAGSPGERGPAGAAGPIGIPGRPGPQGPPGPAGEKGAPGEKGPQGPAGRDGLQGPVGLPGPAGPVGPPGEDGDKGEIGEPGQKGSKGDKGEQGPPGPTGPQGPIGQPGPSGADGEPGPRGQQGLFGQKGDEGPRGFPGPPGPVGLQGLPGPPGEKGETGDVGQMGPPGPPGPRGPSGAPGADGPQGPPGGIGNPGAVGEKGEPGEAGEPGLPGEGGPPGPKGERGEKGESGPSGAAGPPGPKGPPGDDGPKGSPGPVGFPGDPGPPGEPGPAGQDGPPGDKGDDGEPGQTGSPGPTGEPGPSGPPGKRGPPGPAGPEGRQGEKGAKGEAGLEGPPGKTGPIGPQGAPGKPGPDGLRGIPGPVGEQGLPGSPGPDGPPGPMGPPGLPGLKGDSGPKGEKGHPGLIGLIGPPGEQGEKGDRGLPGPQGSSGPKGEQGITGPSGPIGPPGPPGLPGPPGPKGAKGSSGPTGPKGEAGHPGPPGPPGPPGEVIQPLPIQASRTRRNIDASQLLDDGNGENYVDYADGMEEIFGSLNSLKLEIEQMKRPLGTQQNPARTCKDLQLCHPDFPDGEYWVDPNQGCSRDSFKVYCNFTAGGSTCVFPDKKSEGARITSWPKENPGSWFSEFKRGKLLSYVDAEGNPVGVVQMTFLRLLSASAHQNVTYHCYQSVAWQDAATGSYDKALRFLGSNDEEMSYDNNPYIRALVDGCATKKGYQKTVLEIDTPKVEQVPIVDIMFNDFGEASQKFGFEVGPACFMG

SEQ ID NO: 3316 - protein, 1838 aa, Homo sapiens
MDVHTRWKARSALRPGAPLLPPLLLLLLWAPPPSRAAQPADLLKVLDFHNLPDGITKTTGFCATRRSSKGPDVAYRVTKDAQLSAPTKQLYPASAFPEDFSILTTVKAKKGSQAFLVSIYNEQGIQQIGLELGRSPVFLYEDHTGKPGPEDYPLFRGINLSDGKWHRIALSVHKKNVTLILDCKKKTTKFLDRSDHPMIDINGIIVFGTRILDEEVFEGDIQQLLFVSDHRAAYDYCEHYSPDCDTAVPDTPQSQDPNPDEYYTEGDGEGETYYYEYPYYEDPEDLGKEPTPSKKPVEAAKETTEVPEELTPTPTEAAPMPETSEGAGKEEDVGIGDYDYVPSEDYYTPSPYDDLTYGEGEENPDQPTDPGAGAEIPTSTADTSNSSNPAPPPGEGADDLEGEFTEETIRNLDENYYDPYYDPTSSPSEIGPGMPANQDTIYEGIGGPRGEKGQKGEPAIIEPGMLIEGPPGPEGPAGLPGPPGTMGPTGQVGDPGERGPPGRPGLPGADGLPGPPGTMLMLPFRFGGGGDAGSKGPMVSAQESQAQAILQQARLALRGPAGPMGLTGRPGPVGPPGSGGLKGEPGDVGPQGPRGVQGPPGPAGKPGRRGRAGSDGARGMPGQTGPKGDRGFDGLAGLPGEKGHRGDPGPSGPPGPPGDDGERGDDGEVGPRGLPGEPGPRGLLGPKGPPGPPGPPGVTGMDGQPGPKGNVGPQGEPGPPGQQGNPGAQGLPGPQGAIGPPGEKGPLGKPGLPGMPGADGPPGHPGKEGPPGEKGGQGPPGPQGPIGYPGPRGVKGADGIRGLKGTKGEKGEDGFPGFKGDMGIKGDRGEIGPPGPRGEDGPEGPKGRGGPNGDPGPLGPPGEKGKLGVPGLPGYPGRQGPKGSIGFPGFPGANGEKGGRGTPGKPGPRGQRGPTGPRGERGPRGITGKPGPKGNSGGDGPAGPPGERGPNGPQGPTGFPGPKGPPGPPGKDGLPGHPGQRGETGFQGKTGPPGPPGVVGPQGPTGETGPMGERGHPGPPGPPGEQGLPGLAGKEGTKGDPGPAGLPGKDGPPGLRGFPGDRGLPGPVGALGLKGNEGPPGPPGPAGSPGERGPAGAAGPIGIPGRPGPQGPPGPAGEKGAPGEKGPQGPAGRDGLQGPVGLPGPAGPVGPPGEDGDKGEIGEPGQKGSKGDKGEQGPPGPTGPQGPIGQPGPSGADGEPGPRGQQGLFGQKGDEGPRGFPGPPGPVGLQGLPGPPGEKGETGDVGQMGPPGPPGPRGPSGAPGADGPQGPPGGIGNPGAVGEKGEPGEAGEPGLPGEGGPPGPKGERGEKGESGPSGAAGPPGPKGPPGDDGPKGSPGPVGFPGDPGPPGEPGPAGQDGPPGDKGDDGEPGQTGSPGPTGEPGPSGPPGKRGPPGPAGPEGRQGEKGAKGEAGLEGPPGKTGPIGPQGAPGKPGPDGLRGIPGPVGEQGLPGSPGPDGPPGPMGPPGLPGLKGDSGPKGEKGHPGLIGLIGPPGEQGEKGDRGLPGPQGSSGPKGEQGITGPSGPIGPPGPPGLPGPPGPKGAKGSSGPTGPKGEAGHPGPPGPPGPPGEVIQPLPIQASRTRRNIDASQLLDDGNGENYVDYADGMEEIFGSLNSLKLEIEQMKRPLGTQQNPARTCKDLQLCHPDFPDGEYWVDPNQGCSRDSFKVYCNFTAGGSTCVFPDKKSEGSKMARWPKEQPSTWYSQYKRGSLLSYVDAEGNPVGVVQMTFLRLLSASAHQNVTYHCYQSVAWQDAATGSYDKALRFLGSNDEEMSYDNNPYIRALVDGCATKKGYQKTVLEIDTPKVEQVPIVDIMFNDFGEASQKFGFEVGPACFMG

SEQ ID NO: 3317 - protein, 210 aa, Homo sapiens
  SITE 1: note = misc_feature - Xaa can be any naturally occurring amino acid
XRTRRNIDASQLLDDGNGENYVDYADGMEEIFGSLNSLKLEIEQMKRPLGTQQNPARTCKDLQLCHPDFPDGEYWVDPNQGCSRDSFKVYCNFTAGGSTCVFPDKKSEGSKMARWPKEQPSTWYSQYKRGSLLSYVDAEGNPVGVVQMTFLRLLSASAHQNVTYHCYQSVAWQDAATGSYDKALRFLGSNDEEMSYDNNPYIRALVDGCA

SEQ ID NO: 3318 - protein, 1499 aa, Homo sapiens
MMANWAEARPLLILIVLLGQFVSIKAQEEDEDEGYGEEIACTQNGQMYLNRDIWKPAPCQICVCDNGAILCDKIECQDVLDCADPVTPPGECCPVCSQTPGGGNTNFGRGRKGQKGEPGLVPVVTGIRGRPGPAGPPGSQGPRGERGPKGRPGPRGPQGIDGEPGVPGQPGAPGPPGHPSHPGPDGLSRPFSAQMAGLDEKSGLGSQVGLMPGSVGPVGPRGPQGLQGQQGGAGPTGPPGEPGDPGPMGPIGSRGPEGPPGKPGEDGEPGRNGNPGEVGFAGSPGARGFPGAPGLPGLKGHRGHKGLEGPKGEVGAPGSKGEAGPTGPMGAMGPLGPRGMPGERGRLGPQGAPGQRGAHGMPGKPGPMGPLGIPGSSGFPGNPGMKGEAGPTGARGPEGPQGQRGETGPPGPVGSPGLPGAIGTDGTPGAKGPTGSPGTSGPPGSAGPPGSPGPQGSTGPQGIRGQPGDPGVPGFKGEAGPKGEPGPHGIQGPIGPPGEEGKRGPRGDPGTVGPPGPVGERGAPGNRGFPGSDGLPGPKGAQGERGPVGSSGPKGSQGDPGRPGEPGLPGARGLTGNPGVQGPEGKLGPLGAPGEDGRPGPPGSIGIRGQPGSMGLPGPKGSSGDPGKPGEAGNAGVPGQRGAPGKDGEVGPSGPVGPPGLAGERGEQGPPGPTGFQGLPGPPGPPGEGGKPGDQGVPGDPGAVGPLGPRGERGNPGERGEPGITGLPGEKGMAGGHGPDGPKGSPGPSGTPGDTGPPGLQGMPGERGIAGTPGPKGDRGGIGEKGAEGTAGNDGARGLPGPLGPPGPAGPTGEKGEPGPRGLVGPPGSRGNPGSRGENGPTGAVGFAGPQGPDGQPGVKGEPGEPGQKGDAGSPGPQGLAGSPGPHGPNGVPGLKGGRGTQGPPGATGFPGSAGRVGPPGPAGAPGPAGPLGEPGKEGPPGLRGDPGSHGRVGDRGPAGPPGGPGDKGDPGEDGQPGPDGPPGPAGTTGQRGIVGMPGQRGERGMPGLPGPAGTPGKVGPTGATGDKGPPGPVGPPGSNGPVGEPGPEGPAGNDGTPGRDGAVGERGDRGDPGPAGLPGSQGAPGTPGPVGAPGDAGQRGDPGSRGPIGPPGRAGKRGLPGPQGPRGDKGDHGDRGDRGQKGHRGFTGLQGLPGPPGPNGEQGSAGIPGPFGPRGPPGPVGPSGKEGNPGPLGPIGPPGVRGSVGEAGPEGPPGEPGPPGPPGPPGHLTAALGDIMGHYDESMPDPLPEFTEDQAAPDDKNKTDPGVHATLKSLSSQIETMRSPDGSKKHPARTCDDLKLCHSAKQSGEYWIDPNQGSVEDAIKVYCNMETGETCISANPSSVPRKTWWASKSPDNKPVWYGLDMNRGSQFAYGDHQSPNTAITQMTFLRLLSKEASQNITYICKNSVGYMDDQAKNLKKAVVLKGANDLDIKAEGNIRFRYIVLQDTCSKRNGNVGKTVFEYRTQNVARLPIIDLAPVDVGGTDQEFGVEIGPVCFV

SEQ ID NO: 3319 - protein, 1112 aa, Homo sapiens
MPGSVGPVGPRGPQGLQGQQGGAGPTGPPGEPGDPGPMGPIGSRGPEGPPGKPGEDGEPGRNGNPGEVGFAGSPGARGFPGAPGLPGLKGHRGHKGLEGPKGEVGAPGSKGEAGPTGPMGDPGTVGPPGPVGERGAPGNRGFPGSDGLPGPKGAQGERGPVGSSGPKGSQGDPGRPGEPGLPGARGLTGNPGVQGPEGKLGPLGAPGEDGRPGPPGSIGIRGQPGSMGLPGPKGSSGDPGKPGEAGNAGVPGQRGAPGKDGEVGPSGPVGPPGLAGERGEQGPPGPTGFQGLPGPPGPPGEGGKPGDQGVPGDPGAVGPLGPRGERGNPGERGEPGITGLPGEKGMAGGHGPDGPKGSPGPSGTPGDTGPPGLQGMPGERGIAGTPGPKGDRGGIGEKGAEGTAGNDGARGLPGPLGPPGPAGPTGEKGEPGPRGLVGPPGSRGNPGSRGENGPTGAVGFAGPQGPDGQPGVKGEPGEPGQKGDAGSPGPQGLAGSPGPHGPNGVPGLKGGRGTQGPPGATGFPGSAGRVGPPGPAGAPGPAGPLGEPGKEGPPGLRGDPGSHGRVGDRGPAGPPGGPGDKGDPGEDGQPGPDGPPGPAGTTGQRGIVGMPGQRGERGMPGLPGPAGTPGKVGPTGATGDKGPPGPVGPPGSNGPVGEPGPEGPAGNDGTPGRDGAVGERGDRGDPGPAGLPGSQGAPGTPGPVGAPGDAGQRGDPGSRGPIGPPGRAGKRGLPGPQGPRGDKGDHGDRGDRGQKGHRGFTGLQGLPGPPGPNGEQGSAGIPGPFGPRGPPGPVGPSGKEGNPGPLGPIGPPGVRGSVGEAGPEGPPGEPGPPGPPGPPGHLTAALGDIMGHYDESMPDPLPEFTEDQAAPDDKNKTDPGVHATLKSLSSQIETMRSPDGSKKHPARTCDDLKLCHSAKQSGEYWIDPNQGSVEDAIKVYCNMETGETCISANPSSVPRKTWWASKSPDNKPVWYGLDMNRGSQFAYGDHQSPNTAITQMTFLRLLSKEASQNITYICKNSVGYMDDQAKNLKKAVVLKGANDLDIKAEGNIRFRYIVLQDTCSKRNGNVGKTVFEYRTQNVARLPIIDLAPVDVGGTDQEFGVEIGPVCFV

SEQ ID NO: 3320 - protein, 1745 aa, Homo sapiens
MGNRRDLGQPRAGLCLLLAALQLLPGTQADPVDVLKALGVQGGQAGVPEGPGFCPQRTPEGDRAFRIGQASTLGIPTWELFPEGHFPENFSLLITLRGQPANQSVLLSIYDERGARQLGLALGPALGLLGDPFRPLPQQVNLTDGRWHRVAVSIDGEMVTLVADCEAQPPVLGHGPRFISIAGLTVLGTQDLGEKTFEGDIQELLISPDPQAAFQACERYLPDCDNLAPAATVAPQGEPETPRPRRKGKGKGRKKGRGRKGKGRKKNKEIWTSSPPPDSAENQTSTDIPKTETPAPNLPPTPTPLVVTSTVTTGLNATILERSLDPDSGTELGTLETKAAREDEEGDDSTMGPDFRAAEYPSRTQFQIFPGAGEKGAKGEPAVIEKGQQFEGPPGAPGPQGVVGPSGPPGPPGFPGDPGPPGPAGLPGIPGIDGIRGPPGTVIMMPFQFAGGSFKGPPVSFQQAQAQAVLQQTQLSMKGPPGPVGLTGRPGPVGLPGHPGLKGEEGAEGPQGPRGLQGPHGPPGRVGKMGRPGADGARGLPGDTGPKGDRGFDGLPGLPGEKGQRGDFGHVGQPGPPGEDGERGAEGPPGPTGQAGEPGPRGLLGPRGSPGPTGRPGVTGIDGAPGAKGNVGPPGEPGPPGQQGNHGSQGLPGPQGLIGTPGEKGPPGNPGIPGLPGSDGPLGHPGHEGPTGEKGAQGPPGSAGPPGYPGPRGVKGTSGNRGLQGEKGEKGEDGFPGFKGDVGLKGDQGKPGAPGPRGEDGPEGPKGQAGQAGEEGPPGSAGEKGKLGVPGLPGYPGRPGPKGSIGFPGPLGPIGEKGKSGKTGQPGLEGERGPPGSRGERGQPGATGQPGPKGDVGQDGAPGIPGEKGLPGLQGPPGFPGPKGPPGHQGKDGRPGHPGQRGELGFQGQTGPPGPAGVLGPQGKTGEVGPLGERGPPGPPGPPGEQGLPGLEGREGAKGELGPPGPLGKEGPAGLRGFPGPKGGPGDPGPTGLKGDKGPPGPVGANGSPGERGPLGPAGGIGLPGQSGSEGPVGPAGKKGSRGERGPPGPTGKDGIPGPLGPLGPPGAAGPSGEEGDKGDVGAPGHKGSKGDKGDAGPPGQPGIRGPAGHPGPPGADGAQGRRGPPGLFGQKGDDGVRGFVGVIGPPGLQGLPGPPGEKGEVGDVGSMGPHGAPGPRGPQGPTGSEGTPGLPGGVGQPGAVGEKGERGDAGDPGPPGAPGIPGPKGDIGEKGDSGPSGAAGPPGKKGPPGEDGAKGSVGPTGLPGDLGPPGDPGVSGIDGSPGEKGDPGDVGGPGPPGASGEPGAPGPPGKRGPSGHMGREGREGEKGAKGEPGPDGPPGRTGPMGARGPPGRVGPEGLRGIPGPVGEPGLLGAPGQMGPPGPLGPSGLPGLKGDTGPKGEKGHIGLIGLIGPPGEAGEKGDQGLPGVQGPPGPKGDPGPPGPIGSLGHPGPPGVAGPLGQKGSKGSPGSMGPRGDTGPAGPPGPPGAPAELHGLRRRRRFVPVPLPVVEGGLEEVLASLTSLSLELEQLRRPPGTAERPGLVCHELHRNHPHLPDGEYWIDPNQGCARDSFRVFCNFTAGGETCLYPDKKFEIVKLASWSKEKPGGWYSTFRRGKKFSYVDADGSPVNVVQLNFLKLLSATARQNFTYSCQNAAAWLDEATGDYSHSARFLGTNGEELSFNQTTAATVSVPQDGCRLRKGQTKTLFEFSSSRAGFLPLWDVAATDFGQTNQKFGFELGPVCFSS

SEQ ID NO: 3321 - protein, 1028 aa, Homo sapiens
MRAARALLPLLLQACWTAAQDEPETPRAVAFQDCPVDLFFVLDTSESVALRLKPYGALVDKVKSFTKRFIDNLRDRYYRCDRNLVWNAGALHYSDEVEIIQGLTRMPGGRDALKSSVDAVKYFGKGTYTDCAIKKGLEQLLVGGSHLKENKYLIVVTDGHPLEGYKEPCGGLEDAVNEAKHLGVKVFSVAITPDHLEPRLSIIATDHTYRRNFTAADWGQSRDAEEAISQTIDTIVDMIKNNVEQVCCSFECQPARGPPGLRGDPGFEGERGKPGLPGEKGEAGDPGRPGDLGPVGYQGMKGEKGSRGEKGSRGPKGYKGEKGKRGIDGVDGVKGEMGYPGLPGCKGSPGFDGIQGPPGPKGDPGAFGLKGEKGEPGADGEAGRPGSSGPSGDEGQPGEPGPPGEKGEAGDEGNPGPDGAPGERGGPGERGPRGTPGTRGPRGDPGEAGPQGDQGREGPVGVPGDPGEAGPIGPKGYRGDEGPPGSEGARGAPGPAGPPGDPGLMGERGEDGPAGNGTEGFPGFPGYPGNRGAPGINGTKGYPGLKGDEGEAGDPGDDNNDIAPRGVKGAKGYRGPEGPQGPPGHQGPPGPDECEILDIIMKMCSCCECKCGPIDLLFVLDSSESIGLQNFEIAKDFVVKVIDRLSRDELVKFEPGQSYAGVVQYSHSQMQEHVSLRSPSIRNVQELKEAIKSLQWMAGGTFTGEALQYTRDQLLPPSPNNRIALVITDGRSDTQRDTTPLNVLCSPGIQVVSVGIKDVFDFIPGSDQLNVISCQGLAPSQGRPGLSLVKENYAELLEDAFLKNVTAQICIDKKCPDYTCPITFSSPADITILLDGSASVGSHNFDTTKRFAKRLAERFLTAGRTDPAHDVRVAVVQYSGTGQQRPERASLQFLQNYTALASAVDAMDFINDATDVNDALGYVTRFYREASSGAAKKRLLLFSDGNSQGATPAAIEKAVQEAQRAGIEIFVVVVGRQVNEPHIRVLVTGKTAEYDVAYGESHLFRVPSYQALLRGVFHQTVSRKVALG

SEQ ID NO: 3322 - protein, 1026 aa, Homo sapiens [sequence omitted]

SEQ ID NO: 3323 - protein, 250 aa, Homo sapiens
GNKGAKGDRGLPGPRGPQGALGEPGKQGSRGDPGDAGPRGDSGQPGPKGDPGRPGFSYPGPRGAPGEKGEPGPRGPEGGRGDFGLKGEPGRKGEKGEPADPGPPGEPGPRGPRGVPGPEGEPGPPGDPGLTECDVMTYVRETCGCCGSEVSPVPPDDPATPPDCEKRCGALDVVFVIDSSESIGYTNFTLEKNFVINVVNRLGAIAKDPKSETGTRVGVVQYSHEGTFEAIQLDDERIDSLSSFKEAVKN

SEQ ID NO: 3324 - protein, 180 aa, Homo sapiens
MLQGTCSVLLLWGILGAIQAQQQEVISPDTTERNNNCPEKTDCPIHVYFVLDTSESVTMQSPTDILLFHMKQFVPQFISQLQNEFYLDQVALSWRYGGLHFSDQVEVFSPPGSDRASFIKNLQGISSFRRGTFTDCALANMTEQIRQDRSKGTVHFAVVITDGHVTGSPCGGIKLQAERA

SEQ ID NO: 3325 - protein, 1019 aa, Homo sapiens
MLQGTCSVLLLWGILGAIQAQQQEVISPDTTERNNNCPEKTDCPIHVYFVLDTSESVTMQSPTDILLFHMKQFVPQFISQLQNEFYLDQVALSWRYGGLHFSDQVEVFSPPGSDRASFIKNLQGISSFRRGTFTDCALANMTEQIRQDRSKGTVHFAVVITDGHVTGSPCGGIKLQAERAREEGIRLFAVAPNQNLKEQGLRDIASTPHELYRNDYATMLPDSTEIDQDTINRIIKVMKHEAYGECYKVSCLEIPGPSGPKGYRGQKGAKGNMGEPGEPGQKGRQGDPGIEGPIGFPGPKGVPGFKGEKGEFGADGRKGAPGLAGKNGTDGQKGKLGRIGPPGCKGDPGNRGPDGYPGEAGSPGERGDQGGKGDPGRPGRRGPPGEIGAKGSKGYQGNSGAPGSPGVKGAKGGPGPRGPKGEPGRRGDPGTKGSPGSDGPKGEKGDPGPEGPRGLAGEVGNKGAKGDRGLPGPRGPQGALGEPGKQGSRGDPGDAGPRGDSGQPGPKGDPGRPGFSYPGPRGAPGEKGEPGPRGPEGGRGDFGLKGEPGRKGEKGEPADPGPPGEPGPRGPRGVPGPEGEPGPPGDPGLTECDVMTYVRETCGCCDCEKRCGALDVVFVIDSSESIGYTNFTLEKNFVINVVNRLGAIAKDPKSETGTRVGVVQYSHEGTFEAIQLDDERIDSLSSFKEAVKNLEWIAGGTWTPSALKFAYDRLIKESRRQKTRVFAVVITDGRHDPRDDDLNLRALCDRDVTVTAIGIGDMFHEKHESENLYSIACDKPQQVRNMTLFSDLVAEKFIDDMEDVLCPDPQIVCPDLPCQTELSVAQCTQRPVDIVFLLDGSERLGEQNFHKARRFVEQVARRLTLARRDDDPLNARVALLQFGGPGEQQVAFPLSHNLTAIHEALETTQYLNSFSHVGAGVVHAINAIVRSPRGGARRHAELSFVFLTDGVTGNDSLHESAHSMRKQNVVPTVLALGSDVDMDVLTTLSLGDRAAVFHEKDYDSLAQPGFFDRFIRWIC

SEQ ID NO: 3326 - protein, 828 aa, Homo sapiens
MLQGTCSVLLLWGILGAIQAQQQEVISPDTTERNNNCPEKTDCPIHVYFVLDTSESVTMQSPTDILLFHMKQFVPQFISQLQNEFYLDQVALSWRYGGLHFSDQVEVFSPPGSDRASFIKNLQGISSFRRGTFTDCALANMTEQIRQDRSKGTVHFAVVITDGHVTGSPCGGIKLQAERAREEGIRLFAVAPNQNLKEQGLRDIASTPHELYRNDYATMLPDSTEIDQDTINRIIKVMKHEAYGECYKVSCLEIPGPSGPKGYRGQKGAKGNMGEPGEPGQKGRQGDPGIEGPIGFPGPKGVPGFKGEKGEFGADGRKGAPGLAGKNGTDGQKGKLGRIGPPGCKGDPGNRGPDGYPGEAGSPGERGDQGGKGDPGRPGRRGPPGEIGAKGSKGYQGNSGAPGSPGVKGAKGGPGPRGPKGEPGRRGDPGTKGSPGSDGPKGEKGDPGPEGPRGLAGEVGNKGAKGDRGLPGPRGPQGALGEPGKQGSRGDPGDAGPRGDSGQPGPKGDPGRPGFSYPGPRGAPGEKGEPGPRGPEGGRGDFGLKGEPGRKGEKGEPADPGPPGEPGPRGPRGVPGPEGEPGPPGDPGLTECDVMTYVRETCGCCDCEKRCGALDVVFVIDSSESIGYTNFTLEKNFVINVVNRLGAIAKDPKSETGTRVGVVQYSHEGTFEAIQLDDERIDSLSSFKEAVKNLEWIAGGTWTPSALKFAYDRLIKESRRQKTRVFAVVITDGRHDPRDDDLNLRALCDRDVTVTAIGIGDMFHEKHESENLYSIACDKPQQVRNMTLFSDLVAEKFIDDMEDVLCPDPQIVCPDLPCQTGLDGAVLC

SEQ ID NO: 3327 - protein, 918 aa, Homo sapiens
MLQGTCSVLLLWGILGAIQAQQQEVISPDTTERNNNCPEKTDCPIHVYFVLDTSESVTMQSPTDILLFHMKQFVPQFISQLQNEFYLDQVALSWRYGGLHFSDQVEVFSPPGSDRASFIKNLQGISSFRRGTFTDCALANMTEQIRQDRSKGTVHFAVVITDGHVTGSPCGGIKLQAERAREEGIRLFAVAPNQNLKEQGLRDIASTPHELYRNDYATMLPDSTEIDQDTINRIIKVMKHEAYGECYKVSCLEIPGPSGPKGYRGQKGAKGNMGEPGEPGQKGRQGDPGIEGPIGFPGPKGVPGFKGEKGEFGADGRKGAPGLAGKNGTDGQKGKLGRIGPPGCKGDPGNRGPDGYPGEAGSPGERGDQGGKGDPGRPGRRGPPGEIGAKGSKGYQGNSGAPGSPGVKGAKGGPGPRGPKGEPGRRGDPGTKGSPGSDGPKGEKGDPGPEGPRGLAGEVGNKGAKGDRGLPGPRGPQGALGEPGKQGSRGDPGDAGPRGDSGQPGPKGDPGRPGFSYPGPRGAPGEKGEPGPRGPEGGRGDFGLKGEPGRKGEKGEPADPGPPGEPGPRGPRGVPGPEGEPGPPGDPGLTECDVMTYVRETCGCCDCEKRCGALDVVFVIDSSESIGYTNFTLEKNFVINVVNRLGAIAKDPKSETGTRVGVVQYSHEGTFEAIQLDDERIDSLSSFKEAVKNLEWIAGGTWTPSALKFAYDRLIKESRRQKTRVFAVVITDGRHDPRDDDLNLRALCDRDVTVTAIGIGDMFHEKHESENLYSIACDKPQQVRNMTLFSDLVAEKFIDDMEDVLCPDPQIVCPDLPCQTDAPWPGGEPPVTFLRTEEGPDATFPRTIPLIQQLLNATELTQDPAAYSQLVAVLVYTAERAKFATGVERQDWMELFIDTFKLVHRDIVGDPETALALC

SEQ ID NO: 3328 - protein, 828 aa, Homo sapiens; identical to SEQ ID NO: 3326

SEQ ID NO: 3329 - protein, 2971 aa, Homo sapiens
MRKHRHLPLVAVFCLFLSGFPTTHAQQQQAAQDSADIIFLIDGSNNTGSVNFAVILDFLVNLLEKLPIGTQQIRVGVVQFSDEPRTMFSLDTYSTKAQVLGAVKALGFAGGELANIGLALDFVVENHFTRAGGSRVEEGVPQVLVLISAGPSSDEIRYGVVALKQASVFSFGLGAQAASRAELQHIATDDNLVFTVPEFRSFGDLQEKLLPYIVGVAQRHIVLKPPTIVTQVIEVNKRDIVFLVDGSSALGLANFNAIRDFIAKVIQRLEIGQDLIQVAVAQYADTVRPEFYFNTHPTKREVITAVRKMKPLDGSALYTGSALDFVRNNLFTSSAGYRAAEGIPKLLVLITGGKSLDEISQPAQELKRSSIMAFAIGNKGADQAELEEIAFDSSLVFIPAEFRAAPLQGMLPGLLAPLRTLSGTPEVHSNKRDIIFLLDGSANVGKTNFPYVRDFVMNLVNSLDIGNDNIRVGLVQFSDTPVTEFSLNTYQTKSDILGHLRQLQLQGGSGLNTGSALSYVYANHFTEAGGSRIREHVPQLLLLLTAGQSEDSYLQAANALTRAGILTFCVGASQANKAELEQIAFNPSLVYLMDDFSSLPALPQQLIQPLTTYVSGGVEEVPLAQPESKRDILFLFDGSANLVGQFPVVRDFLYKIIDELNVKPEGTRIAVAQYSDDVKVESRFDEHQSKPEILNLVKRMKIKTGKALNLGYALDYAQRYIFVKSAGSRIEDGVLQFLVLLVAGRSSDRVDGPASNLKQSGVVPFIFQAKNADPAELEQIVLSPAFILAAESLPKIGDLHPQIVNLLKSVHNGAPAPVSGEKDVVFLLDGSEGVRSGFPLLKEFVQRVVESLDVGQDRVRVAVVQYSDRTRPEFYLNSYMNKQDVVNAVRQLTLLGGPTPNTGAALEFVLRNILVSSAGSRITEGVPQLLIVLTADRSGDDVRNPSVVVKRGGAVPIGIGIGNADITEMQTISFIPDFAVAIPTFRQLGTVQQVISERVTQLTREELSRLQPVLQPLPSPGVGGKRDVVFLIDGSQSAGPEFQYVRTLIERLVDYLDVGFDTTRVAVIQFSDDPKVEFLLNAHSSKDEVQNAVQRLRPKGGRQINVGNALEYVSRNIFKRPLGSRIEEGVPQFLVLISSGKSDDEVDDPAVELKQFGVAPFTIARNADQEELVKISLSPEYVFSVSTFRELPSLEQKLLTPITTLTSEQIQKLLASTRYPPPAVESDAADIVFLIDSSEGVRPDGFAHIRDFVSRIVRRLNIGPSKVRVGVVQFSNDVFPEFYLKTYRSQAPVLDAIRRLRLRGGSPLNTGKALEFVARNLFVKSAGSRIEDGVPQHLVLVLGGKSQDDVSRFAQVIRSSGIVSLGVGDRNIDRTELQTITNDPRLVFTVREFRELPNIEERIMNSFGPSAATPAPPGVDTPPPSRPEKKKADIVFLLDGSINFRRDSFQEVLRFVSEIVDTVYEDGDSIQVGLVQYNSDPTDEFFLKDFSTKRQIIDAINKVVYKGGRHANTKVGLEHLRVNHFVPEAGSRLDQRVPQIAFVITGGKSVEDAQDVSLALTQRGVKVFAVGVRNIDSEEVGKIASNSATAFRVGNVQELSELSEQVLETLHDAMHETLCPGVTDAAKACNLDVILGFDGSRDQNVFVAQKGFESKVDAILNRISQMHRVSCSGGRSPTVRVSVVANTPSGPVEAFDFDEYQPEMLEKFRNMRSQHPYVLTEDTLKVYLNKFRQSSPDSVKVVIHFTDGADGDLADLHRASENLRQEGVRALILVGLERVVNLERLMHLEFGRGFMYDRPLRLNLLDLDYELAEQLDNIAEKACCGVPCKCSGQRGDRGPIGSIGPKGIPGEDGYRGYPGDEGGPGERGPPGVNGTQGFQGCPGQRGVKGSRGFPGEKGEVGEIGLDGLDGEDGDKGLPGSSGEKGNPGRRGDKGPRGEKGERGDVGIRGDPGNPGQDSQERGPKGETGDLGPMGVPGRDGVPGGPGETGKNGGFGRRGPPGAKGNKGGPGQPGFEGEQGTRGAQGPAGPAGPPGLIGEQGISGPRGSGGAAGAPGERGRTGPLGRKGEPGEPGPKGGIGNRGPRGETGDDGRDGVGSEGRRGKKGERGFPGYPGPKGNPGEPGLNGTTGPKGIRGRRGNSGPPGIVGQKGDPGYPGPAGPKGNRGDSIDQCALIQSIKDKCPCCYGPLECPVFPTELAFALDTSEGVNQDTFGRMRDVVLSIVNDLTIAESNCPRGARVAVVTYNNEVTTEIRFADSKRKSVLLDKIKNLQVALTSKQQSLETAMSFVARNTFKRVRNGFLMRKVAVFFSNTPTRASPQLREAVLKLSDAGITPLFLTRQEDRQLINALQINNTAVGHALVLPAGRDLTDFLENVLTCHVCLDICNIDPSCGFGSWRPSFRDRRAAGSDVDIDMAFILDSAETTTLFQFNEMKKYIAYLVRQLDMSPDPKASQHFARVAVVQHAPSESVDNASMPPVKVEFSLTDYGSKEKLVDFLSRGMTQLQGTRALGSAIEYTIENVFESAPNPRDLKIVVLMLTGEVPEQQLEEAQRVILQAKCKGYFFVVLGIGRKVNIKEVYTFASEPNDVFFKLVDKSTELNEEPLMRFGRLLPSFVSSENAFYLSPDIRKQCDWFQGDQPTKNLVKFGHKQVNVPNNVTSSPTSNPVTTTKPVTTTKPVTTTTKPVTTTTKPVTIINQPSVKPAAAKPAPAKPVAAKPVATKMATVRPPVAVKPATAAKPVAAKPAAVRPPAAAAAKPVATKPEVPRPQAAKPAATKPATTKPMVKMSREVQVFEITENSAKLHWERAEPPGPYFYDLTVTSAHDQSLVLKQNLTVTDRVIGGLLAGQTYHVAVVCYLRSQVRATYHGSFSTKKSQPPPPQPARSASSSTINLMVSTEPLALTETDICKLPKDEGTCRDFILKWYYDPNTKSCARFWYGGCGGNENKFGSQKECEKVCAPVLAKPGVISVMGT

SEQ ID NO: 3330 - protein, 1237 aa, Homo sapiens
MRKHRHLPLVAVFCLFLSGFPTTHAQQQQAAQDSADIIFLIDGSNNTGSVNFAVILDFLVNLLEKLPIGTQQIRVGVVQFSDEPRTMFSLDTYSTKAQVLGAVKALGFAGGELANIGLALDFVVENHFTRAGGSRVEEGVPQVLVLISAGPSSDEIRYGVVALKQASVFSFGLGAQAASRAELQHIATDDNLVFTVPEFRSFGDLQEKLLPYIVGVAQRHIVLKPPTIVTQVIEVNKRDIVFLVDGSSALGLANFNAIRDFIAKVIQRLEIGQDLIQVAVAQYADTVRPEFYFNTHPTKREVITAVRKMKPLDGSALYTGSALDFVRNNLFTSSAGYRAAEGIPKLLVLITGGKSLDEISQPAQELKRSSIMAFAIGNKGADQAELEEIAFDSSLVFIPAEFRAAPLQGMLPGLLAPLRTLSGTPEVHSNKRDIIFLLDGSANVGKTNFPYVRDFVMNLVNSLDIGNDNIRVGLVQFSDTPVTEFSLNTYQTKSDILGHLRQLQLQGGSGLNTGSALSYVYANHFTEAGGSRIREHVPQLLLLLTAGQSEDSYLQAANALTRAGILTFCVGASQANKAELEQIAFNPSLVYLMDDFSSLPALPQQLIQPLTTYVSGGVEEVPLAQPESKRDILFLFDGSANLVGQFPVVRDFLYKIIDELNVKPEGTRIAVAQYSDDVKVESRFDEHQSKPEILNLVKRMKIKTGKALNLGYALDYAQRYIFVKSAGSRIEDGVLQFLVLLVAGRSSDRVDGPASNLKQSGVVPFIFQAKNADPAELEQIVLSPAFILAAESLPKIGDLHPQIVNLLKSVHNGAPAPVSGEKDVVFLLDGSEGVRSGFPLLKEFVQRVVESLDVGQDRVRVAVVQYSDRTRPEFYLNSYMNKQDVVNAVRQLTLLGGPTPNTGAALEFVLRNILVSSAGSRITEGVPQLLIVLTADRSGDDVRNPSVVVKRGGAVPIGIGIGNADITEMQTISFIPDFAVAIPTFRQLGTVQQVISERVTQLTREELSRLQPVLQPLPSPGVGGKRDVVFLIDGSQSAGPEFQYVRTLIERLVDYLDVGFDTTRVAVIQFSDDPKVEFLLNAHSSKDEVQNAVQRLRPKGGRQINVGNALEYVSRNIFKRPLGSRIEEGVPQFLVLISSGKSDDEVDDPAVELKQFGVAPFTIARNADQEELVKISLSPEYVFSVSTFRELPSLEQKLLTPITTLTSEQIQKLLASTRYPPPGEMGASEVLLGAFSI

SEQ ID NO: 3331 - protein, 2971 aa, Homo sapiens; identical to SEQ ID NO: 3329

SEQ ID NO: 3332 - protein, 3177 aa, Homo sapiens
MRKHRHLPLVAVFCLFLSGFPTTHAQQQQADVKNGAAADIIFLVDSSWTIGEEHFQLVREFLYDVVKSLAVGENDFHFALVQFNGNPHTEFLLNTYRTKQEVLSHISNMSYIGGTNQTGKGLEYIMQSHLTKAAGSRAGDGVPQVIVVLTDGHSKDGLALPSAELKSADVNVFAIGVEDADEGALKEIASEPLNMHMFNLENFTSLHDIVGNLVSCVHSSVSPERAGDTETLKDITAQDSADIIFLIDGSNNTGSVNFAVILDFLVNLLEKLPIGTQQIRVGVVQFSDEPRTMFSLDTYSTKAQVLGAVKALGFAGGELANIGLALDFVVENHFTRAGGSRVEEGVPQVLVLISAGPSSDEIRYGVVALKQASVFSFGLGAQAASRAELQHIATDDNLVFTVPEFRSFGDLQEKLLPYIVGVAQRHIVLKPPTIVTQVIEVNKRDIVFLVDGSSALGLANFNAIRDFIAKVIQRLEIGQDLIQVAVAQYADTVRPEFYFNTHPTKREVITAVRKMKPLDGSALYTGSALDFVRNNLFTSSAGYRAAEGIPKLLVLITGGKSLDEISQPAQELKRSSIMAFAIGNKGADQAELEEIAFDSSLVFIPAEFRAAPLQGMLPGLLAPLRTLSGTPEVHSNKRDIIFLLDGSANVGKTNFPYVRDFVMNLVNSLDIGNDNIRVGLVQFSDTPVTEFSLNTYQTKSDILGHLRQLQLQGGSGLNTGSALSYVYANHFTEAGGSRIREHVPQLLLLLTAGQSEDSYLQAANALTRAGILTFCVGASQANKAELEQIAFNPSLVYLMDDFSSLPALPQQLIQPLTTYVSGGVEEVPLAQPESKRDILFLFDGSANLVGQFPVVRDFLYKIIDELNVKPEGTRIAVAQYSDDVKVESRFDEHQSKPEILNLVKRMKIKTGKALNLGYALDYAQRYIFVKSAGSRIEDGVLQFLVLLVAGRSSDRVDGPASNLKQSGVVPFIFQAKNADPAELEQIVLSPAFILAAESLPKIGDLHPQIVNLLKSVHNGAPAPVSGEKDVVFLLDGSEGVRSGFPLLKEFVQRVVESLDVGQDRVRVAVVQYSDRTRPEFYLNSYMNKQDVVNAVRQLTLLGGPTPNTGAALEFVLRNILVSSAGSRITEGVPQLLIVLTADRSGDDVRNPSVVVKRGGAVPIGIGIGNADITEMQTISFIPDFAVAIPTFRQLGTVQQVISERVTQLTREELSRLQPVLQPLPSPGVGGKRDVVFLIDGSQSAGPEFQYVRTLIERLVDYLDVGFDTTRVAVIQFSDDPKVEFLLNAHSSKDEVQNAVQRLRPKGGRQINVGNALEYVSRNIFKRPLGSRIEEGVPQFLVLISSGKSDDEVDDPAVELKQFGVAPFTIARNADQEELVKISLSPEYVFSVSTFRELPSLEQKLLTPITTLTSEQIQKLLASTRYPPPAVESDAADIVFLIDSSEGVRPDGFAHIRDFVSRIVRRLNIGPSKVRVGVVQFSNDVFPEFYLKTYRSQAPVLDAIRRLRLRGGSPLNTGKALEFVARNLFVKSAGSRIEDGVPQHLVLVLGGKSQDDVSRFAQVIRSSGIVSLGVGDRNIDRTELQTITNDPRLVFTVREFRELPNIEERIMNSFGPSAATPAPPGVDTPPPSRPEKKKADIVFLLDGSINFRRDSFQEVLRFVSEIVDTVYEDGDSIQVGLVQYNSDPTDEFFLKDFSTKRQIIDAINKVVYKGGRHANTKVGLEHLRVNHFVPEAGSRLDQRVPQIAFVITGGKSVEDAQDVSLALTQRGVKVFAVGVRNIDSEEVGKIASNSATAFRVGNVQELSELSEQVLETLHDAMHETLCPGVTDAAKACNLDVILGFDGSRDQNVFVAQKGFESKVDAILNRISQMHRVSCSGGRSPTVRVSVVANTPSGPVEAFDFDEYQPEMLEKFRNMRSQHPYVLTEDTLKVYLNKFRQSSPDSVKVVIHFTDGADGDLADLHRASENLRQEGVRALILVGLERVVNLERLMHLEFGRGFMYDRPLRLNLLDLDYELAEQLDNIAEKACCGVPCKCSGQRGDRGPIGSIGPKGIPGEDGYRGYPGDEGGPGERGPPGVNGTQGFQGCPGQRGVKGSRGFPGEKGEVGEIGLDGLDGEDGDKGLPGSSGEKGNPGRRGDKGPRGEKGERGDVGIRGDPGNPGQDSQERGPKGETGDLGPMGVPGRDGVPGGPGETGKNGGFGRRGPPGAKGNKGGPGQPGFEGEQGTRGAQGPAGPAGPPGLIGEQGISGPRGSGGAAGAPGERGRTGPLGRKGEPGEPGPKGGIGNRGPRGETGDDGRDGVGSEGRRGKKGERGFPGYPGPKGNPGEPGLNGTTGPKGIRGRRGNSGPPGIVGQKGDPGYPGPAGPKGNRGDSIDQCALIQSIKDKCPCCYGPLECPVFPTELAFALDTSEGVNQDTFGRMRDVVLSIVNDLTIAESNCPRGARVAVVTYNNEVTTEIRFADSKRKSVLLDKIKNLQVALTSKQQSLETAMSFVARNTFKRVRNGFLMRKVAVFFSNTPTRASPQLREAVLKLSDAGITPLFLTRQEDRQLINALQINNTAVGHALVLPAGRDLTDFLENVLTCHVCLDICNIDPSCGFGSWRPSFRDRRAAGSDVDIDMAFILDSAETTTLFQFNEMKKYIAYLVRQLDMSPDPKASQHFARVAVVQHAPSESVDNASMPPVKVEFSLTDYGSKEKLVDFLSRGMTQLQGTRALGSAIEYTIENVFESAPNPRDLKIVVLMLTGEVPEQQLEEAQRVILQAKCKGYFFVVLGIGRKVNIKEVYTFASEPNDVFFKLVDKSTELNEEPLMRFGRLLPSFVSSENAFYLSPDIRKQCDWFQGDQPTKNLVKFGHKQVNVPNNVTSSPTSNPVTTTKPVTTTKPVTTTTKPVTTTTKPVTIINQPSVKPAAAKPAPAKPVAAKPVATKMATVRPPVAVKPATAAKPVAAKPAAVRPPAAAAAKPVATKPEVPRPQAAKPAATKPATTKPMVKMSREVQVFEITENSAKLHWERAEPPGPYFYDLTVTSAHDQSLVLKQNLTVTDRVIGGLLAGQTYHVAVVCYLRSQVRATYHGSFSTKKSQPPPPQPARSASSSTINLMVSTEPLALTETDICKLPKDEGTCRDFILKWYYDPNTKSCARFWYGGCGGNENKFGSQKECEKVCAPVLAKPGVISVMGT

SEQ ID NO: 3333 - protein, 708 aa, Homo sapiens
MRKHRHLPLVAVFCLFLSGFPTTHAQQQQADVKNGAAADIIFLVDSSWTIGEEHFQLVREFLYDVVKSLAVGENDFHFALVQFNGNPHTEFLLNTYRTKQEVLSHISNMSYIGGTNQTGKGLEYIMQSHLTKAAGSRAGDGVPQVIVVLTDGHSKDGLALPSAELKSADVNVFAIGVEDADEGALKEIASEPLNMHMFNLENFTSLHDIVGNLVSCVHSSVSPERAGDTETLKDITAQDSADIIFLIDGSNNTGSVNFAVILDFLVNLLEKLPIGTQQIRVGVVQFSDEPRTMFSLDTYSTKAQVLGAVKALGFAGGELANIGLALDFVVENHFTRAGGSRVEEGVPQVLVLISAGPSSDEIRYGVVALKQASVFSFGLGAQAASRAELQHIATDDNLVFTVPEFRSFGDLQEKLLPYIVGVAQRHIVLKPPTIVTQVIEVNKRDIVFLVDGSSALGLANFNAIRDFIAKVIQRLEIGQDLIQVAVAQYADTVRPEFYFNTHPTKREVITAVRKMKPLDGSALYTGSALDFVRNNLFTSSAGYRAAEGIPKLLVLITGGKSLDEISQPAQELKRSSIMAFAIGNKGADQAELEEIAFDSSLVFIPAEFRAAPLQGMLPGLLAPLRTLSGTPEESKRDILFLFDGSANLVGQFPVVRDFLYKIIDELNVKPEGTRIAVAQYSDDVKVESRFDEHQSKPEILNLVKRMKI

SEQ ID NO: 3334 - protein, 2569 aa, Homo sapiens
MRKHRHLPLVAVFCLFLSGFPTTHAQQQQAVIEVNKRDIVFLVDGSSALGLANFNAIRDFIAKVIQRLEIGQDLIQVAVAQYADTVRPEFYFNTHPTKREVITAVRKMKPLDGSALYTGSALDFVRNNLFTSSAGYRAAEGIPKLLVLITGGKSLDEISQPAQELKRSSIMAFAIGNKGADQAELEEIAFDSSLVFIPAEFRAAPLQGMLPGLLAPLRTLSGTPEESKRDILFLFDGSANLVGQFPVVRDFLYKIIDELNVKPEGTRIAVAQYSDDVKVESRFDEHQSKPEILNLVKRMKIKTGKALNLGYALDYAQRYIFVKSAGSRIEDGVLQFLVLLVAGRSSDRVDGPASNLKQSGVVPFIFQAKNADPAELEQIVLSPAFILAAESLPKIGDLHPQIVNLLKSVHNGAPAPVSGEKDVVFLLDGSEGVRSGFPLLKEFVQRVVESLDVGQDRVRVAVVQYSDRTRPEFYLNSYMNKQDVVNAVRQLTLLGGPTPNTGAALEFVLRNILVSSAGSRITEGVPQLLIVLTADRSGDDVRNPSVVVKRGGAVPIGIGIGNADITEMQTISFIPDFAVAIPTFRQLGTVQQVISERVTQLTREELSRLQPVLQPLPSPGVGGKRDVVFLIDGSQSAGPEFQYVRTLIERLVDYLDVGFDTTRVAVIQFSDDPKVEFLLNAHSSKDEVQNAVQRLRPKGGRQINVGNALEYVSRNIFKRPLGSRIEEGVPQFLVLISSGKSDDEVDDPAVELKQFGVAPFTIARNADQEELVKISLSPEYVFSVSTFRELPSLEQKLLTPITTLTSEQIQKLLASTRYPPPAVESDAADIVFLIDSSEGVRPDGFAHIRDFVSRIVRRLNIGPSKVRVGVVQFSNDVFPEFYLKTYRSQAPVLDAIRRLRLRGGSPLNTGKALEFVARNLFVKSAGSRIEDGVPQHLVLVLGGKSQDDVSRFAQVIRSSGIVSLGVGDRNIDRTELQTITNDPRLVFTVREFRELPNIEERIMNSFGPSAATPAPPGVDTPPPSRPEKKKADIVFLLDGSINFRRDSFQEVLRFVSEIVDTVYEDGDSIQVGLVQYNSDPTDEFFLKDFSTKRQIIDAINKVVYKGGRHANTKVGLEHLRVNHFVPEAGSRLDQRVPQIAFVITGGKSVEDAQDVSLALTQRGVKVFAVGVRNIDSEEVGKIASNSATAFRVGNVQELSELSEQVLETLHDAMHETLCPGVTDAAKACNLDVILGFDGSRDQNVFVAQKGFESKVDAILNRISQMHRVSCSGGRSPTVRVSVVANTPSGPVEAFDFDEYQPEMLEKFRNMRSQHPYVLTEDTLKVYLNKFRQSSPDSVKVVIHFTDGADGDLADLHRASENLRQEGVRALILVGLERVVNLERLMHLEFGRGFMYDRPLRLNLLDLDYELAEQLDNIAEKACCGVPCKCSGQRGDRGPIGSIGPKGIPGEDGYRGYPGDEGGPGERGPPGVNGTQGFQGCPGQRGVKGSRGFPGEKGEVGEIGLDGLDGEDGDKGLPGSSGEKGNPGRRGDKGPRGEKGERGDVGIRGDPGNPGQDSQERGPKGETGDLGPMGVPGRDGVPGGPGETGKNGGFGRRGPPGAKGNKGGPGQPGFEGEQGTRGAQGPAGPAGPPGLIGEQGISGPRGSGGAAGAPGERGRTGPLGRKGEPGEPGPKGGIGNRGPRGETGDDGRDGVGSEGRRGKKGERGFPGYPGPKGNPGEPGLNGTTGPKGIRGRRGNSGPPGIVGQKGDPGYPGPAGPKGNRGDSIDQCALIQSIKDKCPFHGPLECPVFPTELAFALDTSEGVNQDTFGRMRDVVLSIVNDLTIAESNCPRGARVAVVTYNNEVTTEIRFADSKRKSVLLDKIKNLQVALTSKQQSLETAMSFVARNTFKRVRNGFLMRKVAVFFSNTPTRASPQLREAVLKLSDAGITPLFLTRQEDRQLINALQINNTAVGHALVLPAGRDLTDFLENVLTCHVCLDICNIDPSCGFGSWRPSFRDRRAAGSDVDIDMAFILDSAETTTLFQFNEMKKYIAYLVRQLDMSPDPKASQHFARVAVVQHAPSESVDNASMPPVKVEFSLTDYGSKEKLVDFLSRGMTQLQGTRALGSAIEYTIENVFESAPNPRDLKIVVLMLTGEVPEQQLEEAQRVILQAKCKGYFFVVLGIGRKVNIKEVYTFASEPNDVFFKLVDKSTELNEEPLMRFGRLLPSFVSSENAFYLSPDIRKQCDWFQGDQPTKNLVKFGHKQVNVPNNVTSSPTSNPVTTTKPVTTTKPVTTTTKPVTTTTKPVTIINQPSVKPAAAKPAPAKPVAAKPVATKMATVRPPVAVKPATAAKPVAAKPAAVRPPAAAAAKPVATKPEVPRPQAAKPAATKPATTKPMVKMSREVQVFEITENSAKLHWERAEPPGPYFYDLTVTSAHDQSLVLKQNLTVTDRVIGGLLAGQTYHVAVVCYLRSQVRATYHGSFSTKKSQPPPPQPARSASSSTINLMVSTEPLALTETDICKLPKDEGTCRDFILKWYYDPNTKSCARFWYGGCGGNENKFGSQKECEKVCAPVLAKPGVISVMGT

SEQ ID NO: 3335 - protein, 2570 aa, Homo sapiens
MRKHRHLPLVAVFCLFLSGFPTTHAQQQQAVIEVNKRDIVFLVDGSSALGLANFNAIRDFIAKVIQRLEIGQDLIQVAVAQYADTVRPEFYFNTHPTKREVITAVRKMKPLDGSALYTGSALDFVRNNLFTSSAGYRAAEGIPKLLVLITGGKSLDEISQPAQELKRSSIMAFAIGNKGADQAELEEIAFDSSLVFIPAEFRAAPLQGMLPGLLAPLRTLSGTPEESKRDILFLFDGSANLVGQFPVVRDFLYKIIDELNVKPEGTRIAVAQYSDDVKVESRFDEHQSKPEILNLVKRMKIKTGKALNLGYALDYAQRYIFVKSAGSRIEDGVLQFLVLLVAGRSSDRVDGPASNLKQSGVVPFIFQAKNADPAELEQIVLSPAFILAAESLPKIGDLHPQIVNLLKSVHNGAPAPVSGEKDVVFLLDGSEGVRSGFPLLKEFVQRVVESLDVGQDRVRVAVVQYSDRTRPEFYLNSYMNKQDVVNAVRQLTLLGGPTPNTGAALEFVLRNILVSSAGSRITEGVPQLLIVLTADRSGDDVRNPSVVVKRGGAVPIGIGIGNADITEMQTISFIPDFAVAIPTFRQLGTVQQVISERVTQLTREELSRLQPVLQPLPSPGVGGKRDVVFLIDGSQSAGPEFQYVRTLIERLVDYLDVGFDTTRVAVIQFSDDPKVEFLLNAHSSKDEVQNAVQRLRPKGGRQINVGNALEYVSRNIFKRPLGSRIEEGVPQFLVLISSGKSDDEVDDPAVELKQFGVAPFTIARNADQEELVKISLSPEYVFSVSTFRELPSLEQKLLTPITTLTSEQIQKLLASTRYPPPAVESDAADIVFLIDSSEGVRPDGFAHIRDFVSRIVRRLNIGPSKVRVGVVQFSNDVFPEFYLKTYRSQAPVLDAIRRLRLRGGSPLNTGKALEFVARNLFVKSAGSRIEDGVPQHLVLVLGGKSQDDVSRFAQVIRSSGIVSLGVGDRNIDRTELQTITNDPRLVFTVREFRELPNIEERIMNSFGPSAATPAPPGVDTPPPSRPEKKKADIVFLLDGSINFRRDSFQEVLRFVSEIVDTVYEDGDSIQVGLVQYNSDPTDEFFLKDFSTKRQIIDAINKVVYKGGRHANTKVGLEHLRVNHFVPEAGSRLDQRVPQIAFVITGGKSVEDAQDVSLALTQRGVKVFAVGVRNIDSEEVGKIASNSATAFRVGNVQELSELSEQVLETLHDAMHETLCPGVTDAAKACNLDVILGFDGSRDQNVFVAQKGFESKVDAILNRISQMHRVSCSGGRSPTVRVSVVANTPSGPVEAFDFDEYQPEMLEKFRNMRSQHPYVLTEDTLKVYLNKFRQSSPDSVKVVIHFTDGADGDLADLHRASENLRQEGVRALILVGLERVVNLERLMHLEFGRGFMYDRPLRLNLLDLDYELAEQLDNIAEKACCGVPCKCSGQRGDRGPIGSIGPKGIPGEDGYRGYPGDEGGPGERGPPGVNGTQGFQGCPGQRGVKGSRGFPGEKGEVGEIGLDGLDGEDGDKGLPGSSGEKGNPGRRGDKGPRGEKGERGDVGIRGDPGNPGQDSQERGPKGETGDLGPMGVPGRDGVPGGPGETGKNGGFGRRGPPGAKGNKGGPGQPGFEGEQGTRGAQGPAGPAGPPGLIGEQGISGPRGSGGAAGAPGERGRTGPLGRKGEPGEPGPKGGIGNRGPRGETGDDGRDGVGSEGRRGKKGERGFPGYPGPKGNPGEPGLNGTTGPKGIRGRRGNSGPPGIVGQKGDPGYPGPAGPKGNRGDSIDQCALIQSIKDKCPCCYGPLECPVFPTELAFALDTSEGVNQDTFGRMRDVVLSIVNDLTIAESNCPRGARVAVVTYNNEVTTEIRFADSKRKSVLLDKIKNLQVALTSKQQSLETAMSFVARNTFKRVRNGFLMRKVAVFFSNTPTRASPQLREAVLKLSDAGITPLFLTRQEDRQLINALQINNTAVGHALVLPAGRDLTDFLENVLTCHVCLDICNIDPSCGFGSWRPSFRDRRAAGSDVDIDMAFILDSAETTTLFQFNEMKKYIAYLVRQLDMSPDPKASQHFARVAVVQHAPSESVDNASMPPVKVEFSLTDYGSKEKLVDFLSRGMTQLQGTRALGSAIEYTIENVFESAPNPRDLKIVVLMLTGEVPEQQLEEAQRVILQAKCKGYFFVVLGIGRKVNIKEVYTFASEPNDVFFKLVDKSTELNEEPLMRFGRLLPSFVSSENAFYLSPDIRKQCDWFQGDQPTKNLVKFGHKQVNVPNNVTSSPTSNPVTTTKPVTTTKPVTTTTKPVTTTTKPVTIINQPSVKPAAAKPAPAKPVAAKPVATKMATVRPPVAVKPATAAKPVAAKPAAVRPPAAAAAKPVATKPEVPRPQAAKPAATKPATTKPMVKMSREVQVFEITENSAKLHWERAEPPGPYFYDLTVTSAHDQSLVLKQNLTVTDRVIGGLLAGQTYHVAVVCYLRSQVRATYHGSFSTKKSQPPPPQPARSASSSTINLMVSTEPLALTETDICKLPKDEGTCRDFILKWYYDPNTKSCARFWYGGCGGNENKFGSQKECEKVCAPVLAKPGVISVMGT

SEQ ID NO: 3336 - protein, 1036 aa, Homo sapiens
MRKHRHLPLVAVFCLFLSGFPTTHAQQQQAVIEVNKRDIVFLVDGSSALGLANFNAIRDFIAKVIQRLEIGQDLIQVAVAQYADTVRPEFYFNTHPTKREVITAVRKMKPLDGSALYTGSALDFVRNNLFTSSAGYRAAEGIPKLLVLITGGKSLDEISQPAQELKRSSIMAFAIGNKGADQAELEEIAFDSSLVFIPAEFRAAPLQGMLPGLLAPLRTLSGTPEVHSNKRDIIFLLDGSANVGKTNFPYVRDFVMNLVNSLDIGNDNIRVGLVQFSDTPVTEFSLNTYQTKSDILGHLRQLQLQGGSGLNTGSALSYVYANHFTEAGGSRIREHVPQLLLLLTAGQSEDSYLQAANALTRAGILTFCVGASQANKAELEQIAFNPSLVYLMDDFSSLPALPQQLIQPLTTYVSGGVEEVPLAQPESKRDILFLFDGSANLVGQFPVVRDFLYKIIDELNVKPEGTRIAVAQYSDDVKVESRFDEHQSKPEILNLVKRMKIKTGKALNLGYALDYAQRYIFVKSAGSRIEDGVLQFLVLLVAGRSSDRVDGPASNLKQSGVVPFIFQAKNADPAELEQIVLSPAFILAAESLPKIGDLHPQIVNLLKSVHNGAPAPVSGEKDVVFLLDGSEGVRSGFPLLKEFVQRVVESLDVGQDRVRVAVVQYSDRTRPEFYLNSYMNKQDVVNAVRQLTLLGGPTPNTGAALEFVLRNILVSSAGSRITEGVPQLLIVLTADRSGDDVRNPSVVVKRGGAVPIGIGIGNADITEMQTISFIPDFAVAIPTFRQLGTVQQVISERVTQLTREELSRLQPVLQPLPSPGVGGKRDVVFLIDGSQSAGPEFQYVRTLIERLVDYLDVGFDTTRVAVIQFSDDPKVEFLLNAHSSKDEVQNAVQRLRPKGGRQINVGNALEYVSRNIFKRPLGSRIEEGVPQFLVLISSGKSDDEVDDPAVELKQFGVAPFTIARNADQEELVKISLSPEYVFSVSTFRELPSLEQKLLTPITTLTSEQIQKLLASTRYPPPGEMGASEVLLGAFSI

SEQ ID NO: 3337 - protein, 173 aa, Homo sapiens
PIGTQQIRVGVVQFSDEPRTMFSLDTYSTKAQVLGAVKALGFAGGELANIGLALDFVVENHFTRAGGSRVEEGVPQVLVLISAGPSSDEIRYGVVALKQASVFSFGLGAQAASRAELQHIATDDNLVFTVPEFRSFGDLQEKLLPYIVGVAQRHIVLKPPTIVTQEYGLNENW

SEQ ID NO: 3338 - protein, 557 aa, Homo sapiens
IGRALLWTTENLFPETPYLRKHKVIFVVSAGENYERKEFVKMMALRAKCQGYVIFVISLGSTRKDDMEELASYPLDQHLIQLGRIHKPDLNYIAKFLKPFLYSVRRGFNQYPPPMLEDACRLINLGGENIQNDGFQFVTELQEDFLGGNGFIGQELNSGRESPFVKTEDNGSDYLVYLPSQMFEPQKLMINYEKDQKSAEIASLTSGHENYGRKEEPDHTYEPGDVSLQEYYMDVAFLIDASQRVGSDEFKEVKAFITSVLDYFHIAPTPLTSTLGDRVAVLSYSPPGYMPNTEECPVYLEFDLVTYNSIHQMKHHLQDSQQLNGDVFIGHALQWTIDNVFVGTPNLRKNKVIFVISAGETNSLDKDVLRNVSLRAKCQGYSIFVFSFGPKHNDKELEELASHPLDHHLVQLGRTHKPDWNYIIKFVKPFVHLIRRAINKYPTEDMKATCVNMTSPNPENGGTENTVLLLPGIYEIKTENGDLFDEFDSQAQHLLVLGNNHSSGSETATDLMQKLYLLFSTEKLAMKDKEKAHLEEISALVVDKQQEKEDGEDTRSS

SEQ ID NO: 3339 - protein, 2611 aa, Homo sapiens
MKILLIIFVLIIWTETLADQSPGPGPVYADVVFLVDSSDHLGPKSFPFVKTFINKMINSLPIEANKYRVALAQYSDEFHSEFHLSTFKGRSPMLNHLKKNFQFIGGSLQIGKALQEAHRTYFSAPINGRDRKQFPPILVVLASAESEDEVEEASKALQKDGVKIISVGVQKASEENLKAMATSHFHFNLRTIRDLSTFSQNMTQIIKDVTKYKEGAVDADMQVHFPISCQKDSLADLVFLVDESLGTGGNLRHLQTFLENITSSMDVKENCMRLGLMSYSNSAKTISFLKSSTTQSEFQQQIKNLSIQVGKSNTGAAIDQMRRDGFSESYGSRRAQGVPQIAVLVTHRPSDDEVHDAALNLRLEDVNVFALSIQGANNTQLEEIVSYPPEQTISTLKSYADLETYSTKFLKKLQNEIWSQISTYAEQRNLDKTGCVDTKEADIHFLIDGSSSIQEKQFEQIKRFMLEVTEMFSIGPDKVRVGVVQYSDDTEVEFYITDYSNDIDLRKAIFNIKQLTGGTYTGKALDYILQIIKNGMKDRMSKVPCYLIVLTDGMSTDRVVEPAKRLRAEQITVHAVGIGAANKIELQEIAGKEERVSFGQNFDALKSIKNEVVREICAEKGCEDMKADIMFLVDSSWSIGNENFRKMKIFMKNLLTKIQIGADKTQIGVVQFSDKTKEEFQLNRYFTQQEISDAIDRMSLINEGTLTGKALNFVGQYFTHSKGARLGAKKFLILITDGVAQDDVRDPARILRGKDVTIFSVGVYNANRSQLEEISGDSSLVFHVENFDHLKALERKLIFRVCALHDCKRITLLDVVFVLDHSGSIKKQYQDHMINLTIHLVKKADVGRDRVQFGALKYSDQPNILFYLNTYSNRSAIIENLRKRRDTGGNTYTAKALKHANALFTEEHGSRIKQNVKQMLIVITDGESHDHDQLNDTALELRNKGITIFAVGVGKANQKELEGMAGNKNNTIYVDNFDKLKDVFTLVQERMCTEAPEVCHLQEADVIFLCDGSDRVSNSDFVTMTTFLSDLIDNFDIQSQRMKIGMAQFGSNYQSIIELKNSLTKTQWKTQIQNVSKSGGFPRIDFALKKVSNMFNLHAGGRRNAGVPQTLVVITSGDPRYDVADAVKTLKDLGICVLVLGIGDVYKEHLLPITGNSEKIITFQDFDKLKNVDVKKRIIREICQSCGKTNCFMDIVVGFDISTHVQGQPLFQGHPQLESYLPGILEDISSIKGVSCGAGTEAQVSLAFKVNSDQGFPAKFQIYQKAVFDSLLQVNVSGPTHLNAQFLRSLWDTFKDKSASRGQVLLIFSDGLQSESNIMLENQSDRLREAGLDALLVVSLNTTAHHEFSSFEFGKRFDYRTHLTIGMRELGKKLSQYLGNIAERTCCCTFCKCPGIPGPHGTRGLQAMKGSQGLKGSRGHRGEDGNPGVRGDTGPQGDKGIAGCPGAWGQKGLKGFSGPKGGHGDDGIDGLDGEEGCHGFPGIKGEKGDPGSQGSPGSRGAPGQYGEKGFPGDPGNPGQNNNIKGQKGSKGEQGRQGRSGQKGVQGSPSSRGSRGREGQRGLRGVSGEPGNPGPTGTLGAEGLQGPQGSQGNPGRKGEKGSQGQKGPQGSPGLMGAKGSTGRPGLLGKKGEPGLPGDLGPVGQTGQRGRQGDSGIPGYGQMGRKGVKGPRGFPGDAGQKGDIGNPGIPGGPGPKGFRGLALTVGLKGEEGSRGLPGPPGQRGIKGMAGQPVYSQCDLIRFLREHSLFKNAYPTELVFALDNSYDVTEESFNKTRDIITSIVNDLNIRENNCPVGARVAMVSYNSGTSYLIRWSDYNRKKQLLQQLSQIKYQDTTEPRDVGNAMRFVTRNVFKRTYAGANVRRVAVFFSNGQTASRSSIITATMEFSALDISPTVFAFDERVFLEAFGFDNTGTFQVIPVPPNGENQTLERLRRCALCYDKCFPNACIREAFLPEDSYMDVVFLIDNSRNIAKDEFKAVKALVSSVIDNFNIASDPLISDSGDRIALLSYSPWESSRRKMGTVKTEFDFITYDNQLLMKNHIQTSFQQLNGEATIGRALLWTTENLFPETPYLRKHKVIFVVSAGENYERKEFVKMMALRAKCQGYVIFVISLGSTRKDDMEELASYPLDQHLIQLGRIHKPDLNYIAKFLKPFLYSVRRGFNQYPPPMLEDACRLINLGGENIQNDGFQFVTELQEDFLGGNGFIGQELNSGRESPFVKTEDNGSDYLVYLPSQMFEPQKLMINYEKDQKSAEIASLTSGHENYGRKEEPDHTYEPGDVSLQEYYMDVAFLIDASQRVGSDEFKEVKAFITSVLDYFHIAPTPLTSTLGDRVAVLSYSPPGYMPNTEECPVYLEFDLVTYNSIHQMKHHLQDSQQLNGDVFIGHALQWTIDNVFVGTPNLRKNKVIFVISAGETNSLDKDVLRNVSLRAKCQGYSIFVFSFGPKHNDKELEELASHPLDHHLVQLGRTHKPDWNYIIKFVKPFVHLIRRAINKYPTEDMKATCVNMTSPNPENGGTENTVLLLPGIYEIKTENGDLFDEFDSQAQHLLVLGNNHSSGSETATDLMQKLYLLFSTEKLAMKDKEKAHLEEISALVVDKQQEKEDKEMEATDI

SEQ ID NO: 3340 - protein, 2615 aa, Homo sapiens
MKILLIIFVLIIWTETLADQSPGPGPVYADVVFLVDSSDHLGPKSFPFVKTFINKMINSLPIEANKYRVALAQYSDEFHSEFHLSTFKGRSPMLNHLKKNFQFIGGSLQIGKALQEAHRTYFSAPINGRDRKQFPPILVVLASAESEDEVEEASKALQKDGVKIISVGVQKASEENLKAMATSHFHFNLRTIRDLSTFSQNMTQIIKDVTKYKEGAVDADMQVHFPISCQKDSLADLVFLVDESLGTGGNLRHLQTFLENITSSMDVKENCMRLGLMSYSNSAKTISFLKSSTTQSEFQQQIKNLSIQVGKSNTGAAIDQMRRDGFSESYGSRRAQGVPQIAVLVTHRPSDDEVHDAALNLRLEDVNVFALSIQGANNTQLEEIVSYPPEQTISTLKSYADLETYSTKFLKKLQNEIWSQISTYAEQRNLDKTGCVDTKEADIHFLIDGSSSIQEKQFEQIKRFMLEVTEMFSIGPDKVRVGVVQYSDDTEVEFYITDYSNDIDLRKAIFNIKQLTGGTYTGKALDYILQIIKNGMKDRMSKVPCYLIVLTDGMSTDRVVEPAKRLRAEQITVHAVGIGAANKIELQEIAGKEERVSFGQNFDALKSIKNEVVREICAEKGCEDMKADIMFLVDSSWSIGNENFRKMKIFMKNLLTKIQIGADKTQIGVVQFSDKTKEEFQLNRYFTQQEISDAIDRMSLINEGTLTGKALNFVGQYFTHSKGARLGAKKFLILITDGVAQDDVRDPARILRGKDVTIFSVGVYNANRSQLEEISGDSSLVFHVENFDHLKALERKLIFRVCALHDCKRITLLDVVFVLDHSGSIKKQYQDHMINLTIHLVKKADVGRDRVQFGALKYSDQPNILFYLNTYSNRSAIIENLRKRRDTGGNTYTAKALKHANALFTEEHGSRIKQNVKQMLIVITDGESHDHDQLNDTALELRNKGITIFAVGVGKANQKELEGMAGNKNNTIYVDNFDKLKDVFTLVQERMCTEAPEVCHLQEADVIFLCDGSDRVSNSDFVTMTTFLSDLIDNFDIQSQRMKIGMAQFGSNYQSIIELKNSLTKTQWKTQIQNVSKSGGFPRIDFALKKVSNMFNLHAGGRRNAGVPQTLVVITSGDPRYDVADAVKTLKDLGICVLVLGIGDVYKEHLLPITGNSEKIITFQDFDKLKNVDVKKRIIREICQSCGKTNCFMDIVVGFDISTHVQGQPLFQGHPQLESYLPGILEDISSIKGVSCGAGTEAQVSLAFKVNSDQGFPAKFQIYQKAVFDSLLQVNVSGPTHLNAQFLRSLWDTFKDKSASRGQVLLIFSDGLQSESNIMLENQSDRLREAGLDALLVVSLNTTAHHEFSSFEFGKRFDYRTHLTIGMRELGKKLSQYLGNIAERTCCCTFCKCPGIPGPHGTRGLQAMKGSQGLKGSRGHRGEDGNPGVRGDTGPQGDKGIAGCPGAWGQKGLKGFSGPKGGHGDDGIDGLDGEEGCHGFPGIKGEKGDPGSQGSPGSRGAPGQYGEKGFPGDPGNPGQNNNIKGQKGSKGEQGRQGRSGQKGVQGSPSSRGSRGREGQRGLRGVSGEPGNPGPTGTLGAEGLQGPQGSQGNPGRKGEKGSQGQKGPQGSPGLMGAKGSTGRPGLLGKKGEPGLPGDLGPVGQTGQRGRQGDSGIPGYGQMGRKGVKGPRGFPGDAGQKGDIGNPGIPGGPGPKGFRGLALTVGLKGEEGSRGLPGPPGQRGIKGMAGQPVYSQCDLIRFLREHSPCWKEKCPAYPTELVFALDNSYDVTEESFNKTRDIITSIVNDLNIRENNCPVGARVAMVSYNSGTSYLIRWSDYNRKKQLLQQLSQIKYQDTTEPRDVGNAMRFVTRNVFKRTYAGANVRRVAVFFSNGQTASRSSIITATMEFSALDISPTVFAFDERVFLEAFGFDNTGTFQVIPVPPNGENQTLERLRRCALCYDKCFPNACIREAFLPEDSYMDVVFLIDNSRNIAKDEFKAVKALVSSVIDNFNIASDPLISDSGDRIALLSYSPWESSRRKMGTVKTEFDFITYDNQLLMKNHIQTSFQQLNGEATIGRALLWTTENLFPETPYLRKHKVIFVVSAGENYERKEFVKMMALRAKCQGYVIFVISLGSTRKDDMEELASYPLDQHLIQLGRIHKPDLNYIAKFLKPFLYSVRRGFNQYPPPMLEDACRLINLGGENIQNDGFQFVTELQEDFLGGNGFIGQELNSGRESPFVKTEDNGSDYLVYLPSQMFEPQKLMINYEKDQKSAEIASLTSGHENYGRKEEPDHTYEPGDVSLQEYYMDVAFLIDASQRVGSDEFKEVKAFITSVLDYFHIAPTPLTSTLGDRVAVLSYSPPGYMPNTEECPVYLEFDLVTYNSIHQMKHHLQDSQQLNGDVFIGHALQWTIDNVFVGTPNLRKNKVIFVISAGETNSLDKDVLRNVSLRAKCQGYSIFVFSFGPKHNDKELEELASHPLDHHLVQLGRTHKPDWNYIIKFVKPFVHLIRRAINKYPTEDMKATCVNMTSPNPENGGTENTVLLLPGIYEIKTENGDLFDEFDSQAQHLLVLGNNHSSGSETATDLMQKLYLLFSTEKLAMKDKEKAHLEEISALVVDKQQEKEDKEMEATDI

SEQ ID NO: 3341 - protein, 443 aa, Homo sapiens
NQYPPPMLEDACRLINLGGENIQNDGFQFVTELQEDFLGGNGFIGQELNSGRESPFVKTEDNGSDYLVYLPSQMFEPQKLMINYEKDQKSAEIASLTSGHENYGRKEEPDHTYEPGDVSLQEYYMDVAFLIDASQRVGSDEFKEVKAFITSVLDYFHIAPTPLTSTLGDRVAVLSYSPPGYMPNTEECPVYLEFDLVTYNSIHQMKHHLQDSQQLNGDVFIGHALQWTIDNVFVGTPNLRKNKVIFVISAGETNSLDKDVLRNVSLRAKCQGYSIFVFSFGPKHNDKELEELASHPLDHHLVQLGRTHKPDWNYIIKFVKPFVHLIRRAINKYPTEDMKATCVNMTSPNPENGGTENTVLLLPGIYEIKTENGDLFDEFDSQAQHLLVLGNNHSSGSETATDLMQKLYLLFSTEKLAMKDKEKAHLEEISALVVDKQQEKEDL

SEQ ID NO: 3342 - protein, 778 aa, Homo sapiens
  SITE 1: note = misc_feature - Xaa can be any naturally occurring amino acid
XEKCPAYPTELVFALDNSYDVTEESFNKTRDIITSIVNDLNIRENNCPVGARVAMVSYNSGTSYLIRWSDYNRKKQLLQQLSQIKYQDTTEPRDVGNAMRFVTRNVFKRTYAGANVRRVAVFFSNGQTASRSSIITATMEFSALDISPTVFAFDERVFLEAFGFDNTGTFQVIPVPPNGENQTLERLRRCALCYDKCFPNACIREAFLPEDSYMDVVFLIDNSRNIAKDEFKAVKALVSSVIDNFNIASDPLISDSGDRIALLSYSPWESSRRKMGTVKTEFDFITYDNQLLMKNHIQTSFQQLNGEATIGRALLWTTENLFPETPYLRKHKVIFVVSAGENYERKEFVKMMALRAKCQGYVIFVISLGSTRKDDMEELASYPLDQHLIQLGRIHKPDLNYIAKFLKPFLYSVRRGFNQYPPPMLEDACRLINLGGENIQNDGFQFVTELQEDFLGGNGFIGQELNSGRESPFVKTEDNGSDYLVYLPSQMFEPQKLMINYEKDQKSAEIASLTSGHENYGRKEEPDHTYEPGDVSLQEYYMDVAFLIDASQRVGSDEFKEVKAFITSVLDYFHIAPTPLTSTLGDRVAVLSYSPPGYMPNTEECPVYLEFDLVTYNSIHQMKHHLQDSQQLNGDVFIGHALQWTIDNVFVGTPNLRKNKVIFVISAGETNSLDKDVLRNVSLRAKCQGYSIFVFSFGPKHNDKELEELASHPLDHHLVQLGRTHKPDWNYIIKFVKPFVHLIRRAINKYPTEDMKATCVNMTSPNPENGGTENTVLW

SEQ ID NO: 3343 - protein, 2263 aa, Homo sapiens
MMLLILFLVIICSHISVNQDSGPEYADVVFLVDSSDRLGSKSFPFVKMFITKMISSLPIEADKYRVALAQYSDKLHSEFHLSTFKGRSPMLNHLRKNFGFIGGSLQIGKALQEAHRTYFSAPANGRDKKQFPPILVVLASSESEDNVEEASKALRKDGVKIISVGVQKASEENLKAMATSQFHFNLRTVRDLSMFSQNMTHIIKDVIKYKEGAVDDIFVEACQGPSMADVVFLLDMSINGSEENFDYLKGFLEESVSALDIKENCMRVGLVAYSNETKVINSLSMGINKSEVLQHIQNLSPRTGKAYTGAAIKKLRKEVFSARNGSRKNQGVPQIAVLVTHRDSEDNVTKAAVNLRREGVTIFTLGIEGASDTQLEKIASHPAEQYVSKLKTFADLAAHNQTFLKKLRNQITHTVSVFSERTETLKSGCVDTEEADIYLLIDGSGSTQATDFHEMKTFLSEVVGMFNIAPHKVRVGAVQYADSWDLEFEINKYSNKQDLGKAIENIRQMGGNTNTGAALNFTLSLLQKAKKQRGNKVPCHLVVLTNGMSKDSILEPANRLREEHIRVYAIGIKEANQTQLREIAGEEKRVYYVHDFDALKDIRNQVVQEICTEEACKEMKADIMFLVDSSGSIGPENFSKMKTFMKNLVSKSQIGPDRVQIGVVQFSDINKEEFQLNRFMSQSDISNAIDQMAHIGQTTLTGSALSFVSQYFSPTKGARPNIRKFLILITDGEAQDIVKEPAVVLRQEGVIIYSVGVFGSNVTQLEEISGRPEMVFYVENFDILQRIEDDLVFGICSPREECKRIEVLDVVFVIDSSGSIDYDEYNIMKDFMIGLVKKADVGKNQVRFGALKYADDPEVLFYLDDFGTKLEVISVLQNDQAMGGSTYTAEALGFSDHMFTEARGSRLNKGVPQVLIVITDGESHDADKLNATAKALRDKGILVLAVGIDGANPVELLAMAGSSDKYFFVETFGGLKGIFSDVTASVCNSSKVDCEIDKVDLVFLMDGSTSIQPNDFKKMKEFLASVVQDFDVSLNRVRIGAAQFSDTYHPEFPLGTFIGEKEISFQIENIKQIFGNTHIGAALREVEHYFRPDMGSRINTGTPQVLLVLTDGQSQDEVAQAAEALRHRGIDIYSVGIGDVDDQQLIQITGTAEKKLTVHNFDELKKVNKRIVRNICTTAGESNCFVDVVVGFDVSTQEKGQTLLEGQPWMETYLQDILRAISSLNGVSCEVGTETQVSVAFQVTNAMEKYSPKFEIYSENILNSLKDITVKGPSLLNANLLDSLWDTFQNKSAARGKVVLLFSDGLDDDVEKLEQKSDELRKEGLNALITVALDGPADSSDLADLPYIEFGKGFEYRTQLSIGMRELGSRLSKQLVNVAERTCCCLFCKCIGGDGTMGDPGPPGKRGPPGFKGSEGYLGEEGIAGERGAPGPVGEQGTKGCYGTKGPKGNRGLNGQEGEVGENGIDGLNGEQGDNGLPGRKGEKGDEGSQGSPGKRGTPGDRGAKGLRGDPGAPGVDSSIEGPTGLKGERGRQGRRGWPGPPGTPGSRRKTAAHGRRGHTGPQGTAGIPGPDGLEGSLGLKGPQGPRGEAGVKGEKGGVGSKGPQGPPGPGGEAGNQGRLGSQGNKGEPGDLGEKGAVGFPGPRGLQGNDGSPGYGSVGRKGAKGQEGFPGESGPKGEIGDPGGPGETGLKGARGKMISAGLPGEMGSPGEPGPPGRKGVKGAKGLASFSTCELIQYVRDRSPGRHGKPECPVHPTELVFALDHSRDVTEQEFERMKEMMAFLVRDIKVRENSCPVGAHIAILSYNSHARHLVRFSDAYKKSQLLREIETIPYERSSASREIGRAMRFISRNVFKRTLPGAHTRKIATFFSSGQSADAHSITTAAMEFGALEIIPVVITFSNVPSVRRAFAIDDTGTFQVIVVPSGADYIPALERLQRCTFCYDVCKPDASCDQARPPPVQSYMDAAFLLDASRNMGSAEFEDIRAFLGALLDHFEITPEPETSVTGDRVALLSHAPPDFLPNTQKSPVRAEFNLTTYRSKRLMKRHVHESVKQLNGDAFIGHALQWTLDNVFLSTPNLRRNKVIFVISAGETSHLDGEILKKESLRAKCQGYALFVFSLGPIWDDKELEDLASHPLDHHLVQLGRIHKPDHSYGVKFVKSFINSIRRAINKYPPINLKIKCNRLNSIDPKQPPRPFRSFVPGPLKATLKEDVLQKAKFFQDKKYLSRVARSGRDDAIQNFMRSTSHTFKNGRMIESAPKQHD

SEQ ID NO: 3344 - protein, 298 aa, Homo sapiens
  SITE 1: note = misc_feature - Xaa can be any naturally occurring amino acid
XLNGVSCEVGTETQVSVAFQVTNAMEKYSPKFEIYSENILNSLKDITVKGPSLLNANLLDSLWDTFQNKSAARGKVVLLFSDGLDDDVEKLEQKSDELRKEGLNALITVALDGPADSSDLADLPYIEFGKGFEYRTQLSIGMRELGSRLSKQLVNVAERTCCCLFCKCIGGDGTMGDPGPPGKRGPPGFKGSEGYLGEEGIAGERGAPGPVGEQGTKGCYGTKGPKGNRGLNGQEGEVGENGIDGLNGEQGDNGLPGRKGEKGDEGSQGSPGKRGTPGDRGAKGLRGDPVSARAANWS

SEQ ID NO: 3345 - protein, 259 aa, Homo sapiens
  SITE 1: note = misc_feature - Xaa can be any naturally occurring amino acid
XTNAMEKYSPKFEIYSENILNSLKDITVKGPSLLNANLLDSLWDTFQNKSAARGKVVLLFSDGLDDDVEKLEQKSDELRKEGLNALITVALDGPADSSDLADLPYIEFGKGFEYRTQLSIGMRELGSRLSKQLVNVAERTCCCLFCKCIGGDGTMGDPGPPGKRLHVKRVVDFFKKQGSERMERKGPPGFKGSEGYLGEEGIAGERGAPGPVGEQGTKGCYGTKGPKGNRGLNGQEGEVGENGIDGLNGEQGDNGLPGR

SEQ ID NO: 3346 - protein, 173 aa, Homo sapiens
MSALACGLPVPVPCLNSHLSMGQKGAPGPKGFKGDPGVGVPGSPGPPGPPGVKGDLGLPGLPGAPGVVGFPGQTGPRGEMGQPGPSGERGLAGPPGREGIPGPLGPPGPPGSVGPPGASGLKGDKGDPGVGLPGPRGERGEPGIRGEDGRPGQEGPRGLTGPPGSRGERGEKG

SEQ ID NO: 3347 - protein, 2944 aa, Homo sapiens
MTLRLLVAALCAGILAEAPRVRAQHRERVTCTRLYAADIVFLLDGSSSIGRSNFREVRSFLEGLVLPFSGAASAQGVRFATVQYSDDPRTEFGLDALGSGGDVIRAIRELSYKGGNTRTGAAILHVADHVFLPQLARPGVPKVCILITDGKSQDLVDTAAQRLKGQGVKLFAVGIKNADPEELKRVASQPTSDFFFFVNDFSILRTLLPLVSRRVCTTAGGVPVTRPPDDSTSAPRDLVLSEPSSQSLRVQWTAASGPVTGYKVQYTPLTGLGQPLPSERQEVNVPAGETSVRLRGLRPLTEYQVTVIALYANSIGEAVSGTARTTALEGPELTIQNTTAHSLLVAWRSVPGATGYRVTWRVLSGGPTQQQELGPGQGSVLLRDLEPGTDYEVTVSTLFGRSVGPATSLMARTDASVEQTLRPVILGPTSILLSWNLVPEARGYRLEWRRETGLEPPQKVVLPSDVTRYQLDGLQPGTEYRLTLYTLLEGHEVATPATVVPTGPELPVSPVTDLQATELPGQRVRVSWSPVPGATQYRIIVRSTQGVERTLVLPGSQTAFDLDDVQAGLSYTVRVSARVGPREGSASVLTVRREPETPLAVPGLRVVVSDATRVRVAWGPVPGASGFRISWSTGSGPESSQTLPPDSTATDITGLQPGTTYQVAVSVLRGREEGPAAVIVARTDPLGPVRTVHVTQASSSSVTITWTRVPGATGYRVSWHSAHGPEKSQLVSGEATVAELDGLEPDTEYTVHVRAHVAGVDGPPASVVVRTAPEPVGRVSRLQILNASSDVLRITWVGVTGATAYRLAWGRSEGGPMRHQILPGNTDSAEIRGLEGGVSYSVRVTALVGDREGTPVSIVVTTPPEAPPALGTLHVVQRGEHSLRLRWEPVPRAQGFLLHWQPEGGQEQSRVLGPELSSYHLDGLEPATQYRVRLSVLGPAGEGPSAEVTARTESPRVPSIELRVVDTSIDSVTLAWTPVSRASSYILSWRPLRGPGQEVPGSPQTLPGISSSQRVTGLEPGVSYIFSLTPVLDGVRGPEASVTQTPVCPRGLADVVFLPHATQDNAHRAEATRRVLERLVLALGPLGPQAVQVGLLSYSHRPSPLFPLNGSHDLGIILQRIRDMPYMDPSGNNLGTAVVTAHRYMLAPDAPGRRQHVPGVMVLLVDEPLRGDIFSPIREAQASGLNVVMLGMAGADPEQLRRLAPGMDSVQTFFAVDDGPSLDQAVSGLATALCQASFTTQPRPEPCPVYCPKGQKGEPGEMGLRGQVGPPGDPGLPGRTGAPGPQGPPGSATAKGERGFPGADGRPGSPGRAGNPGTPGAPGLKGSPGLPGPRGDPGERGPRGPKGEPGAPGQVIGGEGPGLPGRKGDPGPSGPPGPRGPLGDPGPRGPPGLPGTAMKGDKGDRGERGPPGPGEGGIAPGEPGLPGLPGSPGPQGPVGPPGKKGEKGDSEDGAPGLPGQPGSPGEQGPRGPPGAIGPKGDRGFPGPLGEAGEKGERGPPGPAGSRGLPGVAGRPGAKGPEGPPGPTGRQGEKGEPGRPGDPAVVGPAVAGPKGEKGDVGPAGPRGATGVQGERGPPGLVLPGDPGPKGDPGDRGPIGLTGRAGPPGDSGPPGEKGDPGRPGPPGPVGPRGRDGEVGEKGDEGPPGDPGLPGKAGERGLRGAPGVRGPVGEKGDQGDPGEDGRNGSPGSSGPKGDRGEPGPPGPPGRLVDTGPGAREKGEPGDRGQEGPRGPKGDPGLPGAPGERGIEGFRGPPGPQGDPGVRGPAGEKGDRGPPGLDGRSGLDGKPGAAGPSGPNGAAGKAGDPGRDGLPGLRGEQGLPGPSGPPGLPGKPGEDGKPGLNGKNGEPGDPGEDGRKGEKGDSGASGREGRDGPKGERGAPGILGPQGPPGLPGPVGPPGQGFPGVPGGTGPKGDRGETGSKGEQGLPGERGLRGEPGSVPNVDRLLETAGIKASALREIVETWDESSGSFLPVPERRRGPKGDSGEQGPPGKEGPIGFPGERGLKGDRGDPGPQGPPGLALGERGPPGPSGLAGEPGKPGIPGLPGRAGGVGEAGRPGERGERGEKGERGEQGRDGPPGLPGTPGPPGPPGPKVSVDEPGPGLSGEQGPPGLKGAKGEPGSNGDQGPKGDRGVPGIKGDRGEPGPRGQDGNPGLPGERGMAGPEGKPGLQGPRGPPGPVGGHGDPGPPGAPGLAGPAGPQGPSGLKGEPGETGPPGRGLTGPTGAVGLPGPPGPSGLVGPQGSPGLPGQVGETGKPGAPGRDGASGKDGDRGSPGVPGSPGLPGPVGPKGEPGPTGAPGQAVVGLPGAKGEKGAPGGLAGDLVGEPGAKGDRGLPGPRGEKGEAGRAGEPGDPGEDGQKGAPGPKGFKGDPGVGVPGSPGPPGPPGVKGDLGLPGLPGAPGVVGFPGQTGPRGEMGQPGPSGERGLAGPPGREGIPGPLGPPGPPGSVGPPGASGLKGDKGDPGVGLPGPRGERGEPGIRGEDGRPGQEGPRGLTGPPGSRGERGEKGDVGSAGLKGDKGDSAVILGPPGPRGAKGDMGERGPRGLDGDKGPRGDNGDPGDKGSKGEPGDKGSAGLPGLRGLLGPQGQPGAAGIPGDPGSPGKDGVPGIRGEKGDVGFMGPRGLKGERGVKGACGLDGEKGDKGEAGPPGRPGLAGHKGEMGEPGVPGQSGAPGKEGLIGPKGDRGFDGQPGPKGDQGEKGERGTPGIGGFPGPSGNDGSAGPPGPPGSVGPRGPEGLQGQKGERGPPGERVVGAPGVPGAPGERGEQGRPGPAGPRGEKGEAALTEDDIRGFVRQEMSQHCACQGQFIASGSRPLPSYAADTAGSQLHAVPVLRVSHAEEEERVPPEDDEYSEYSEYSVEEYQDPEAPWDSDDPCSLPLDEGSCTAYTLRWYHRAVTGSTEACHPFVYGGCGGNANRFGTREACERRCPPRVVQSQGTGTAQD

SEQ ID NO: 3348 - protein, 114 aa, Homo sapiens
MAVLPGPLQLLGVLLTISLSSIRLIQAGAYYGIKPLPPQIPPQMPPQIPQYQPLGQQVPHMPLAKDGLAMGKEMPHLQYGKEYPHLPQYMKEIQPAPRMGKEAVPKKGKEIPLA

SEQ ID NO: 3349 - protein, 202 aa, Homo sapiens
MAVLPGPLQLLGVLLTISLSSIRLIQAGAYYGIKPLPPQIPPQMPPQIPQYQPLGQQVPHMPLAKDGLAMGKEMPHLQYGKEYPHLPQYMKEIQPAPRMGKEAVPKKGKEIPLASLRGEQGPRGEPGPRGPPGPPGLPGHGIPGIKGKPGPQGYPGVGKPGMPGMPGKPGAMGMPGAKGEIGQKGEIGPMGIPGPQGPPGPH

SEQ ID NO: 3350 - protein, 744 aa, Homo sapiens
MAVLPGPLQLLGVLLTISLSSIRLIQAGAYYGIKPLPPQIPPQMPPQIPQYQPLGQQVPHMPLAKDGLAMGKEMPHLQYGKEYPHLPQYMKEIQPAPRMGKEAVPKKGKEIPLASLRGEQGPRGEPGPRGPPGPPGLPGHGIPGIKGKPGPQGYPGVGKPGMPGMPGKPGAMGMPGAKGEIGQKGEIGPMGIPGPQGPPGPHGLPGIGKPGGPGLPGQPGPKGDRGPKGLPGPQGLRGPKGDKGFGMPGAPGVKGPPGMHGPPGPVGLPGVGKPGVTGFPGPQGPLGKPGAPGEPGPQGPIGVPGVQGPPGIPGIGKPGQDGIPGQPGFPGGKGEQGLPGLPGPPGLPGIGKPGFPGPKGDRGMGGVPGALGPRGEKGPIGAPGIGGPPGEPGLPGIPGPMGPPGAIGFPGPKGEGGIVGPQGPPGPKGEPGLQGFPGKPGFLGEVGPPGMRGLPGPIGPKGEAGQKGVPGLPGVPGLLGPKGEPGIPGDQGLQGPPGIPGIGGPSGPIGPPGIPGPKGEPGLPGPPGFPGIGKPGVAGLHGPPGKPGALGPQGQPGLPGPPGPPGPPGPPAVMPPTPPPQGEYLPDMGLGIDGVKPPHAYGAKKGKNGGPAYEMPAFTAELTAPFPPVGAPVKFNKLLYNGRQNYNPQTGIFTCEVPGVYYFAYHVHCKGGNVWVALFKNNEPVMYTYDEYKKGFLDQASGSAVLLLRPGDRVFLQMPSEQAAGLYAGQYVHSSFSGYLLYPM

SEQ ID NO: 3351 - protein, 744 aa, Homo sapiens; identical to SEQ ID NO: 3350

SEQ ID NO: 3352 - protein, 703 aa, Homo sapiens
MLGTLTPLSSLLLLLLVLVLGCGPRASSGGGAGGAAGYAPVKYIQPMQKGPVGPPFREGKGQYLEMPLPLLPMDLKGEPGPPGKPGPRGPPGPPGFPGKPGMGKPGLHGQPGPAGPPGFSRMGKAGPPGLPGKVGPPGQPGLRGEPGIRGDQGLRGPPGPPGLPGPSGITIPGKPGAQGVPGPPGFQGEPGPQGEPGPPGDRGLKGDNGVGQPGLPGAPGQGGAPGPPGLPGPAGLGKPGLDGLPGAPGDKGESGPPGVPGPRGEPGAVGPKGPPGVDGVGVPGAAGLPGPQGPSGAKGEPGTRGPPGLIGPTGYGMPGLPGPKGDRGPAGVPGLLGDRGEPGEDGEPGEQGPQGLGGPPGLPGSAGLPGRRGPPGPKGEAGPGGPPGVPGIRGDQGPSGLAGKPGVPGERGLPGAHGPPGPTGPKGEPGFTGRPGGPGVAGALGQKGDLGLPGQPGLRGPSGIPGLQGPAGPIGPQGLPGLKGEPGLPGPPGEGRAGEPGTAGPTGPPGVPGSPGITGPPGPPGPPGPPGAPGAFDETGIAGLHLPNGGVEGAVLGKGGKPQFGLGELSAHATPAFTAVLTSPFPASGMPVKFDRTLYNGHSGYNPATGIFTCPVGGVYYFAYHVHVKGTNVWVALYKNNVPATYTYDEYKKGYLDQASGGAVLQLRPNDQVWVQMPSDQANGLYSTEYIHSSFSGFLLCPT

SEQ ID NO: 3353 - protein, 703 aa, Homo sapiens; identical to SEQ ID NO: 3352

SEQ ID NO: 3354 - protein, 638 aa, Homo sapiens
MPLPLLPMDLKGEPGPPGKPGPRGPPGPPGFPGKPGMGKPGLHGQPGPAGPPGFSRMGKAGPPGLPGKVGPPGQPGLRGEPGIRGDQGLRGPPGPPGLPGPSGITIPGKPGAQGVPGPPGFQGEPGPQGEPGPPGDRGLKGDNGVGQPGLPGAPGQGGAPGPPGLPGPAGLGKPGLDGLPGAPGDKGESGPPGVPGPRGEPGAVGPKGPPGVDGVGVPGAAGLPGPQGPSGAKGEPGTRGPPGLIGPTGYGMPGLPGPKGDRGPAGVPGLLGDRGEPGEDGEPGEQGPQGLGGPPGLPGSAGLPGRRGPPGPKGEAGPGGPPGVPGIRGDQGPSGLAGKPGVPGERGLPGAHGPPGPTGPKGEPGFTGRPGGPGVAGALGQKGDLGLPGQPGLRGPSGIPGLQGPAGPIGPQGLPGLKGEPGLPGPPGEGRAGEPGTAGPTGPPGVPGSPGITGPPGPPGPPGPPGAPGAFDETGIAGLHLPNGGVEGAVLGKGGKPQFGLGELSAHATPAFTAVLTSPFPASGMPVKFDRTLYNGHSGYNPATGIFTCPVGGVYYFAYHVHVKGTNVWVALYKNNVPATYTYDEYKKGYLDQASGGAVLQLRPNDQVWVQMPSDQANGLYSTEYIHSSFSGFLLCPT

SEQ ID NO: 3355 - protein, 112 aa, Homo sapiens
MAWTARDRGALGLLLLGLCLCAAQRGPPGEQGPPGPPGPPGVPGIDGIDGDRGPKGPPGPPGPAGEPGKPGAPGKPGTPGADAGVQWHDLGSLQPLPPGFKRFSCLSLQLPE

SEQ ID NO: 3356 - protein, 678 aa, Homo sapiens
MAWTARDRGALGLLLLGLCLCAAQRGPPGEQGPPGPPGPPGVPGIDGIDGDRGPKGPPGPPGPAGEPGKPGAPGKPGTPGADGLTGPDGSPGSIGSKGQKGEPGVPGSRGFPGRGIPGPPGPPGTAGLPGELGRVGPVGDPGRRGPPGPPGPPGPRGTIGFHDGDPLCPNACPPGRSGYPGLPGMRGHKGAKGEIGEPGRQGHKGEEGDQGELGEVGAQGPPGAQGLRGITGIVGDKGEKGARGLDGEPGPQGLPGAPGDQGQRGPPGEAGPKGDRGAEGARGIPGLPGPKGDTGLPGVDGRDGIPGMPGTKGEPGKPGPPGDAGLQGLPGVPGIPGAKGVAGEKGSTGAPGKPGQMGNSGKPGQQGPPGEVGPRGPQGLPGSRGELGPVGSPGLPGKLGSLGSPGLPGLPGPPGLPGMKGDRGVVGEPGPKGEQGASGEEGEAGERGELGDIGLPGPKGSAGNPGEPGLRGPEGSRGLPGVEGPRGPPGPRGVQGEQGATGLPGVQGPPGRAPTDQHIKQVCMRVIQEHFAEMAASLKRPDSGATGLPGRPGPPGPPGPPGENGFPGQMGIRGLPGIKGPPGALGLRGPKGDLGEKGERGPPGRGPNGLPGAIGLPGDPGPASYGRNGRDGERGPPGVAGIPGVPGPPGPPGLPGFCEPASCTMQAGQRAFNKGPDP

SEQ ID NO: 3357 - protein, 921 aa, Homo sapiens
MKTCWKIPVFFFVCSFLEPWASAAVKRRPRFPVNSNSNGGNELCPKIRIGQDDLPGFDLISQFQVDKAASRRAIQRVVGSATLQVAYKLGNNVDFRIPTRNLYPSGLPEEYSFLTTFRMTGSTLKKNWNIWQIQDSSGKEQVGIKINGQTQSVVFSYKGLDGSLQTAAFSNLSSLFDSQWHKIMIGVERSSATLFVDCNRIESLPIKPRGPIDIDGFAVLGKLADNPQVSVPFELQWMLIHCDPLRPRRETCHELPARITPSQTTDERGPPGEQGPPGPPGPPGVPGIDGIDGDRGPKGPPGPPGPAGEPGKPGAPGKPGTPGADGLTGPDGSPGSIGSKGQKGEPGVPGSRGFPGRGIPGPPGPPGTAGLPGELGRVGPVGDPGRRGPPGPPGPPGPRGTIGFHDGDPLCPNACPPGRSGYPGLPGMRGHKGAKGEIGEPGRQGHKGEEGDQGELGEVGAQGPPGAQGLRGITGIVGDKGEKGARGLDGEPGPQGLPGAPGDQGQRGPPGEAGPKGDRGAEGARGIPGLPGPKGDTGLPGVDGRDGIPGMPGTKGEPGKPGPPGDAGLQGLPGVPGIPGAKGVAGEKGSTGAPGKPGQMGNSGKPGQQGPPGEVGPRGPQGLPGSRGELGPVGSPGLPGKLGSLGSPGLPGLPGPPGLPGMKGDRGVVGEPGPKGEQGASGEEGEAGERGELGDIGLPGPKGSAGNPGEPGLRGPEGSRGLPGVEGPRGPPGPRGVQGEQGATGLPGVQGPPGRAPTDQHIKQVCMRVIQEHFAEMAASLKRPDSGATGLPGRPGPPGPPGPPGENGFPGQMGIRGLPGIKGPPGALGLRGPKGDLGEKGERGPPGRGPNGLPGAIGLPGDPGPASYGRNGRDGERGPPGVAGIPGVPGPPGPPGLPGFCEPASCTMQAGQRAFNKGPDP

SEQ ID NO: 3358 - protein, 328 aa, Homo sapiens
MKTCWKIPVFFFVCSFLEPWASAAVKRRPRFPVNSNSNGGNELCPKIRIGQDDLPGFDLISQFQVDKAASRRAIQRVVGSATLQVAYKLGNNVDFRIPTRNLYPSGLPEEYSFLTTFRMTGSTLKKNWNIWQIQDSSGKEQVGIKINGQTQSVVFSYKGLDGSLQTAAFSNLSSLFDSQWHKIMIGVERSSATLFVDCNRIESLPIKPRGPIDIDGFAVLGKLADNPQVSVPFELQWMLIHCDPLRPRRETCHELPARITPSQTTDERGPPGEQGPPGPPGPPGVPGIDGIDGDRGPKGPPGPPGPAGEPGKPGAPGKPGTPGADTSP

SEQ ID NO: 3359 - protein, 689 aa, Homo sapiens
MAAATASPRSLLVLLQVVVLALAQIRGPPGERGPPGPPGPPGVPGSDGIDGDNGPPGKAGPPGPKGEPGKAGPDGPDGKPGIDGLTGAKGEPGPMGIPGVKGQPGLPGPPGLPGPGFAGPPGPPGPVGLPGEIGIRGPKGDPGPDGPSGPPGPPGKPGRPGTIQGLEGSADFLCPTNCPPGMKGPPGLQGVKGHAGKRGILGDPGHQGKPGPKGDVGASGEQGIPGPPGPQGIRGYPGMAGPKGETGPHGYKGMVGAIGATGPPGEEGPRGPPGRAGEKGDEGSPGIRGPQGITGPKGATGPPGINGKDGTPGTPGMKGSAGQAGQPGSPGHQGLAGVPGQPGTKGGPGDQGEPGPQGLPGFSGPPGKEGEPGPRGEIGPQGIMGQKGDQGERGPVGQPGPQGRQGPKGEQGPPGIPGPQGLPGVKGDKGSPGKTGPRGKVGDPGVAGLPGEKGEKGESGEPGPKGQQGVRGEPGYPGPSGDAGAPGVQGYPGPPGPRGLAGNRGVPGQPGRQGVEGRDATDQHIVDVALKMLQEQLAEVAVSAKREALGAVGMMGPPGPPGPPGYPGKQGPHGHPGPRGVPGIVGAVGQIGNTGPKGKRGEKGDPGEVGRGHPGMPGPPGIPGLPGRPGQAINGKDGDRGSPGAPGEAGRPGLPGPVGLPGFCEPAACLGASAYASARLTEPGSIKGP

SEQ ID NO: 3360 - protein, 83 aa, Homo sapiens
MAAATASPRSLLVLLQVVVLALAQIRGPPGERGPPGPPGPPGVPGSDGIDGPPGPVGLPGEIGIRGPKGDPGPDGPSGPPGPP

SEQ ID NO: 3361 - protein, 11 aa, Homo sapiens
MGIPGVKGQPG

SEQ ID NO: 3362 - protein, 143 aa, Homo sapiens
MGIPGVKGQPGLPGPPGLPGPGFAGPPGPPGPVGLPGEIGIRGPKGDPGPDGPSGPPGPPGKPGRPGTIQGLEGSADFLCPTNCPPGMKGPPGLQGVKGHAGKRGILGDPGHQGKPGPKGDVGASGEQGIPGPPGPQGIRGYP

SEQ ID NO: 3363 - protein, 684 aa, Homo sapiens
MAGPRACAPLLLLLLLGELLAAAGAQRVGLPGPPGPPGPPGKPGQDGIDGEAGPPGLPGPPGPKGAPGKPGKPGEAGLPGLPGVDGLTGRDGPPGPKGAPGERGSLGPPGPPGLGGKGLPGPPGEAGVSGPPGGIGLRGPPGPSGLPGLPGPPGPPGPPGHPGVLPEGATDLQCPSICPPGPPGPPGMPGFKGPTGYKGEQGEVGKDGEKGDPGPPGPAGLPGSVGLQGPRGLRGLPGPLGPPGDRGPIGFRGPPGIPGAPGKAGDRGERGPEGFRGPKGDLGRPGPKGTPGVAGPSGEPGMPGKDGQNGVPGLDGQKGEAGRNGAPGEKGPNGLPGLPGRAGSKGEKGERGRAGELGEAGPSGEPGVPGDAGMPGERGEAGHRGSAGALGPQGPPGAPGVRGFQGQKGSMGDPGLPGPQGLRGDVGDRGPGGAAGPKGDQGIAGSDGLPGDKGELGPSGLVGPKGESGSRGELGPKGTQGPNGTSGVQGVPGPPGPLGLQGVPGVPGITGKPGVPGKEASEQRIRELCGGMISEQIAQLAAHLRKPLAPGSIGRPGPAGPPGPPGPPGSIGHPGARGPPGYRGPTGELGDPGPRGNQGDRGDKGAAGAGLDGPEGDQGPQGPQGVPGTSKDGQDGAPGEPGPPGDPGLPGAIGAQGTPGICDTSACQGAVLGGVGEKSGSRSS

SEQ ID NO: 3364 - protein, 191 aa, Homo sapiens
MWWSSTQNAGTEGEAGPPGLPGPPGPKGAPGKPGKPGEAGLPGLPGVDGLTGRDGPPGPKGAPGERGSLGPPGPPGLGGKGLPGPPGEAGVSGPPGGIGLRGPPGPSGLPGLPGPPGPPGPPGHPGVLPEGATDLQCPSICPPGPPGPPGMPGFKGPTGYKGEQGEVGKDGEKGDPGPPGPAGLPGSVGLQ

SEQ ID NO: 3365 - protein, 277 aa, Homo sapiens
MNGFASLLRRNQFILLVLFLLQIQSLGLDIDSRPTAEVCATHTISPGPKGDDGEKGDPGEEGKHGKVGRMGPKGIKGELGDMGDQGNIGKTGPIGKKGDKGEKGLLGIPGEKGKAGTVCDCGRYRKFVGQLDISIARLKTSMKFVKNVIAGIRETEEKFYYIVQEEKNYRESLTHCRIRGGMLAMPKDEAANTLIADYVAKSGFFRVFIGVNDLEREGQYMFTDNTPLQNYSNWNEGEPSDPYGHEDCVEMLSSGRWNDTECHLTMYFVCEFIKKKK

SEQ ID NO: 3366 - protein, 123 aa, Homo sapiens
MKKQRGVGVLPALRMRGNLALVGVLISLAFLSLLPSGHPQPAGDDACSVQILVPGLKGDAGEKGDKGAPGRPGRVGPTGEKGDMGDKGQKGSVGRHGKIGPIGSKGEKGDSGDIGPPGPNGEP

SEQ ID NO: 3367 - protein, 285 aa, Homo sapiens
MKKQRGVGVLPALRMRGNLALVGVLISLAFLSLLPSGHPQPAGDDACSVQILVPGLKGDAGEKGDKGAPGRPGRVGPTGEKGDMGDKGQKGSVGRHGKIGPIGSKGEKGDSGDIGPPGPNGEPGLPCECSQLRKAIGEMDNQVSQLTSELKFIKNAVAGVRETESKIYLLVKEEKRYADAQLSCQGRGGTLSMPKDEAANGLMAAYLAQAGLARVFIGINDLEKEGAFVYSDHSPMRTFNKWRSGEPNNAYDEEDCVEMVASGGWNDVACHTTMYFMCEFDKENM

SEQ ID NO: 3368 - protein, 116 aa, Homo sapiens
MRGNLALVGVLISLAFLSLLPSGHPQPAGDDACSVQILVPGLKGDAGEKGDKGAPGRPGRVGPTGEKGDMGDKGQKGSVGRHGKIGPIGSKGEKGDSGDIGPPGPNGEPAPSAPQR

SEQ ID NO: 3369 - protein, 271 aa, Homo sapiens
MRGNLALVGVLISLAFLSLLPSGHPQPAGDDACSVQILVPGLKGDAGEKGDKGAPGRPGRVGPTGEKGDMGDKGQKGSVGRHGKIGPIGSKGEKGDSGDIGPPGPNGEPGLPCECSQLRKAIGEMDNQVSQLTSELKFIKNAVAGVRETESKIYLLVKEEKRYADAQLSCQGRGGTLSMPKDEAANGLMAAYLAQAGLARVFIGINDLEKEGAFVYSDHSPMRTFNKWRSGEPNNAYDEEDCVEMVASGGWNDVACHTTMYFMCEFDKENM

SEQ ID NO: 3370 - protein, 247 aa, Homo sapiens
MRGNLALVGVLISLAFLSLLPSGHPQPAGDDACSVQILVPGLKGDAGEKGDKGAPGRPGRVGPTGEKGEKGDSGDIGPPGPNGEPGLPCECSQLRKAIGEMDNQVSQLTSELKFIKNAVAGVRETESKIYLLVKEEKRYADAQLSCQGRGGTLSMPKDEAANGLMAAYLAQAGLARVFIGINDLEKEGAFVYSDHSPMRTFNKWRSGEPNNAYDEEDCVEMVASGGWNDVACHTTMYFMCEFDKENM

SEQ ID NO: 3371 - protein, 268 aa, Homo sapiens
MTPALCRSSSLASKGMRERRETKAPPDGLEESAPREKKQSQPVVTASDISKRKCTSSFVEMGSQGDMGDKGQKGSVGRHGKIGPIGSKGEKGDSGDIGPPGPNGEPGLPCECSQLRKAIGEMDNQVSQLTSELKFIKNAVAGVRETESKIYLLVKEEKRYADAQLSCQGRGGTLSMPKDEAANGLMAAYLAQAGLARVFIGINDLEKEGAFVYSDHSPMRTFNKWRSGEPNNAYDEEDCVEMVASGGWNDVACHTTMYFMCEFDKENM

SEQ ID NO: 3372 - protein, 245 aa, Homo sapiens
MWWVPPSPYGCLPCALPGDAGEKGDKGAPGRPGRVGPTGEKGDMGDKGQKGSVGRHGKIGPIGSKGEKGDSGDIGPPGPNGEPGLPCECSQLRKAIGEMDNQVSQLTSELKFIKNAVAGVRETESKIYLLVKEEKRYADAQLSCQGRGGTLSMPKDEAANGLMAAYLAQAGLARVFIGINDLEKEGAFVYSDHSPMRTFNKWRSGEPNNAYDEEDCVEMVASGGWNDVACHTTMYFMCEFDKENM

SEQ ID NO: 3373 - protein, 221 aa, Homo sapiens
MWWVPPSPYGCLPCALPGDAGEKGDKGAPGRPGRVGPTGEKGEKGDSGDIGPPGPNGEPGLPCECSQLRKAIGEMDNQVSQLTSELKFIKNAVAGVRETESKIYLLVKEEKRYADAQLSCQGRGGTLSMPKDEAANGLMAAYLAQAGLARVFIGINDLEKEGAFVYSDHSPMRTFNKWRSGEPNNAYDEEDCVEMVASGGWNDVACHTTMYFMCEFDKENM

SEQ ID NO: 3374 - protein, 221 aa, Homo sapiens
MWWVPPSPYGCLPCALPGDMGDKGQKGSVGRHGKIGPIGSKGEKGDSGDIGPPGPNGEPGLPCECSQLRKAIGEMDNQVSQLTSELKFIKNAVAGVRETESKIYLLVKEEKRYADAQLSCQGRGGTLSMPKDEAANGLMAAYLAQAGLARVFIGINDLEKEGAFVYSDHSPMRTFNKWRSGEPNNAYDEEDCVEMVASGGWNDVACHTTMYFMCEFDKENM

SEQ ID NO: 3375 - protein, 197 aa, Homo sapiens
MWWVPPSPYGCLPCALPGEKGDSGDIGPPGPNGEPGLPCECSQLRKAIGEMDNQVSQLTSELKFIKNAVAGVRETESKIYLLVKEEKRYADAQLSCQGRGGTLSMPKDEAANGLMAAYLAQAGLARVFIGINDLEKEGAFVYSDHSPMRTFNKWRSGEPNNAYDEEDCVEMVASGGWNDVACHTTMYFMCEFDKENM

SEQ ID NO: 3376 - protein, 622 aa, Homo sapiens
MAAAPRAGRRRGQPLLALLLLLLAPLPPGAPPGADAYFPEERWSPESPLQAPRVLIALLARNAAHALPTTLGALERLRHPRERTALWVATDHNMDNTSTVLREWLVAVKSLYHSVEWRPAEEPRSYPDEEGPKHWSDSRYEHVMKLRQAALKSARDMWADYILFVDADNLILNPDTLSLLIAENKTVVAPMLDSRAAYSNFWCGMTSQGYYKRTPAYIPIRKRDRRGCFAVPMVHSTFLIDLRKAASRNLAFYPPHPDYTWSFDDIIVFAFSCKQAEVQMYVCNKEEYGFLPVPLRAHSTLQDEAESFMHVQLEVMVKHPPAEPSRFISAPTKTPDKMGFDEVFMINLRRRQDRRERMLRALQAQEIECRLVEAVDGKAMNTSQVEALGIQMLPGYRDPYHGRPLTKGELGCFLSHYNIWKEVVDRGLQKSLVFEDDLRFEIFFKRRLMNLMRDVEREGLDWDLIYVGRKRMQVEHPEKAVPRVRNLVEADYSYWTLAYVISLQGARKLLAAEPLSKMLPVDEFLPVMFDKHPVSEYKAHFSLRNLHAFSVEPLLIYPTHYTGDDGYVSDTETSVVWNNEHVKTDWDRAKSQKMREQQALSREAKNSDVLQSPLDSAARDEL

SEQ ID NO: 3377 - protein, 138 aa, Homo sapiens
MDNTSTVLREWLVAVKSLYHSVEWRPAEEPRSYPDEEGPKHWSDSRYEHVMKLRQAALKSARDMWADYILFVDADNLILNPDTLSLLIAENKTVVAPMLDSRAAYSNFWCGMTSQGYYKRTPAYIPIRKRDRRGCFAV

SEQ ID NO: 3378 - protein, 218 aa, Homo sapiens
  SITE 1: note = misc_feature - Xaa can be any naturally occurring amino acid
XKAASRNLAFYPPHPDYTWSFDDIIVFAFSCKQAVKHPPAEPSRFISAPTKTPDKMGFDEVFMINLRRRQDRRERMLRALQAQEIECRLVEAVDGKAMNTSQVEALGIQMLPGYRDPYHGRPLTKGELGCFLSHYNIWKEVVDRGLQKSLVFEDDLRFEIFFKRRLMNLMRDVEREGLDWDLIYVGRKRMQVEHPEKAVPRVRNLVEADYSYWTLAYV

SEQ ID NO: 3379 - protein, 626 aa, Homo sapiens
MAARPAATLAWSLLLLSSALLREGCRARFVAERDSEDDGEEPVVFPESPLQSPTVLVAVLARNAAHTLPHFLGCLERLDYPKSRMAIWAATDHNVDNTTEIFREWLKNVQRLYHYVEWRPMDEPESYPDEIGPKHWPTSRFAHVMKLRQAALRTAREKWSDYILFIDVDNFLTNPQTLNLLIAENKTIVAPMLESRGLYSNFWCGITPKGFYKRTPDYVQIREWKRTGCFPVPMVHSTFLIDLRKEASDKLTFYPPHQDYTWTFDDIIVFAFSSRQAGIQMYLCNREHYGYLPIPLKPHQTLQEDIENLIHVQIEAMIDRPPMEPSQYVSVVPKYPDKMGFDEIFMINLKRRKDRRDRMLRTLYEQEIEVKIVEAVDGKALNTSQLKALNIEMLPGYRDPYSSRPLTRGEIGCFLSHYSVWKEVIDRELEKTLVIEDDVRFEHQFKKKLMKLMDNIDQAQLDWELIYIGRKRMQVKEPEKAVPNVANLVEADYSYWTLGYVISLEGAQKLVGANPFGKMLPVDEFLPVMYNKHPVAEYKEYYESRDLKAFSAEPLLIYPTHYTGQPGYLSDTETSTIWDNETVATDWDRTHAWKSRKQSRIYSNAKNTEALPPPTSLDTVPSRDEL

SEQ ID NO: 3380 - protein, 363 aa, Homo sapiens
MFSDCWLCPSLGSSGIQMYLCNREHYGYLPIPLKPHQTLQEDIENLIHVQIEAMIDRPPMEPSQYVSVVPKYPDKMGFDEIFMINLKRRKDRRDRMLRTLYEQEIEVKIVEAVDGKALNTSQLKALNIEMLPGYRDPYSSRPLTRGEIGCFLSHYSVWKEVIDRELEKTLVIEDDVRFEHQFKKKLMKLMDNIDQAQLDWELIYIGRKRMQVKEPEKAVPNVANLVEADYSYWTLGYVISLEGAQKLVGANPFGKMLPVDEFLPVMYNKHPVAEYKEYYESRDLKAFSAEPLLIYPTHYTGQPGYLSDTETSTIWDNETVATDWDRTHAWKSRKQSRIYSNAKNTEALPPPTSLDTVPSRDEL

SEQ ID NO: 3381 - protein, 234 aa, Homo sapiens
MLPGYRDPYSSRPLTRGEIGCFLSHYSVWKEVIDRELEKTLVIEDDVRFEHQFKKKLMKLMDNIDQAQLDWELIYIGRKRMQVKEPEKAVPNVANLVEADYSYWTLGYVISLEGAQKLVGANPFGKMLPVDEFLPVMYNKHPVAEYKEYYESRDLKAFSAEPLLIYPTHYTGQPGYLSDTETSTIWDNETVATDWDRTHAWKSRKQSRIYSNAKNTEALPPPTSLDTVPSRDEL

SEQ ID NO: 3382 - protein, 194 aa, Homo sapiens
ISGLLCYSAGCLALPSLDQKKRGGHKACCLLTPPPPPLFPPPFFRGGRSPGPPGLPGKTGPKGEKGELGRPGRKGRPGPPGVPGMPGPIGWPGPEGPRGEKGDLGMMGLPGSRGPMGSKGYPGSRGEKGSRGEKGDLGPKGEKGFPGFPGMLGQKGEMGPKGEPGIAGHRGPTGRPGKRGKQGQKGDSGVMGPP

SEQ ID NO: 3383 - protein, 445 aa, Homo sapiens
MTGSSFSLAHLLIISGLLCYSAGCLALPSLDQKKRGGHKACCLLTPPPPPLFPPPFFRGGRSPLLSPDMKNLMLELETSQSPCMQGSLGSPGPPGPQGPPGLPGKTGPKGEKGELGRPGRKGRPGPPGVPGMPGPIGWPGPEGPRGEKGDLGMMGLPGSRGPMGSKGYPGSRGEKGSRGEKGDLGPKGEKGFPGFPGMLGQKGEMGPKGEPGIAGHRGPTGRPGKRGKQGQKGDSGVMGPPGKPGPSGQPGRPGPPGPPPAGQLIMGPKGERGFPGPPGRCLCGPTMNVNNPSYGESVYGPSSPRVPVIFVVNNQEELERLNTQNAIAFRRDQRSLYFKDSLGWLPIQLTPFYPVDYTADQHGTCGDGLLQPGEECDDGNSDVGDDCIRCHRAYCGDGHRHEGVEDCDGSDFGYLTCETYLPGSYGDLQCTQYCYIDSTPCRYFT

SEQ ID NO: 3384 - protein, 421 aa, Homo sapiens
MVVLNPMTLGIYLQLFFLSIVSQPTFINSVLPISAALPSLDQKKRGGHKACCLLTPPPPPLFPPPFFRGGRSPGPPGLPGKTGPKGEKGELGRPGRKGRPGPPGVPGMPGPIGWPGPEGPRGEKGDLGMMGLPGSRGPMGSKGYPGSRGEKGSRGEKGDLGPKGEKGFPGFPGMLGQKGEMGPKGEPGIAGHRGPTGRPGKRGKQGQKGDSGVMGPPGKPGPSGQPGRPGPPGPPPAGQLIMGPKGERGFPGPPGRCLCGPTMNVNNPSYGESVYGPSSPRVPVIFVVNNQEELERLNTQNAIAFRRDQRSLYFKDSLGWLPIQLTPFYPVDYTADQHGTCGDGLLQPGEECDDGNSDVGDDCIRCHRAYCGDGHRHEGVEDCDGSDFGYLTCETYLPGSYGDLQCTQYCYIDSTPCRYFT

SEQ ID NO: 3385 - protein, 455 aa, Homo sapiens
MVVLNPMTLGIYLQLFFLSIVSQPTFINSVLPISAALPSLDQKKRGGHKACCLLTPPPPPLFPPPFFRGGRSPLLSPDMKNLMLELETSQSPCMQGSLGSPGPPGPQGPPGLPGKTGPKGEKGELGRPGRKGRPGPPGVPGMPGPIGWPGPEGPRGEKGDLGMMGLPGSRGPMGSKGYPGSRGEKGSRGEKGDLGPKGEKGFPGFPGMLGQKGEMGPKGEPGIAGHRGPTGRPGKRGKQGQKGDSGVMGPPGKPGPSGQPGRPGPPGPPPAGQLIMGPKGERGFPGPPGRCLCGPTMNVNNPSYGESVYGPSSPRVPVIFVVNNQEELERLNTQNAIAFRRDQRSLYFKDSLGWLPIQLTPFYPVDYTADQHGTCGDGLLQPGEECDDGNSDVGDDCIRCHRAYCGDGHRHEGVEDCDGSDFGYLTCETYLPGSYGDLQCTQYCYIDSTPCRYFT

SEQ ID NO: 3386 - protein, 456 aa, Homo sapiens
MVVLNPMTLGIYLQLFFLSIVSQPTFINSVLPISAALPSLDQKKRGGHKACCLLTPPPPPLFPPPFFRGGRSPLLSPDMKNLMLELETSQSPCMQGSLGSPGPPGPQGPPGLPGKTGPKGEKGELGRPGRKGRPGPPGVPGMPGPIGWPGPEGPRGEKGDLGMMGLPGSRGPMGSKGYPGSRGEKGSRGEKGDLGPKGEKGFPGFPGMLGQKGEMGPKGEPGIAGHRGPTGRPGKRGKQGQKGDSGVMGPPGKPGPSGQPGRPGPPGPPPAGQLIMGPKGERGFPGPPGRCLCGPTMNVNNPSYGESVYGPSSPRVPVIFVVNNQEELERLNTQNAIAFRRDQRSLYFKDSLGWLPIQLTPFYPVDYTADQHGTCGDGLLQPGEECDDGNSDVGDDCIRDCHRAYCGDGHRHEGVEDCDGSDFGYLTCETYLPGSYGDLQCTQYCYIDSTPCRYFT

SEQ ID NO: 3387 - protein, 724 aa, Homo sapiens
MLRELQETNAALQDVRELLRQQVREITFLKNTVMECDACGMQQSVRTGLPSVRPLLHCAPGFCFPGVACIQTESGARCGPCPAGFTGNGSHCTDVNECNAHPCFPRVRCINTSPGFRCEACPPGYSGPTHQGVGLAFAKANKQVCTDINECETGQHNCVPNSVCINTRGSFQCGPCQPGFVGDQASGCQRRAQRFCPDGSPSECHEHADCVLERDGSRSCVCAVGWAGNGILCGRDTDLDGFPDEKLRCPERQCRKDNCVTVPNSGQEDVDRDGIGDACDPDADGDGVPNEKDNCPLVRNPDQRNTDEDKWGDACDNCRSQKNDDQKDTDQDGRGDACDDDIDGDRIRNQADNCPRVPNSDQKDSDGDGIGDACDNCPQKSNPDQADVDHDFVGDACDSDQDQDGDGHQDSRDNCPTVPNSAQEDSDHDGQGDACDDDDDNDGVPDSRDNCRLVPNPGQEDADRDGVGDVCQDDFDADKVVDKIDVCPENAEVTLTDFRAFQTVVLDPEGDAQIDPNWVVLNQGREIVQTMNSDPGLAVGYTAFNGVDFEGTFHVNTVTDDDYAGFIFGYQDSSSFYVVMWKQMEQTYWQANPFRAVAEPGIQLKAVKSSTGPGEQLRNALWHTGDTESQVRLLWKDPRNVGWKDKKSYRWFLQHRPQVGYIRVRFYEGPELVADSNVVLDTTMRGGRLGVFCFSQENIIWANLRYRCNDTIPEDYETHQLRQA

SEQ ID NO: 3388 - protein, 704 aa, Homo sapiens
MVPDTACVLLLTLAALGASGQGQSPLGSDLGPQMLRELQETNAALQDVRELLRQQVREITFLKNTVMECDACGMQQSVRTGLPSVRPLLHCAPGFCFPGVACIQTESGARCGPCPAGFTGNGSHCTDVNECETGQHNCVPNSVCINTRGSFQCGPCQPGFVGDQASGCQRRAQRFCPDGSPSECHEHADCVLERDGSRSCVCAVGWAGNGILCGRDTDLDGFPDEKLRCPERQCRKDNCVTVPNSGQEDVDRDGIGDACDPDADGDGVPNEKDNCPLVRNPDQRNTDEDKWGDACDNCRSQKNDDQKDTDQDGRGDACDDDIDGDRIRNQADNCPRVPNSDQKDSDGDGIGDACDNCPQKSNPDQADVDHDFVGDACDSDQDQDGDGHQDSRDNCPTVPNSAQEDSDHDGQGDACDDDDDNDGVPDSRDNCRLVPNPGQEDADRDGVGDVCQDDFDADKVVDKIDVCPENAEVTLTDFRAFQTVVLDPEGDAQIDPNWVVLNQGREIVQTMNSDPGLAVGYTAFNGVDFEGTFHVNTVTDDDYAGFIFGYQDSSSFYVVMWKQMEQTYWQANPFRAVAEPGIQLKAVKSSTGPGEQLRNALWHTGDTESQVRLLWKDPRNVGWKDKKSYRWFLQHRPQVGYIRVRFYEGPELVADSNVVLDTTMRGGRLGVFCFSQENIIWANLRYRCNDTIPEDYETHQLRQA

SEQ ID NO: 3389 - protein, 757 aa, Homo sapiens
MVPDTACVLLLTLAALGASGQGQSPLGSDLGPQMLRELQETNAALQDVRELLRQQVREITFLKNTVMECDACGMQQSVRTGLPSVRPLLHCAPGFCFPGVACIQTESGARCGPCPAGFTGNGSHCTDVNECNAHPCFPRVRCINTSPGFRCEACPPGYSGPTHQGVGLAFAKANKQVCTDINECETGQHNCVPNSVCINTRGSFQCGPCQPGFVGDQASGCQRRAQRFCPDGSPSECHEHADCVLERDGSRSCVCAVGWAGNGILCGRDTDLDGFPDEKLRCPERQCRKDNCVTVPNSGQEDVDRDGIGDACDPDADGDGVPNEKDNCPLVRNPDQRNTDEDKWGDACDNCRSQKNDDQKDTDQDGRGDACDDDIDGDRIRNQADNCPRVPNSDQKDSDGDGIGDACDNCPQKSNPDQADVDHDFVGDACDSDQDQDGDGHQDSRDNCPTVPNSAQEDSDHDGQGDACDDDDDNDGVPDSRDNCRLVPNPGQEDADRDGVGDVCQDDFDADKVVDKIDVCPENAEVTLTDFRAFQTVVLDPEGDAQIDPNWVVLNQGREIVQTMNSDPGLAVGYTAFNGVDFEGTFHVNTVTDDDYAGFIFGYQDSSSFYVVMWKQMEQTYWQANPFRAVAEPGIQLKAVKSSTGPGEQLRNALWHTGDTESQVRLLWKDPRNVGWKDKKSYRWFLQHRPQVGYIRVRFYEGPELVADSNVVLDTTMRGGRLGVFCFSQENIIWANLRYRCNDTIPEDYETHQLRQA

SEQ ID NO: 3390 - protein, 123 aa, Homo sapiens
LGWYTTGGPPDPSDIHVHKQVCEIIESPLFLKLNPMTKHTDLPVSVFESVIDIINGEATMLFAELTYTLATEEAERIGVDHVARMTATGSGENSTVAEHLIAQHSAIKMLHSRVKLILERGPL

SEQ ID NO: 3391 - protein, 326 aa, Homo sapiens
MAAAAAAAAATNGTGGSSGMEVDAAVPSVMACGVTGSVSVALHPLVILNISDHWIRMRSQEGRPVQVIGALIGKQEGRNIEVMNSFELLSHTVEEKIIIDKEYYYTKEEQFKQVFKELEFLGWYTTGGPPDPSDIHVHKQVCEIIESPLFLKLNPMTKHTDLPVSVFESVIDIINGEATMLFAELTYTLATEEAERIGVDHVARMTATGSGENSTVAEHLIAQHSAIKMLHSRVKLILEYVKASEAGEVPFNHEILREAYALCHCLPVLSTDKFKTDFYDQCNDVGLMAYLGTITKTCNTMNQFVNKFNVLYDRQGIGRRMRGLFF

SEQ ID NO: 3392 - protein, 327 aa, Homo sapiens
MAAAAAAAAATNGTGGSSGMEVDAAVVPSVMACGVTGSVSVALHPLVILNISDHWIRMRSQEGRPVQVIGALIGKQEGRNIEVMNSFELLSHTVEEKIIIDKEYYYTKEEQFKQVFKELEFLGWYTTGGPPDPSDIHVHKQVCEIIESPLFLKLNPMTKHTDLPVSVFESVIDIINGEATMLFAELTYTLATEEAERIGVDHVARMTATGSGENSTVAEHLIAQHSAIKMLHSRVKLILEYVKASEAGEVPFNHEILREAYALCHCLPVLSTDKFKTDFYDQCNDVGLMAYLGTITKTCNTMNQFVNKFNVLYDRQGIGRRMRGLFF

SEQ ID NO: 3393 - protein, 42 aa, Homo sapiens
MACGVTGSVSVALHPLVILNISDHWIRMRSQEGRPVQVIGAL

SEQ ID NO: 3394 - protein, 468 aa, Homo sapiens
MAARLVSRCGAVRAAPHSGPLVSWRRWSGASTDTVYDVVVSGGGLVGAAMACALGYDIHFHDKKILLLEAGPKKVLEKLSETYSNRVSSISPGSATLLSSFGAWDHICNMRYRAFRRMQVWDACSEALIMFDKDNLDDMGYIVENDVIMHALTKQLEAVSDRVTVLYRSKAIRYTWPCPFPMADSSPWVHITLGDGSTFQTKLLIGADGHNSGVRQAVGIQNVSWNYDQSAVVATLHLSEATENNVAWQRFLPSGPIALLPLSDTLSSLVWSTSHEHAAELVSMDEEKFVDAVNSAFWSDADHTDFIDTAGAMLQYAVSLLKPTKVSARQLPPSVARVDAKSRVLFPLGLGHAAEYVRPRVALIGDAAHRVHPLAGQGVNMGFGDISSLAHHLSTAAFNGKDLGSVSHLTGYETERQRHNTALLAATDLLKRLYSTSASPLVLLRTWGLQATNAVSPLKEQIMAFASK

SEQ ID NO: 3395 - protein, 200 aa, Homo sapiens
MAARLVSRCGAVRAAPHSGPLVSWRRWSGASTDTVYDVVVSGGGLVGAAMACALGYDIHFHDKKILLLEAGPKKVLEKLSETYSNRVSSISPGSATLLSSFGAWDHICNMRYRAFRRMQVWDACSEALIMFDKDNLDDMGYIVENDVIMHALTKQLEAVSGTDYGLCKQMSTPLLKKDYVDEKEHPAQDPSYIFSRSYLI

SEQ ID NO: 3396 - protein, 111 aa, Homo sapiens
MAARLVSRCGAVRAAPHSGPLVSWRRWSGASTDTVYDVVVSGGGLVGAAMACALGYDIHFHDKKILLLEAGPKKVLEKLSETYSNRVSSISPGSATLLSSVGRLLRGPDNV

SEQ ID NO: 3397 - protein, 54 aa, Homo sapiens
MIFTFMTRKSCCSKQVQRKYWRNCQKLTATGSAPFPLALQRFSVVLVPGTISAT

SEQ ID NO: 3398 - protein, 262 aa, Homo sapiens
MIFTFMTRKSCCSKQVQRKYWRNCQKLTATGSAPFPLALQRFSVVWDACSEALIMFDKDNLDDMGYIVENDVIMHALTKQLEAVSDRVTVLYRSKAIRYTWPCPFPMADSSPWVHITLGDGSTFQTKLLIGADGHNSGVRQAVGIQNVSWNYDQSAVVATLHLSEATENNVAWQRFLPSGPIALLPLSDTLSSLVWSTSHEHAAELVSMDEEKFVDAVNSAFWSDADHTDFIDTAGAMLQYAVSLLKPTKVSARQLPPSVAR

SEQ ID NO: 3399 - protein, 393 aa, Homo sapiens
MIFTFMTRKSCCSKQVQRKYWRNCQKLTATGSAPFPLALQRFSVVWDACSEALIMFDKDNLDDMGYIVENDVIMHALTKQLEAVSDRVTVLYRSKAIRYTWPCPFPMADSSPWVHITLGDGSTFQTKLLIGADGHNSGVRQAVGIQNVSWNYDQSAVVATLHLSEATENNVAWQRFLPSGPIALLPLSDTLSSLVWSTSHEHAAELVSMDEEKFVDAVNSAFWSDADHTDFIDTAGAMLQYAVSLLKPTKVSARQLPPSVARVDAKSRVLFPLGLGHAAEYVRPRVALIGDAAHRVHPLAGQGVNMGFGDISSLAHHLSTAAFNGKDLGSVSHLTGYETERQRHNTALLAATDLLKRLYSTSASPLVLLRTWGLQATNAVSPLKEQIMAFASK

SEQ ID NO: 3400 - protein, 443 aa, Homo sapiens
MRGQGPPLSSFGVWLASRAASDPSRPRRQGYDIHFHDKKILLLEAGPKKVLEKLSETYSNRVSSISPGSATLLSSFGAWDHICNMRYRAFRRMQVWDACSEALIMFDKDNLDDMGYIVENDVIMHALTKQLEAVSDRVTVLYRSKAIRYTWPCPFPMADSSPWVHITLGDGSTFQTKLLIGADGHNSGVRQAVGIQNVSWNYDQSAVVATLHLSEATENNVAWQRFLPSGPIALLPLSDTLSSLVWSTSHEHAAELVSMDEEKFVDAVNSAFWSDADHTDFIDTAGAMLQYAVSLLKPTKVSARQLPPSVARVDAKSRVLFPLGLGHAAEYVRPRVALIGDAAHRVHPLAGQGVNMGFGDISSLAHHLSTAAFNGKDLGSVSHLTGYETERQRHNTALLAATDLLKRLYSTSASPLVLLRTWGLQATNAVSPLKEQIMAFASK

SEQ ID NO: 3401 - protein, 86 aa, Homo sapiens
MRGQGPPLSSFGVWLASRAASDPSRPRRQGYDIHFHDKKILLLEAGPKKVLEKLSETYSNRVSSISPGSATLLSSVGRLLRGPDNV

SEQ ID NO: 3402 - protein, 105 aa, Homo sapiens
MPLSPGLLLLLLSGATATAALPLEGGPTGRDSEHMQEAAGIRKSSLLTFLAWWFEWTSQASAGPLIGEEAREVARRQEGAPPQQSARRDRMPCRNFFWKTFSSCK

SEQ ID NO: 3403 - protein, 225 aa, Homo sapiens
GAGTEDSACIPWAYYSTVDQVKDLYSGLIGPLIVCRRPYLKVFNPRRKLEFALLFLVFDENESWYLDDNIKTYSDHPEKVNKDDEEFIESNKMHAINGRMFGNLQGLTMHVGDEVNWYLMGMGNEIDLHTVHFHGHSFQYKHRGVYSSDVFDIFPGTYQTLEMFPRTPGIWLLHCHVTDHIHAGMETTYTVLQNEASSETHRRIWNVIYPITVSVIILFQISTKE

SEQ ID NO: 3404 - protein, 1065 aa, Homo sapiens
MKILILGIFLFLCSTPAWAKEKHYYIGIIETTWDYASDHGEKKLISVDTEHSNIYLQNGPDRIGRLYKKALYLQYTDETFRTTIEKPVWLGFLGPIIKAETGDKVYVHLKNLASRPYTFHSHGITYYKEHEGAIYPDNTTDFQRADDKVYPGEQYTYMLLATEEQSPGEGDGNCVTRIYHSHIDAPKDIASGLIGPLIICKKDSLDKEKEKHIDREFVVMFSVVDENFSWYLEDNIKTYCSEPEKVDKDNEDFQESNRMYSVNGYTFGSLPGLSMCAEDRVKWYLFGMGNEVDVHAAFFHGQALTNKNYRIDTINLFPATLFDAYMVAQNPGEWMLSCQNLNHLKAGLQAFFQVQECNKSSSKDNIRGKHVRHYYIAAEEIIWNYAPSGIDIFTKENLTAPGSDSAVFFEQGTTRIGGSYKKLVYREYTDASFTNRKERGPEEEHLGILGPVIWAEVGDTIRVTFHNKGAYPLSIEPIGVRFNKNNEGTYYSPNYNPQSRSVPPSASHVAPTETFTYEWTVPKEVGPTNADPVCLAKMYYSAVEPTKDIFTGLIGPMKICKKGSLHANGRQKDVDKEFYLFPTVFDENESLLLEDNIRMFTTAPDQVDKEDEDFQESNKMHSMNGFMYGNQPGLTMCKGDSVVWYLFSAGNEADVHGIYFSGNTYLWRGERRDTANLFPQTSLTLHMWPDTEGTFNVECLTTDHYTGGMKQKYTVNQCRRQSEDSTFYLGERTYYIAAVEVEWDYSPQREWEKELHHLQEQNVSNAFLDKGEFYIGSKYKKVVYRQYTDSTFRVPVERKAEEEHLGILGPQLHADVGDKVKIIFKNMATRPYSIHAHGVQTESSTVTPTLPGETLTYVWKIPERSGAGTEDSACIPWAYYSTVDQVKDLYSGLIGPLIVCRRPYLKVFNPRRKLEFALLFLVFDENESWYLDDNIKTYSDHPEKVNKDDEEFIESNKMHAINGRMFGNLQGLTMHVGDEVNWYLMGMGNEIDLHTVHFHGHSFQYKHRGVYSSDVFDIFPGTYQTLEMFPRTPGIWLLHCHVTDHIHAGMETTYTVLQNEDTKSG

SEQ ID NO: 3405 - protein, 946 aa, Homo sapiens
MKILILGIFLFLCSTPAWAKEKHYYIGIIETTWDYASDHGEKKLISVDTEHSNIYLQNGPDRIGRLYKKALYLQYTDETFRTTIEKPVWLGFLGPIIKAETGDKVYVHLKNLASRPYTFHSHGITYYKEHEGAIYPDNTTDFQRADDKVYPGEQYTYMLLATEEQSPGEGDGNCVTRIYHSHIDAPKDIASGLIGPLIICKKDSLDKEKEKHIDREFVVMFSVVDENFSWYLEDNIKTYCSEPEKVDKDNEDFQESNRMYSVNGYTFGSLPGLSMCAEDRVKWYLFGMGNEVDVHAAFFHGQALTNKNYRIDTINLFPATLFDAYMVAQNPGEWMLSCQNLNHLKAGLQAFFQVQECNKSSSKDNIRGKHVRHYYIAAEEIIWNYAPSGIDIFTKENLTAPGSDSAVFFEQGTTRIGGSYKKLVYREYTDASFTNRKERGPEEEHLGILGPVIWAEVGDTIRVTFHNKGAYPLSIEPIGVRFNKNNEGTYYSPNYNPQSRSVPPSASHVAPTETFTYEWTVPKEVGPTNADPVCLAKMYYSAVEPTKDIFTGLIGPMKICKKGSLHANGRQKDVDKEFYLFPTVFDENESLLLEDNIRMFTTAPDQVDKEDEDFQESNKMHWTFNVECLTTDHYTGGMKQKYTVNQCRRQSEDSTFYLGERTYYIAAVEVEWDYSPQREWEKELHHLQEQNVSNAFLDKGEFYIGSKYKKVVYRQYTDSTFRVPVERKAEEEHLGILGPQLHADVGDKVKIIFKNMATRPYSIHAHGVQTESSTVTPTLPGETLTYVWKIPERSGAGTEDSACIPWAYYSTVDQVKDLYSGLIGPLIVCRRPYLKVFNPRRKLEFALLFLVFDENESWYLDDNIKTYSDHPEKVNKDDEEFIESNKMHAINGRMFGNLQGLTMHVGDEVNWYLMGMGNEIDLHTVHFHGHSFQYKHLLRLTGEYGM

SEQ ID NO: 3406 - protein, 179 aa, Homo sapiens [sequence omitted]

SEQ ID NO: 3407 - protein, 852 aa, Homo sapiens
VVMFSVVDENFSWYLEDNIKTYCSEPEKVDKDNEDFQESNRMYSVNGYTFGSLPGLSMCAEDRVKWYLFGMGNEVDVHAAFFHGQALTNKNYRIDTINLFPATLFDAYMVAQNPGEWMLSCQNLNHLKAGLQAFFQVQECNKSSSKDNIRGKHVRHYYIAAEEIIWNYAPSGIDIFTKENLTAPGSDSAVFFEQGTTRIGGSYKKLVYREYTDASFTNRKERGPEEEHLGILGPVIWAEVGDTIRVTFHNKGAYPLSIEPIGVRFNKNNEGTYYSPNYNPQSRSVPPSASHVAPTETFTYEWTVPKEVGPTNADPVCLAKMYYSAVEPTKDIFTGLIGPMKICKKGSLHANGRQKDVDKEFYLFPTVFDENESLLLEDNIRMFTTAPDQVDKEDEDFQESNKMHSMNGFMYGNQPGLTMCKGDSVVWYLFSAGNEADVHGIYFSGNTYLWRGERRDTANLFPQTSLTLHMWPDTEGTFNVECLTTDHYTGGMKQKYTVNQCRRQSEDSTFYLGERTYYIAAVEVEWDYSPQREWEKELHHLQEQNVSNAFLDKGEFYIGSKYKKVVYRQYTDSTFRVPVERKAEEEHLGILGPQLHADVGDKVKIIFKNMATRPYSIHAHGVQTESSTVTPTLPGETLTYVWKIPERSGAGTEDSACIPWAYYSTVDQVKDLYSGLIGPLIVCRRPYLKVFNPRRKLEFALLFLVFDENESWYLDDNIKTYSDHPEKVNKDDEEFIESNKMHAINGRMFGNLQGLTMHVGDEVNWYLMGMGNEIDLHTVHFHGHSFQYKHRGVYSSDVFDIFPGTYQTLEMFPRTPGIWLLHCHVTDHIHAGMETTYTVLQNEGEYPDTKSG

SEQ ID NO: 3408 - protein, 103 aa, Homo sapiens
MIEDVQSLLDEEQEQMFAFRSRARSTDTFNYATYHTLEEIYDFLDLLVAENPHLVSKIQIGNTYEGRPIYVLKFSTGGSKRPAIWIDTGIHSREWVTQASGVW

SEQ ID NO: 3409 - protein, 331 aa, Homo sapiens
MIEDVQSLLDEEQEQMFAFRSRARSTDTFNYATYHTLEEIYDFLDLLVAENPHLVSKIQIGNTYEGRPIYVLKFSTGGSKRPAIWIDTGIHSREWVTQASGVWFAKKITQDYGQDAAFTAILDTLDIFLEIVTNPDGFAFTHSTNRMWRKTRSHTAGSLCIGVDPNRNWDAGFGLSGASSNPCSETYHGKFANSEVEVKSIVDFVKDHGNIKAFISIHSYSQLLMYPYGYKTEPVPDQDELDQLSKAAVTALASLYGTKFNYGSIIKAIYQASGSTIDWTYSQGIKYSFTFELRDTGRYGFLLPASQIIPTAKETWLALLTIMEHTLNHPY

SEQ ID NO: 3410 - protein, 269 aa, Homo sapiens
MIEDVQSLLDEEQEQMFAFRSRARSTDTFNYATYHTLEEIYDFLDLLVAENPHLVSKIQIGNTYEGRPIYVLKFSTGGSKRPAIWIDTGIHSREWVTQASGVWFAKKITQDYGQDAAFTAILDTLDIFLEIVTNPDGFAFTHSTNRMWRKTRSHTAGSLCIGVDPNRNWDAGFGLSGASSNPCSETYHGKFANSEVEVKSIVDFVKDHGNIKAFISIHSYSQLLMYPYGYKTEPVPDQDELDQLSKAAVTALASLYGTKFNYGSIIKAI

SEQ ID NO: 3411 - protein, 419 aa, Homo sapiens
MRGLLVLSVLLGAVFGKEDFVGHQVLRISVADEAQVQKVKELEDLEHLQLDFWRGPAHPGSPIDVRVPFPSIQAVKIFLESHGISYETMIEDVQSLLDEEQEQMFAFRSRARSTDTFNYATYHTLEEIYDFLDLLVAENPHLVSKIQIGNTYEGRPIYVLKFSTGGSKRPAIWIDTGIHSREWVTQASGVWFAKKITQDYGQDAAFTAILDTLDIFLEIVTNPDGFAFTHSTNRMWRKTRSHTAGSLCIGVDPNRNWDAGFGLSGASSNPCSETYHGKFANSEVEVKSIVDFVKDHGNIKAFISIHSYSQLLMYPYGYKTEPVPDQDELDQLSKAAVTALASLYGTKFNYGSIIKAIYQASGSTIDWTYSQGIKYSFTFELRDTGRYGFLLPASQIIPTAKETWLALLTIMEHTLNHPY

SEQ ID NO: 3412 - protein, 191 aa, Homo sapiens
SLTFPPGSSMRGLLVLSVLLGAVFGKEDFVGHQVLRISVADEAQVQKITQDYGQDAAFTAILDTLDIFLEIVTNPDGFAFTHSTNRMWRKTRSHTAGSLCIGVDPNRNWDAGFGLSGASSNPCSETYHGKFANSEVEVKSIVDFVKDHGNIKAFISIHSYSQLLMYPYGYKTEPVPDQDELDQLSKAAVTA

SEQ ID NO: 3413 - protein, 419 aa, Homo sapiens
MAMRLILFFGALFGHIYCLETFVGDQVLEIVPSNEEQIKNLLQLEAQEHLQLDFWKSPTTPGETAHVRVPFVNVQAVKVFLESQGIAYSIMIEDVQVLLDKENEEMLFNRRRERSGNFNFGAYHTLEEISQEMDNLVAEHPGLVSKVNIGSSFENRPMNVLKFSTGGDKPAIWLDAGIHAREWVTQATALWTANKIVSDYGKDPSITSILDALDIFLLPVTNPDGYVFSQTKNRMWRKTRSKVSGSLCVGVDPNRNWDAGFGGPGASSNPCSDSYHGPSANSEVEVKSIVDFIKSHGKVKAFITLHSYSQLLMFPYGYKCTKLDDFDELSEVAQKAAQSLRSLHGTKYKVGPICSVIYQASGGSIDWSYDYGIKYSFAFELRDTGRYGFLLPARQILPTAEETWLGLKAIMEHVRDHPY

SEQ ID NO: 3414 - protein, 182 aa, Homo sapiens
MRLILFFGALFGHIYCLETFVGDQVLEIVPSNEEQIKNLLQLEAQEHLQLDFWKSPTTPGETAHVRVPFVNVQAVKVFLESQGIAYSIMIEDVQVLLDKENEEMLFNRRRERSGNFNFGAYHTLEEISQEMDNLVAEHPGLVSKVNIGSSFENRPMNVLKKSSGRMQKDDGQLNPKPQRQTP

SEQ ID NO: 3415 - protein, 417 aa, Homo sapiens
MRLILPVGLIATTLAIAPVRFDREKVFRVKPQDEKQADIIKDLAKTNELDFWYPGATHHVAANMMVDFRVSEKESQAIQSALDQNKMHYEILIHDLQEEIEKQFDVKEDIPGRHSYAKYNNWEKIVAWTEKMMDKYPEMVSRIKIGSTVEDNPLYVLKIGEKNERRKAIFTDCGIHAREWVSPAFCQWFVYQATKTYGRNKIMTKLLDRMNFYILPVFNVDGYIWSWTKNRMWRKNRSKNQNSKCIGTDLNRNFNASWNSIPNTNDPCADNYRGSAPESEKETKAVTNFIRSHLNEIKVYITFHSYSQMLLFPYGYTSKLPPNHEDLAKVAKIGTDVLSTRYETRYIYGPIESTIYPISGSSLDWAYDLGIKHTFAFELRDKGKFGFLLPESRIKPTCRETMLAVKFIAKYILKHTS

SEQ ID NO: 3416 - protein, 29 aa, Homo sapiens
MQHNEGQERSSNNFNYGAYHSLEAIYHEM

SEQ ID NO: 3417 - protein, 317 aa, Homo sapiens
MQHNEGQERSSNNFNYGAYHSLEAIYHEMDNIAADFPDLARRVKIGHSFENRPMYVLKFSTGKGVRRPAVWLNAGIHSREWISQATAIWTARKIVSDYQRDPAITSILEKMDIFLLPVANPDGYVYTQTQNRLWRKTRSRNPGSSCIGADPNRNWNASFAGKGASDNPCSEVYHGPHANSEVEVKSVVDFIQKHGNFKGFIDLHSYSQLLMYPYGYSVKKAPDAEELDKVARLAAKALASVSGTEYQVGPTCTTVYPASGSSIDWAYDNGIKFAFTFELRDTGTYGFLLPANQIIPTAEETWLGLKTIMEHVRDNLY

SEQ ID NO: 3418 - protein, 421 aa, Homo sapiens
MRWILFIGALIGSSICGQEKFFGDQVLRINVRNGDEISKLSQLVNSNNLKLNFWKSPSSFNRPVDVLVPSVSLQAFKSFLRSQGLEYAVTIEDLQALLDNEDDEMQHNEGQERSSNNFNYGAYHSLEAIYHEMDNIAADFPDLARRVKIGHSFENRPMYVLKFSTGKGVRRPAVWLNAGIHSREWISQATAIWTARKIVSDYQRDPAITSILEKMDIFLLPVANPDGYVYTQTQNRLWRKTRSRNPGSSCIGADPNRNWNASFAGKGASDNPCSEVYHGPHANSEVEVKSVVDFIQKHGNFKGFIDLHSYSQLLMYPYGYSVKKAPDAEELDKVARLAAKALASVSGTEYQVGPTCTTVYPASGSSIDWAYDNGIKFAFTFELRDTGTYGFLLPANQIIPTAEETWLGLKTIMEHVRDNLY

SEQ ID NO: 3419 - protein, 172 aa, Homo sapiens [sequence omitted]

SEQ ID NO: 3420 - protein, 177 aa, Homo sapiens
MRWILFIGALIGSSICGQEKFFGDQVLRINVRNGDEISKLSQLVNSNNLKLNFWKSPSSFNRPVDVLVPSVSLQAFKSFLRSQGLEYAVTIEDLQIYHEMDNIAADFPDLARRVKIGHSFENRPMYVLKFSTGKGVRRPAVWLNAGIHSREWISQATAIWTARKIVSDYQRDPAITS

SEQ ID NO: 3421 - protein, 388 aa, Homo sapiens
MRWILFIGALIGSSICGQEKFFGDQVLRINVRNGDEISKLSQLVNSNNLKLNFWKSPSSFNRPVDVLVPSVSLQAFKSFLRSQGLEYAVTIEDLQIYHEMDNIAADFPDLARRVKIGHSFENRPMYVLKFSTGKGVRRPAVWLNAGIHSREWISQATAIWTARKIVSDYQRDPAITSILEKMDIFLLPVANPDGYVYTQTQNRLWRKTRSRNPGSSCIGADPNRNWNASFAGKGASDNPCSEVYHGPHANSEVEVKSVVDFIQKHGNFKGFIDLHSYSQLLMYPYGYSVKKAPDAEELDKVARLAAKALASVSGTEYQVGPTCTTVYPASGSSIDWAYDNGIKFAFTFELRDTGTYGFLLPANQIIPTAEETWLGLKTIMEHVRDNLY

SEQ ID NO: 3422 - protein, 92 aa, Homo sapiens
MKCLGKRRGQAAAFLPLCWLFLKILQPGHSHLYNNRYAGDKVIRFIPKTEEEAYALKKISYQLKGPHRRSSENTGEGKQLAHPEKPKIPLWI

SEQ ID NO: 3423 - protein, 92 aa, Homo sapiens; identical to SEQ ID NO: 3422

SEQ ID NO: 3424 - protein, 437 aa, Homo sapiens
MKCLGKRRGQAAAFLPLCWLFLKILQPGHSHLYNNRYAGDKVIRFIPKTEEEAYALKKISYQLKVDLWQPSSISYVSEGTVTDVHIPQNGSRALLAFLQEANIQYKVLIEDLQKTLEKGSSLHTQRNRRSLSGYNYEVYHSLEEIQNWMHHLNKTHSGLIHMFSIGRSYEGRSLFILKLGRRSRLKRAVWIDCGIHAREWIGPAFCQWFVKEALLTYKSDPAMRKMLNHLYFYIMPVFNVDGYHFSWTNDRFWRKTRSRNSRFRCRGVDANRNWKVKWCDEGASMHPCDDTYCGPFPESEPEVKAVANFLRKHRKHIRAYLSFHAYAQMLLYPYSYKYATIPNFRCVESAAYKAVNALQSVYGVRYRYGPASTTLYVSSGSSMDWAYKNGIPYAFAFELRDTGYFGFLLPEMLIKPTCTETMLAVKNITMHLLKKCP

SEQ ID NO: 3425 - protein, 175 aa, Homo sapiens
LLLDKHMGMKRYEVAGRRVLFYFDEIPSRCLTCVRFRALRECVVGRTSALPVSVYDYYEPAFEATRFYNVSTHSPLARELCAGPACNEVERAPARGPGWFPGESGPAVAPEEGAAIARCGCDHDCGAQGNPVCGSDGVVYASACRLREAACRQAAPLEPAPPSCCALAGREAEWS

SEQ ID NO: 3426 - protein, 550 aa, Homo sapiens
MAPGALRGGCEQRAPGGGARTAALGPWPWPSPGPAPSPGAAPPRSRKMSGALLWPLLPLLLLLLSARDGVRAAQPQAPGYLIAAPSVFRAGVEEVISVTIFNSPREVTVQAQLVAQGEPVVQSQGAILDKGTIKLKVPTGLRGQALLKVWGRGWQAEEGPLFHNQTSVTVDGRGASVFIQTDKPVYRPQHRVLISIFTVSPNLRPVNEKLEAYILDPRGSRMIEWRHLKPFCCGITNMSFPLSDQPVLGEWFIFVEMQGHAYNKSFEVQKYVLPKFELLIDPPRYIQDLDACETGTVRARYTFGKPVAGALMINMTVNGVGYYSHEVGRPVLRTTKILGSRDFDICVRDMIPADVPEHFRGRVSIWAMVTSVDGSQQVAFDDSTPVQRQLVDIRYSKDTRKQFKPGLAYVGKVELSYPDGSPAEGVTVQIKAELTPKDNIYTSEVVSQRGLVGFEIPSIPTSAQHVWLEVFQELEDYDVSDSFGVSREDGPFWWAGLTAQRRRRSSVFPWPWGITKDSGFAFTVRRGNGTGGDDRPSEPEPPAGRWPLHR

SEQ ID NO: 3427 - protein, 1932 aa, Homo sapiens
MAPGALRGGCEQRAPGGGARTAALGPWPWPSPGPAPSPGAAPPRSRKMSGALLWPLLPLLLLLLSARDGVRAAQPQAPGYLIAAPSVFRAGVEEVISVTIFNSPREVTVQAQLVAQGEPVVQSQGAILDKGTIKLKVPTGLRGQALLKVWGRGWQAEEGPLFHNQTSVTVDGRGASVFIQTDKPVYRPQHRVLISIFTVSPNLRPVNEKLEAYILDPRGSRMIEWRHLKPFCCGITNMSFPLSDQPVLGEWFIFVEMQGHAYNKSFEVQKYVLPKFELLIDPPRYIQDLDACETGTVRARYTFGKPVAGALMINMTVNGVGYYSHEVGRPVLRTTKILGSRDFDICVRDMIPADVPEHFRGRVSIWAMVTSVDGSQQVAFDDSTPVQRQLVDIRYSKDTRKQFKPGLAYVGKVELSYPDGSPAEGVTVQIKAELTPKDNIYTSEVVSQRGLVGFEIPSIPTSAQHVWLETKVMALNGKPVGAQYLPSYLSLGSWYSPSQCYLQLQPPSHPLQVGEEAYFSVKSTCPCNFTLYYEVAARGNIVLSGQQPAHTTQQRSKRAAPALEKPIRLTHLSETEPPPAPEAEVDVCVTSLHLAVTPSMVPLGRLLVFYVRENGEGVADSLQFAVETFFENQVSVTYSANETQPGEVVDLRIRAARGSCVCVAAVDKSVYLLRSGFRLTPAQVFQELEDYDVSDSFGVSREDGPFWWAGLTAQRRRRSSVFPWPWGITKDSGFAFTETGLVVMTDRVSLNHRQDGGLYTDEAVPAFQPHTGSLVAVAPSRHPPRTEKRKRTFFPETWIWHCLNISDPSGEGTLSVKVPDSITSWVGEAVALSTSQGLGIAEPSLLKTFKPFFVDFMLPALIIRGEQVKIPLSVYNYMGTCAEVYMKLSVPKGIQFVGHPGKRHVTKKMCVAPGEAEPIWVVLSFSDLGLNNITAKALAYGDTNCCRDGRSSKHPEENHADRRVPIGVDHVRRSVMVEAEGVPRAYTYSAFFCPSERVHISTPNKYEFQYVQRPLRLTRFDVAVRAHNDARVALSSGPQDTAGMIEIVLGGHQNTRSWISTSKMGEPVASAHTAKILSWDEFRTFWISWRGGLIQVGHGPEPSNESVIVAWTLPRPPEVQFIGFSTGWGSMGEFRIWRKMEVDESYSEAFTLGVPHGAIPGSERATASIIGDVMGPTLNHLNNLLRLPFGCGEQNMIHFAPNVFVLKYLQKTQQLSPEVERETTDYLVQGYQRQLTYKRQDGSYSAFGERDASGSMWLTAFVLKSFAQARSFIFVDPRELAAAKSWIIQQQQADGSFLAVGRVLNKDIQGGIHGTVPLTAYVVVALLETGTASEEERGSTDKARHFLESAAPLAMDPYSCALTTYALTLLRSPAAPEALRKLRSLAIMRDGVTHWSLSNSWDVDKGTFLSFSDRVSQSVVSAEVEMTAYALLTYTLLGDVAAALPVVKWLSQQRNALGGFSSTQDTCVALQALAEYAILSYAGGINLTVSLASTNLDYQETFELHRTNQKVLQTAAIPSLPTGLFVSAKGDGCCLMQIDVTYNVPDPVAKPAFQLLVSLQEPEAQGRPPPMPASAAEGSRGDWPPADDDDPAADQHHQEYKVMLEVCTRWLHAGSSNMAVLEVPLLSGFRADIESLEQLLLDKHMGMKRYEVAGRRVLFYFDEIPSRCLTCVRFRALRECVVGRTSALPVSVYDYYEPAFEATRFYNVSTHSPLARELCAGPACNEVERAPARGPGWFPGESGPAVAPEEGAAIARCGCDHDCGAQGNPVCGSDGVVYASACRLREAACRQAAPLEPAPPSCCALEQRLPASSSSTYGDDLASVAPGPLQQDVKLNGAGLEVEDSDPEPEGEAEDRVTAGPRPPVSSGNLESSTQSASPFHRWGQTPAPQRHSGRVVGAHRPGLLSPVFVYSPAFQSGGEEGLWMSNTCTLR

SEQ ID NO: 3428 - protein, 503 aa, Homo sapiens
MSGALLWPLLPLLLLLLSARDGVRAAQPQAPGYLIAAPSVFRAGVEEVISVTIFNSPREVTVQAQLVAQGEPVVQSQGAILDKGTIKLKVPTGLRGQALLKVWGRGWQAEEGPLFHNQTSVTVDGRGASVFIQTDKPVYRPQHRVLISIFTVSPNLRPVNEKLEAYILDPRGSRMIEWRHLKPFCCGITNMSFPLSDQPVLGEWFIFVEMQGHAYNKSFEVQKYVLPKFELLIDPPRYIQDLDACETGTVRARYTFGKPVAGALMINMTVNGVGYYSHEVGRPVLRTTKILGSRDFDICVRDMIPADVPEHFRGRVSIWAMVTSVDGSQQVAFDDSTPVQRQLVDIRYSKDTRKQFKPGLAYVGKVELSYPDGSPAEGVTVQIKAELTPKDNIYTSEVVSQRGLVGFEIPSIPTSAQHVWLEVFQELEDYDVSDSFGVSREDGPFWWAGLTAQRRRRSSVFPWPWGITKDSGFAFTVRRGNGTGGDDRPSEPEPPAGRWPLHR

SEQ ID NO: 3429 - protein, 56 aa, Homo sapiens
RTQTLSLKGRRRTERLLFLTAALLRAGRHHLAASCPYQPVTLYGGWADLSPGDTCL

SEQ ID NO: 3430 - protein, 338 aa, Homo sapiens
  SITE 1: note = misc_feature - Xaa can be any naturally occurring amino acid
XVSAKGDGCCLMQIDVTYNVPDPVAKPAFQLLVSLQEPEAQGRPPPMPASAAEGSRGDWPPADDDDPAADQHHQEYKVMLEVCTRWLHAGSSNMAVLEVPLLSGFRADIESLEQLLLDKHMGMKRYEVAGRRVLFYFDEIPSRCLTCVRFRALRECVVGRTSALPVSVYDYYEPAFEATRFYNVSTHSPLARELCAGPACNEVERAPARGPGWFPGESGPAVAPEEGAAIARCGCDHDCGAQGNPVCGSDGVVYASACRLREAACRQAAPLEPAPPSCCALEQRLPASSSSTYGDDLASVAPGPLQQDVKLNGAGLEVEDSDPEPEGEAEDSQSGFSS

SEQ ID NO: 3431 - protein, 59 aa, Homo sapiens
MLALLVLVTVALASAHHGGEHFEGEKVFRVNVEDENHINIIRELASTTQIDFWKPDSVT

SEQ ID NO: 3432 - protein, 99 aa, Homo sapiens
MLALLVLVTVALASAHHGGEHFEGEKVFRVNVEDENHINIIRELASTTQIDFWKPDSVTQIKPHSTVDFRVKAEDTVTVENVLKQNELQYKVLISNLRN

SEQ ID NO: 3433 - protein, 417 aa, Homo sapiens
MLALLVLVTVALASAHHGGEHFEGEKVFRVNVEDENHINIIRELASTTQIDFWKPDSVTQIKPHSTVDFRVKAEDTVTVENVLKQNELQYKVLISNLRNVVEAQFDSRVRATGHSYEKYNKWETIEAWTQQVATENPALISRSVIGTTFEGRAIYLLKVGKAGQNKPAIFMDCGFHAREWISPAFCQWFVREAVRTYGREIQVTELLDKLDFYVLPVLNIDGYIYTWTKSRFWRKTRSTHTGSSCIGTDPNRNFDAGWCEIGASRNPCDETYCGPAAESEKETKALADFIRNKLSSIKAYLTIHSYSQMMIYPYSYAYKLGENNAELNALAKATVKELASLHGTKYTYGPGATTIYPAAGGSDDWAYDQGIRYSFTFELRDTGRYGFLLPESQIRATCEETFLAIKYVASYVLEHLY

SEQ ID NO: 3434 - protein, 417 aa, Homo sapiens; identical to SEQ ID NO: 3433

SEQ ID NO: 3435 - protein, 203 aa, Homo sapiens
MLALLVLVTVALASAHHGGEHFEGEKVFRVNVEDENHINIIRELASTTQIDFWKPDSVTQIKPHSTVDFRVKAEDTVTVENVLKQNELQYKVLISNLRNVVEAQFDSRVRATGHSYEKYNKWETVGKAGQNKPAIFMDCGFHAREWISPAFCQWFVREAVRTYGREIQVTELLDKLDFYVLPVLNIDGYIYTWTKSRFWRKTR

SEQ ID NO: 3436 - protein, 423 aa, Homo sapiens
MKLCSLAVLVPIVLFCEQHVFAFQSGQVLAALPRTSRQVQVLQNLTTTYEIVLWQPVTADLIVKKKQVHFFVNASDVDNVKAHLNVSGIPCSVLLADVEDLIQQQISNDTVSPRASASYYEQYHSLNEIYSWIEFITERHPDMLTKIHIGSSFEKYPLYVLKVSGKEQAAKNAIWIDCGIHAREWISPAFCLWFIGHITQFYGIIGQYTNLLRLVDFYVMPVVNVDGYDYSWKKNRMWRKNRSFYANNHCIGTDLNRNFASKHWCEEGASSSSCSETYCGLYPESEPEVKAVASFLRRNINQIKAYISMHSYSQHIVFPYSYTRSKSKDHEELSLVASEAVRAIEKISKNTRYTHGHGSETLYLAPGGGDDWIYDLGIKYSFTIELRDTGTYGFLLPERYIKPTCREAFAAVSKIAWHVIRNV

SEQ ID NO: 3437 - protein, 423 aa, Homo sapiens; identical to SEQ ID NO: 3436

SEQ ID NO: 3438 - protein, 386 aa, Homo sapiens
MKLCSLAVLVPIVLFCEQHVFAFQSGQVLAALPRTSRQVQVLQNLTTTYEIVLWQPVTADLIVKKKQVHFFVNASDVDNVKAHLNVSGIPCSVLLADVEDLIQQQISNDTVSPRASASYYEQYHSLNEIYSWIEFITERHPDMLTKIHIGSSFEKYPLYVLKVSGKEQAAKNAIWIDCGIHAREWISPAFCLWFIGHNRMWRKNRSFYANNHCIGTDLNRNFASKHWCEEGASSSSCSETYCGLYPESEPEVKAVASFLRRNINQIKAYISMHSYSQHIVFPYSYTRSKSKDHEELSLVASEAVRAIEKISKNTRYTHGHGSETLYLAPGGGDDWIYDLGIKYSFTIELRDTGTYGFLLPERYIKPTCREAFAAVSKIAWHVIRNV

SEQ ID NO: 3439 - protein, 476 aa, Homo sapiens
MAGRGGSALLALCGALAACGWLLGAEAQEPGAPAAGMRRRRRLQQEDGISFEYHRYPELREALVSVWLQCTAISRIYTVGRSFEGRELLVIELSDNPGVHEPGEPEFKYIGNMHGNEAVGRELLIFLAQYLCNEYQKGNETIVNLIHSTRIHIMPSLNPDGFEKAASQPGELKDWFVGRSNAQGIDLNRNFPDLDRIVYVNEKEGGPNNHLLKNMKKIVDQNTKLAPETKAVIHWIMDIPFVLSANLHGGDLVANYPYDETRSGSAHEYSSSPDDAIFQSLARAYSSFNPAMSDPNRPPCRKNDDDSSFVDGTTNGGAWYSVPGGMQDFNYLSSNCFEITVELSCEKFPPEETLKTYWEDNKNSLISYLEQIHRGVKGFVRDLQGNPIANATISVEGIDHDVTSAKDGDYWRLLIPGNYKLTASAPGYLAITKKVAVPYSPAAGVDFELESFSERKEEEKEELMEWWKMMSETLNF

SEQ ID NO: 3440 - protein, 139 aa, Homo sapiens
MHGNEAVGRELLIFLAQYLCNEYQKGNETIVNLIHSTRIHIMPSLNPDGFEKAASQPGELKDWFVGRSNAQGIDLNRNFPDLDRIVYVNEKEGGPNNHLLKNMKKIVDQNTKLAPETKAVIHWIMDIPFVLSANLHGGD

SEQ ID NO: 3441 - protein, 147 aa, Homo sapiens
MHGNEAVGRELLIFLAQYLCNEYQKGNETIVNLIHSTRIHIMPSLNPDGFEKAASQPGELKDWFVGRSNAQGIDLNRNFPDLDRIVYVNEKEGGPNNHLLKNMKKIVDQNTKLAPETKAVIHWIMDIPFVLSANLHGGDLVANYPYD

SEQ ID NO: 3442 - protein, 157 aa, Homo sapiens
MHGNEAVGRELLIFLAQYLCNEYQKGNETIVNLIHSTRIHIMPSLNPDGFEKAASQPGELKDWFVGRSNAQGIDLNRNFPDLDRIVYVNEKEGGPNNHLLKNMKKIVDQNTKLAPETKAVIHWIMDIPFVLSANLHGGDLVANYPYDETRSGSAHEY

SEQ ID NO: 3443 - protein, 108 aa, Homo sapiens
  SITE 1: note = misc_feature - Xaa can be any naturally occurring amino acid
XLGAEAQEPGAPAAGMRRRRRLQQEDGISFEYHRYPELREALVSVWLQCTAISRIYTVGRSFEGRELLVIELSDNPGVHEPDCKLYEVGTLIPAPSSCLAHSGLEYTL

SEQ ID NO: 3444 - protein, 64 aa, Homo sapiens
MDFPCLWLGLLLPLVAALDFNYHRQEGMEAFLKTVAQNYSSVTHLHSIGKSVKDCWAGAAAPSD

SEQ ID NO: 3445 - protein, 64 aa, Homo sapiens; identical to SEQ ID NO: 3444

SEQ ID NO: 3446 - protein, 72 aa, Homo sapiens
MDFPCLWLGLLLPLVAALDFNYHRQEGMEAFLKTVAQNYSSVTHLHSIGKSVKETCGFLLWGGFQRNTELGF

SEQ ID NO: 3447 - protein, 136 aa, Homo sapiens
MDFPCLWLGLLLPLVAALDFNYHRQEGMEAFLKTVAQNYSSVTHLHSIGKSVKGRNLWVLVVGRFPKEHRIGIPEFKYVANMHGDETVGRELLLHLIDYLVTSDGKDPEITNLINSTRIHIMPSMNPDGFEAVKKP

SEQ ID NO: 3448 - protein, 249 aa, Homo sapiens
MDFPCLWLGLLLPLVAALDFNYHRQEGMEAFLKTVAQNYSSVTHLHSIGKSVKGRNLWVLVVGRFPKEHRIGIPEFKYVANMHGDETVGRELLLHLIDYLVTSDGKDPEITNLINSTRIHIMPSMNPDGFEAVKKPDCYYSIGRENYNQYDLNRNFPDAFEYNNVSRQPETVAVMKWLKTETFVLSANLHGGALVASYPFDNGVQATGALYSRSLTPDDDVFQYLAHTYASRNPNMKKGDECKNKMNFP

SEQ ID NO: 3449 - protein, 443 aa, Homo sapiens
MDFPCLWLGLLLPLVAALDFNYHRQEGMEAFLKTVAQNYSSVTHLHSIGKSVKGRNLWVLVVGRFPKEHRIGIPEFKYVANMHGDETVGRELLLHLIDYLVTSDGKDPEITNLINSTRIHIMPSMNPDGFEAVKKPDCYYSIGRENYNQYDLNRNFPDAFEYNNVSRQPETVAVMKWLKTETFVLSANLHGGALVASYPFDNGVQATGALYSRSLTPDDDVFQYLAHTYASRNPNMKKGDECKNKMNFPNGVTNGYSWYPLQGGMQDYNYIWAQCFEITLELSCCKYPREEKLPSFWNNNKASLIEYIKQVHLGVKGQVFDQNGNPLPNVIVEVQDRKHICPYRTNKYGEYYLLLLPGSYIINVTVPGHDPHITKVIIPEKSQNFSALKKDILLPFQGQLDSIPVSNPSCPMIPLYRNLPDHSAATKPSLFLFLVSLLHIFFK

SEQ ID NO: 3450 - protein, 443 aa, Homo sapiens; identical to SEQ ID NO: 3449

SEQ ID NO: 3451 - protein, 443 aa, Homo sapiens; identical to SEQ ID NO: 3449

SEQ ID NO: 3452 - protein, 35 aa, Homo sapiens
SCPMIPLYRNLPDHSAATKPSLFLFLVSLLHIFFK

SEQ ID NO: 3453 - protein, 198 aa, Homo sapiens
  SITE 1: note = misc_feature - Xaa can be any naturally occurring amino acid
XPFDNGVQATGALYSRSLTPDDDVFQYLAHTYASRNPNMKKGDECKNKMNFPNGVTNGYSWYPLQGGMQDYNYIWAQCFEITLELSCCKYPREEKLPSFWNNNKASLIEYIKQVHLGVKGQVFDQNGNPLPNVIVEVQDRKHICPYRTNKYGEYYLLLLPGSYIINVTVPGHDPHITKLRSFACNRGQDEFCLTSLMS

SEQ ID NO: 3454 - protein, 204 aa, Homo sapiens
MHSFNFVLSANLHGGAVVANYPYDKSFEHRVRGVRRTASTPTPDDKLFQKLAKVYSYAHGWMFQGWNCGDYFPDGITNGASWYSLSKGMQDFNYLHTNCFEITLELSCDKFPPEEELQREWLGNREALIQFLEQVHQGIKGMVLDENYNNLANAVISVSGINHDVTSGDHGDYFRLLLPGIYTVSATAPGYDPETVTVTVGPAE

SEQ ID NO: 3455 - protein, 458 aa, Homo sapiens
MSDLLSVFLHLLLLFKLVAPVTFRHHRYDDLVRTLYKVQNECPGITRVYSIGRSVEGRHLYVLEFSDHPGIHEPLEPEVKYVGNMHGNEALGRELMLQLSEFLCEEFRNRNQRIVQLIQDTRIHILPSMNPDGYEVAAAQGPNKPGYLVGRNNANGVDLNRNFPDLNTYIYYNEKYGGPNHHLPLPDNWKSQVEPETRAVIRWMHSFNFVLSANLHGGAVVANYPYDKSFEHRVRGVRRTASTPTPDDKLFQKLAKVYSYAHGWMFQGWNCGDYFPDGITNGASWYSLSKGMQDFNYLHTNCFEITLELSCDKFPPEEELQREWLGNREALIQFLEQVHQGIKGMVLDENYNNLANAVISVSGINHDVTSGDHGDYFRLLLPGIYTVSATAPGYDPETVTVTVGPAEPTLVNFHLKRSIPQVSPVRRAPSRRHGVRAKVQPQARKKEMEMRQLQRGPA

SEQ ID NO: 3456 - protein, 545 aa, Homo sapiens
MLPGAWLLWTSLLLLARPAQPCPMGCDCFVQEVFCSDEELATVPLDIPPYTKNIIFVETSFTTLETRAFGSNPNLTKVVFLNTQLCQFRPDAFGGLPRLEDLEVTGSSFLNLSTNIFSNLTSLGKLTLNFNMLEALPEGLFQHLAALESLHLQGNQLQALPRRLFQPLTHLKTLNLAQNLLAQLPEELFHPLTSLQTLKLSNNALSGLPQGVFGKLGSLQELFLDSNNISELPPQVFSQLFCLERLWLQRNAITHLPLSIFASLGNLTFLSLQWNMLRVLPAGLFAHTPCLVGLSLTHNQLETVAEGTFAHLSNLRSLMLSYNAITHLPAGIFRDLEELVKLYLGSNNLTALHPALFQNLSKLELLSLSKNQLTTLPEGIFDTNYNLFNLALHGNPWQCDCHLAYLFNWLQQYTDRLLNIQTYCAGPAYLKGQVVPALNEKQLVCPVTRDHLGFQVTWPDESKAGGSWDLAVQERAARSQCTYSNPEGTVVLACDQAQCRWLNVQLSPQQGSLGLQYNASQEWDLRSSCGSLRLTVSIEARAAGP

SEQ ID NO: 3457 - protein, 545 aa, Homo sapiens; identical to SEQ ID NO: 3456

SEQ ID NO: 3458 - protein, 374 aa, Homo sapiens
MKPLLETLYLLGMLVPGGLGYDRSLAQHRQEIVDKSVSPWSLETYSYNIYHPMGEIYEWMREISEKYKEVVTQHFLGVTYETHPMYYLKISQPSGNPKKIIWMDCGIHAREWIAPAFCQWFVKEILQNHKDNSSIRKLLRNLDFYVLPVLNIDGYIYTWTTDRLWRKSRSPHNNGTCFGTDLNRNFNASWCSIGASRNCQDQTFCGTGPVSEPETKAVASFIESKKDDILCFLTMHSYGQLILTPYGYTKNKSSNHPEMIQVGQKAANALKAKYGTNYRVGSSADILYASSGSSRDWARDIGIPFSYTFELRDSGTYGFVLPEAQIQPTCEETMEAVLSVLDDVYAKHWHSDSAGRVTSATMLLGLLVSCMSLL

SEQ ID NO: 3459 - protein, 130 aa, Homo sapiens
MKFLIFAFFGGVHLLSLCSGKAICKNGISKRTFEEIKEEIASCGDVAKAIINLAVYGKAQNRSYERLALLVDTVGPRLSGSKNLEKAIQIMYQNLQQDGLEKVHLEPVRIPHWERGEESAVMLEPRIHKI

SEQ ID NO: 3460 - protein, 131 aa, Homo sapiens
MKFLIFAFFGGVHLLSLCSGKAICKNGISKRTFEEIKEEIASCGDVAKAIINLAVYGKAQNRSYERLALLVDTVGPRLSGSKNLEKAIQIMYQNLQQDGLEKVHLEPVRIPHWERGEESAVMLEPRIHKIA

SEQ ID NO: 3461 - protein, 137 aa, Homo sapiens
MKFLIFAFFGGVHLLSLCSGKAICKNGISKRTFEEIKEEIASCGDVAKAIINLAVYGKAQNRSYERLALLVDTVGPRLSGSKNLEKAIQIMYQNLQQDGLEKVHLEPVRIPHWERGEESAVMLEPRIHKIAILGLGS

SEQ ID NO: 3462 - protein, 186 aa, Homo sapiens
MKFLIFAFFGGVHLLSLCSGKAICKNGISKRTFEEIKEEIASCGDVAKAIINLAVYGKAQNRSYERLALLVDTVGPRLSGSKNLEKAIQIMYQNLQQDGLEKVHLEPVRIPHWERGEESAVMLEPRIHKIAILGLGSSIGTPPEGITAEVLVVTSFDELQRRASEARGKIVVYNQPYINYSRTVQY

SEQ ID NO: 3463 - protein, 472 aa, Homo sapiens
MKFLIFAFFGGVHLLSLCSGKAICKNGISKRTFEEIKEEIASCGDVAKAIINLAVYGKAQNRSYERLALLVDTVGPRLSGSKNLEKAIQIMYQNLQQDGLEKVHLEPVRIPHWERGEESAVMLEPRIHKIAILGLGSSIGTPPEGITAEVLVVTSFDELQRRASEARGKIVVYNQPYINYSRTVQYRTQGAVEAAKVGALASLIRSVASFSIYSPHTGIQEYQDGVPKIPTACITVEDAEMMSRMASHGIKIVIQLKMGAKTYPDTDSFNTVAEITGSKYPEQVVLVSGHLDSWDVGQGAMDDGGGAFISWEALSLIKDLGLRPKRTLRLVLWTAEEQGGVGAFQYYQLHKVNISNYSLVMESDAGTFLPTGLQFTGSEKARAIMEEVMSLLQPLNITQVLSHGEGTDINFWIQAGVPGASLLDDLYKYFFFHHSHGDTMTVMDPKQMNVAAAVWAVVSYVVADMEEMLPRS

SEQ ID NO: 3464 - protein, 130 aa, Homo sapiens
  SITE 1: note = misc_feature - Xaa can be any naturally occurring amino acid
XFQYYQLHKVNISNYSLVMESDAGTFLPTGLQFTGSEKARAIMEEVMSLLQPLNITQVLSHGEGTDINFWIQAGVPGASLLDDLYKYFFFHHSHGDTMTVMDPKQMNVAAAVWAVVSYVVADMEEMLPRS

SEQ ID NO: 3465 - protein, 141 aa, Homo sapiens
IIGGYAEFLYQIGLLDEKQKKYFQKQCHECIEHIRKQNWFEAFEVLIYNGQLDIIVAAALTERSLMGMDWKGSQEYKKAEKKVWKIFKSDSEVAGYIRQAGDFHQVIIRGGGHILPYDQPLRAFDMINRFIYGKGWDPYVG

SEQ ID NO: 3466 - protein, 100 aa, Homo sapiens
MFGLFVEHGPYVVTSNMTLRDRDFPWTTTLSMLYIDNPVGTGFSFTDDTHGYAVNEDDVARDLYSALIQFFQIFPEYKNNDFYVTGESYAGKYVPAIAHL

SEQ ID NO: 3467 - protein, 142 aa, Homo sapiens
MKSYAGFLTVNKTYNSNLFFWFFPAQIQPEDAPVVLWLQGGPGGSSMFGLFVEHGPYVVTSNMTLRDRDFPWTTTLSMLYIDNPVGTGFSFTDDTHGYAVNEDDVARDLYSALIQFFQIFPEYKNNDFYVTGESYAGKYVPA

SEQ ID NO: 3468 - protein, 244 aa, Homo sapiens
MKSYAGFLTVNKTYNSNLFFWFFPAQIQPEDAPVVLWLQGGPGGSSMFGLFVEHGPYVVTSNMTLRDRDFPWTTTLSMLYIDNPVGTGFSFTDDTHGYAVNEDDVARDLYSALIQFFQIFPEYKNNDFYVTGESYAGKYVPAIAHLIHSLNPVREVKINLNGIAIGDGYSDPESIIGGYAEFLYQIGLLDEKQKKYFQKQCHECIEHIRKQNWFEAFEILDKLLDGDLTSDPSYFQNVTGCSNY

SEQ ID NO: 3469 - protein, 6 aa, Homo sapiens
MVGAMW

SEQ ID NO: 3470 - protein, 43 aa, Homo sapiens
MVGAMWKVIVSLVLLMPGPCDGLFRSLYRSVSMPPKGDSGQPL

SEQ ID NO: 3471 - protein, 52 aa, Homo sapiens
MVGAMWKVIVSLVLLMPGPCDGLFRSLYRSVSMPPKGDSGQPLFLTPYIEAG

SEQ ID NO: 3472 - protein, 476 aa, Homo sapiens
MVGAMWKVIVSLVLLMPGPCDGLFRSLYRSVSMPPKGDSGQPLFLTPYIEAGKIQKGRELSLVGPFPGLNMKSYAGFLTVNKTYNSNLFFWFFPAQIQPEDAPVVLWLQGGPGGSSMFGLFVEHGPYVVTSNMTLRDRDFPWTTTLSMLYIDNPVGTGFSFTDDTHGYAVNEDDVARDLYSALIQFFQIFPEYKNNDFYVTGESYAGKYVPAIAHLIHSLNPVREVKINLNGIAIGDGYSDPESIIGGYAEFLYQIGLLDEKQKKYFQKQCHECIEHIRKQNWFEAFEILDKLLDGDLTSDPSYFQNVTGCSNYYNFLRCTEPEDQLYYVKFLSLPEVRQAIHVGNQTFNDGTIVEKYLREDTVQSVKPWLTEIMNNYKVLIYNGQLDIIVAAALTERSLMGMDWKGSQEYKKAEKKVWKIFKSDSEVAGYIRQAGDFHQVIIRGGGHILPYDQPLRAFDMINRFIYGKGWDPYVG

SEQ ID NO: 3473 - protein, 476 aa, Homo sapiens; identical to SEQ ID NO: 3472

SEQ ID NO: 3474 - protein, 476 aa, Homo sapiens; identical to SEQ ID NO: 3472

SEQ ID NO: 3475 - protein, 180 aa, Homo sapiens
  SITE 1: note = misc_feature - Xaa can be any naturally occurring amino acid
XKYFQKQCHECIEHIRKQNWFEAFEEPEDQLYYVKFLSLPEVRQAIHVGNQTFNDGTIVEKYLREDTVQSVKPWLTEIMNNYKVLIYNGQLDIIVAAALTERSLMGMDWKGSQEYKKAEKKVWKIFKSDSEVAGYIRQAGDFHQVIIRGGGHILPYDQPLRAFDMINRFIYGKGWDPYVG

SEQ ID NO: 3476 - protein, 734 aa, Homo sapiens
MWGLLLALAAFAPAVGPALGAPRNSVLGLAQPGTTKVPGSTPALHSSPAQPPAETANGTSEQHVRIRVIKKKKVIMKKRKKLTLTRPTPLVTAGPLVTPTPAGTLDPAEKQETGCPPLGLESLRVSDSRLEASSSQSFGLGPHRGRLNIQSGLEDGDLYDGAWCAEEQDADPWFQVDAGHPTRFSGVITQGRNSVWRYDWVTSYKVQFSNDSRTWWGSRNHSSGMDAVFPANSDPETPVLNLLPEPQVARFIRLLPQTWLQGGAPCLRAEILACPVSDPNDLFLEAPASGSSDPLDFQHHNYKAMRKLMKQVQEQCPNITRIYSIGKSYQGLKLYVMEMSDKPGEHELGEPEVRYVAGMHGNEALGRELLLLLMQFLCHEFLRGNPRVTRLLSEMRIHLLPSMNPDGYEIAYHRGSELVGWAEGRWNNQSIDLNHNFADLNTPLWEAQDDGKVPHIVPNHHLPLPTYYTLPNATVAPETRAVIKWMKRIPFVLSANLHGGELVVSYPFDMTRTPWAARELTPTPDDAVFRWLSTVYAGSNLAMQDTSRRPCHSQDFSVHGNIINGADWHTVPGSMNDFSYLHTNCFEVTVELSCDKFPHENELPQEWENNKDALLTYLEQVRMGIAGVVRDKDTELGIADAVIAVDGINHDVTTAWGGDYWRLLTPGDYMVTASAEGYHSVTRNCRVTFEEGPFPCNFVLTKTPKQRLRELLAAGAKVPPDLRRRLERLRGQKD

SEQ ID NO: 3477 - protein, 224 aa, Homo sapiens
MEKIPFVLGGNLQGGELVVAYPYDLVRSPWKTQEHTPTPDDHVFRWLAYSYASTHRLMTDARRRVCHTEDFQKEEGTVNGASWHTVAGSLNDFSYLHTNCFELSIYVGCDKYPHESQLPEEWENNRESLIVFMEQVHRGIKGLVRDSHGKGIPNAIISVEGINHDIRTGRVSLQKLSLACRRVRCAFALSSSSTMIVRPPQPYGTVPHSSPDPVTTKISPLRNF

SEQ ID NO: 3478 - protein, 756 aa, Homo sapiens
MSRPGTATPALALVLLAVTLAGVGAQGAALEDPDYYGQEIWSREPYYARPEPELETFSPPLPAGPGEEWERRPQEPRPPKRATKPKKAPKREKSAPEPPPPGKHSNKKVMRTKSSEKAANDDHSVRVAREDVRESCPPLGLETLKITDFQLHASTVKRYGLGAHRGRLNIQAGINENDFYDGAWCAGRNDLQQWIEVDARRLTRFTGVITQGRNSLWLSDWVTSYKVMVSNDSHTWVTVKNGSGDMIFEGNSEKEIPVLNELPVPMVARYIRINPQSWFDNGSICMRMEILGCPLPDPNNYYHRRNEMTTTDDLDFKHHNYKEMRQLMKVVNEMCPNITRIYNIGKSHQGLKLYAVEISDHPGEHEVGEPEFHYIAGAHGNEVLGRELLLLLVQFVCQEYLARNARIVHLVEETRIHVLPSLNPDGYEKAYEGGSELGGWSLGRWTHDGIDINNNFPDLNTLLWEAEDRQNVPRKVPNHYIAIPEWFLSENATVAAETRAVIAWMEKIPFVLGGNLQGGELVVAYPYDLVRSPWKTQEHTPTPDDHVFRWLAYSYASTHRLMTDARRRVCHTEDFQKEEGTVNGASWHTVAGSLNDFSYLHTNCFELSIYVGCDKYPHESQLPEEWENNRESLIVFMEQVHRGIKGLVRDSHGKGIPNAIISVEGINHDIRTANDGDYWRLLNPGEYVVTAKAEGFTASTKNCMVGYDMGATRCDFTLSKTNMARIREIMEKFGKQPVSLPARRLKLRGQKRRQRG

SEQ ID NO: 3479 - protein, 515 aa, Homo sapiens
MAWPYFLDCHRYFTREDEGCYDPLEKLRGGLEADEALPSGLPPTFIRFSHHSYAQMVRVLRRTASRCAHVARTYSIGRSFDGRELLVIEFSSRPGQHELMEPEVKLIGNIHGNEVAGREMLIYLAQYLCSEYLLGNPRIQRLLNTTRIHLLPSMNPDGYEVAAAEGAGYNGWTSGRQNAQNLDLNRNFPDLTSEYYRLAETRGARSDHIPIPQHYWWGKVAPETKAIMKWMQTIPFVLSASLHGGDLVVSYPFDFSKHPQEEKMFSPTPDEKMFKLLSRAYADVHPMMMDRSENRCGGNFLKRGSIINGADWYSFTGGMSDFNYLHTNCFEITVELGCVKFPPEEALYILWQHNKESLLNFVETVHRGIKGVVTDKFGKPVKNARISVKGIRHDITTAPDGDYWRLLPPGIHIVIAQAPGYAKVIKKVIIPARMKRAGRVDFILQPLGMGPKNFIHGLRRTGPHDPLGGASSLGEATEPDPLRARRQPSADGSKPWWWSYFTSLSTHRPRWLLKY

SEQ ID NO: 3480 - protein, 641 aa, Homo sapiens
MPPPLPLLLLTVLVVAAARPGCEFERNPAATCVDLQLRTCSDAAYNHTTFPNLLQHRSWEVVEASSEYILLSVLHQLLEGQCNPDLRLLGCAVLAPRCEGGWVRRPCRHICEGLREVCQPAFDAIDMAWPYFLDCHRYFTREDEGCYDPLEKLRGGLEADEALPSGLPPTFIRFSHHSYAQMVRVLRRTASRCAHVARTYSIGRSFDGRELLVIEFSSRPGQHELMEPEVKLIGNIHGNEVAGREMLIYLAQYLCSEYLLGNPRIQRLLNTTRIHLLPSMNPDGYEVAAAEGAGYNGWTSGRQNAQNLDLNRNFPDLTSEYYRLAETRGARSDHIPIPQHYWWGKVAPETKAIMKWMQTIPFVLSASLHGGDLVVSYPFDFSKHPQEEKMFSPTPDEKMFKLLSRAYADVHPMMMDRSENRCGGNFLKRGSIINGADWYSFTGGMSDFNYLHTNCFEITVELGCVKFPPEEALYILWQHNKESLLNFVETVHRGIKGVVTDKFGKPVKNARISVKGIRHDITTAPDGDYWRLLPPGIHIVIAQAPGYAKVIKKVIIPARMKRAGRVDFILQPLGMGPKNFIHGLRRTGPHDPLGGASSLGEATEPDPLRARRQPSADGSKPWWWSYFTSLSTHRPRWLLKY

SEQ ID NO: 3481 - protein, 652 aa, Homo sapiens
MPPPLPLLLLTVLVVAAARPGCEFERNPAGECHRPPAADSATCVDLQLRTCSDAAYNHTTFPNLLQHRSWEVVEASSEYILLSVLHQLLEGQCNPDLRLLGCAVLAPRCEGGWVRRPCRHICEGLREVCQPAFDAIDMAWPYFLDCHRYFTREDEGCYDPLEKLRGGLEADEALPSGLPPTFIRFSHHSYAQMVRVLRRTASRCAHVARTYSIGRSFDGRELLVIEFSSRPGQHELMEPEVKLIGNIHGNEVAGREMLIYLAQYLCSEYLLGNPRIQRLLNTTRIHLLPSMNPDGYEVAAAEGAGYNGWTSGRQNAQNLDLNRNFPDLTSEYYRLAETRGARSDHIPIPQHYWWGKVAPETKAIMKWMQTIPFVLSASLHGGDLVVSYPFDFSKHPQEEKMFSPTPDEKMFKLLSRAYADVHPMMMDRSENRCGGNFLKRGSIINGADWYSFTGGMSDFNYLHTNCFEITVELGCVKFPPEEALYILWQHNKESLLNFVETVHRGIKGVVTDKFGKPVKNARISVKGIRHDITTAPDGDYWRLLPPGIHIVIAQAPGYAKVIKKVIIPARMKRAGRVDFILQPLGMGPKNFIHGLRRTGPHDPLGGASSLGEATEPDPLRARRQPSADGSKPWWWSYFTSLSTHRPRWLLKY

SEQ ID NO: 3482 - protein, 69 aa, Homo sapiens
MPPPLPLLLLTVLVVAAARPGCEFERNPAGECHRPPAADSGTVPGPPWLLFCRRAAAPTLSEHFRQLNP

SEQ ID NO: 3483 - protein, 388 aa, Homo sapiens
IGTYLNYECRPGYSGRPFSIICLKNSVWTSAKDKCKRKSCRNPPDPVNGMAHVIKDIQFRSQIKYSCPKGYRLIGSSSATCIISGNTVIWDNKTPVCDRIICGLPPTIANGDFTSISREYFHYGSVVTYHCNLGSRGKKVFELVGEPSIYCTSKDDQVGIWSGPAPQCIIPNKCTPPNVENGILVSDNRSLFSLNEVVEFRCQPGFGMKGPSHVKCQALNKWEPELPSCSRVCQPPPDVLHAERTQRDKDNFSPGQEVFYSCEPGYDLRGSTYLHCTPQGDWSPAAPRCEVKSCDDFLGQLPNGHVLFPLNLQLGAKVDFVCDEGFQLKGSSASYCVLAGMESLWNSSVPVCERKSCETPPVPVNGMVHVITDIHVGSRINYSCTTGF

SEQ ID NO: 3484 - protein, 569 aa, Homo sapiens
MAPPVRLERPFPSRRFPGLLLAALVLLLSSFSDQCNVPEWLPFARPTNLTDDFEFPIGTYLNYECRPGYSGRPFSIICLKNSVWTSAKDKCKRKSCRNPPDPVNGMAHVIKDIQFRSQIKYSCPKGYRLIGSSSATCIISGNTVIWDNKTPVCDRIICGLPPTIANGDFTSISREYFHYGSVVTYHCNLGSRGKKVFELVGEPSIYCTSKDDQVGIWSGPAPQCIIPNKCTPPNVENGILVSDNRSLFSLNEVVEFRCQPGFGMKGPSHVKCQALNKWEPELPSCSRVCQPPPDVLHAERTQRDKDNFSPGQEVFYSCEPGYDLRGSTYLHCTPQGDWSPAAPRCEVKSCDDFLGQLPNGHVLFPLNLQLGAKVDFVCDEGFQLKGSSASYCVLAGMESLWNSSVPVCERKSCETPPVPVNGMVHVITDIHVGSRINYSCTTGHRLIGHSSAECILSGNTAHWSMKPPICQQIFCPNPPAILNGRHTGTPLGDIPYGKEVSYTCDPHPDRGMTFNLIGESTIRRTSEPHGNGVWSSPAPRCELPVGAGSHDALIVGKFYEVFAEEFCHL

SEQ ID NO: 3485 - protein, 1176 aa, Homo sapiens
MALARPGTPDPQALASVLLLLLWAPALSLLAGTVPSEPPSACASDPCAPGTECQATESGGYTCGPMEPRGCATQPCHHGALCVPQGPDPTGFRCYCVPGFQGPRCELDIDECASRPCHHGATCRNLADRYECHCPLGYAGVTCEMEVDECASAPCLHGGSCLDGVGSFRCVCAPGYGGTRCQLDLDECQSQPCAHGGTCHDLVNGFRCDCAGTGYEGTHCEREVLECASAPCEHNASCLEGLGSFRCLCWPGYSGELCEVDEDECASSPCQHGGRCLQRSDPALYGGVQAAFPGAFSFRHAAGFLCHCPPGFEGADCGVEVDECASRPCLNGGHCQDLPNGFQCHCPDGYAGPTCEEDVDECLSDPCLHGGTCSDTVAGYICRCPETWGGRDCSVQLTGCQGHTCPLAATCIPIFESGVHSYVCHCPPGTHGPFCGQNTTFSVMAGSPIQASVPAGGPLGLALRFRTTLPAGTLATRNDTKESLELALVAATLQATLWSYSTTVLVLRLPDLALNDGHWHQVEVVLHLATLELRLWHEGCPARLCVASGPVALASTASATPLPAGISSAQLGDATFAGCLQDVRVDGHLLLPEDLGENVLLGCERREQCRPLPCVHGGSCVDLWTHFRCDCARPHRGPTCADEIPAATFGLGGAPSSASFLLQELPGPNLTVSFLLRTRESAGLLLQFANDSAAGLTVFLSEGRIRAEVPGSPAVVLPGRWDDGLRHLVMLSFGPDQLQDLGQHVHVGGRLLAADSQPWGGPFRGCLQDLRLDGCHLPFFPLPLDNSSQPSELGGRQSWNLTAGCVSEDMCSPDPCFNGGTCLVTWNDFHCTCPANFTGPTCAQQLWCPGQPCLPPATCEEVPDGFVCVAEATFREGPPAAFSGHNASSGRLLGGLSLAFRTRDSEAWLLRAAAGALEGVWLAVRNGSLAGGVRGGHGLPGAVLPIPGPRVADGAWHRVRLAMERPAATTSRWLLWLDGAATPVALRGLASDLGFLQGPGAVRILLAENFTGCLGRVALGGLPLPLARPRPGAAPGAREHFASWPGTPAPILGCRGAPVCAPSPCLHDGACRDLFDAFACACGPGWEGPRCEAHVDPCHSAPCARGRCHTHPDGRFECRCPPGFGGPRCRWDGWAGGWAANAPWGYGGAEKSARSVDESLPFPGPHVLICDMRRTV

SEQ ID NO: 3486 - protein, 1285 aa, Homo sapiens
MALARPGTPDPQALASVLLLLLWAPALSLLAGTVPSEPPSACASDPCAPGTECQATESGGYTCGPMEPRGCATQPCHHGALCVPQGPDPTGFRCYCVPGFQGPRCELDIDECASRPCHHGATCRNLADRYECHCPLGYAGVTCEMEVDECASAPCLHGGSCLDGVGSFRCVCAPGYGGTRCQLDLDECQSQPCAHGGTCHDLVNGFRCDCAGTGYEGTHCEREVLECASAPCEHNASCLEGLGSFRCLCWPGYSGELCEVDEDECASSPCQHGGRCLQRSDPALYGGVQAAFPGAFSFRHAAGFLCHCPPGFEGADCGVEVDECASRPCLNGGHCQDLPNGFQCHCPDGYAGPTCEEDVDECLSDPCLHGGTCSDTVAGYICRCPETWGGRDCSVQLTGCQGHTCPLAATCIPIFESGVHSYVCHCPPGTHGPFCGQNTTFSVMAGSPIQASVPAGGPLGLALRFRTTLPAGTLATRNDTKESLELALVAATLQATLWSYSTTVLVLRLPDLALNDGHWHQVEVVLHLATLELRLWHEGCPARLCVASGPVALASTASATPLPAGISSAQLGDATFAGCLQDVRVDGHLLLPEDLGENVLLGCERREQCRPLPCVHGGSCVDLWTHFRCDCARPHRGPTCADEIPAATFGLGGAPSSASFLLQELPGPNLTVSFLLRTRESAGLLLQFANDSAAGLTVFLSEGRIRAEVPGSPAVVLPGRWDDGLRHLVMLSFGPDQLQDLGQHVHVGGRLLAADSQPWGGPFRGCLQDLRLDGCHLPFFPLPLDNSSQPSELGGRQSWNLTAGCVSEDMCSPDPCFNGGTCLVTWNDFHCTCPANFTGPTCAQQLWCPGQPCLPPATCEEVPDGFVCVAEATFREGPPAAFSGHNASSGRLLGGLSLAFRTRDSEAWLLRAAAGALEGVWLAVRNGSLAGGVRGGHGLPGAVLPIPGPRVADGAWHRVRLAMERPAATTSRWLLWLDGAATPVALRGLASDLGFLQGPGAVRILLAENFTGCLGRVALGGLPLPLARPRPGAAPGAREHFASWPGTPAPILGCRGAPVCAPSPCLHDGACRDLFDAFACACGPGWEGPRCEAHVDPCHSAPCARGRCHTHPDGRFECRCPPGFGGPRCRLPVPSKECSLNVTCLDGSPCEGGSPAANCSCLEGLAGQRCQVPTLPCEANPCLNGGTCRAAGGVSECICNARFSGQFCEVAKGLPLPLPFPLLEVAVPAACACLLLLLLGLLSGILAARKRRQSEGTYSPSQQEVAGARLEMDSVLKVPPEERLI

SEQ ID NO: 3487 - protein, 953 aa, Homo sapiens
MAMEPGALWTFLGHLWLLAGPTCEEDVDECLSDPCLHGGTCSDTVAGYICRCPETWGGRDCSVQLTGCQGHTCPLAATCIPIFESGVHSYVCHCPPGTHGPFCGQNTTFSVMAGSPIQASVPAGGPLGLALRFRTTLPAGTLATRNDTKESLELALVAATLQATLWSYSTTVLVLRLPDLALNDGHWHQVEVVLHLATLELRLWHEGCPARLCVASGPVALASTASATPLPAGISSAQLGDATFAGCLQDVRVDGHLLLPEDLGENVLLGCERREQCRPLPCVHGGSCVDLWTHFRCDCARPHRGPTCADEIPAATFGLGGAPSSASFLLQELPGPNLTVSFLLRTRESAGLLLQFANDSAAGLTVFLSEGRIRAEVPGSPAVVLPGRWDDGLRHLVMLSFGPDQLQDLGQHVHVGGRLLAADSQPWGGPFRGCLQDLRLDGCHLPFFPLPLDNSSQPSELGGRQSWNLTAGCVSEDMCSPDPCFNGGTCLVTWNDFHCTCPANFTGPTCAQQLWCPGQPCLPPATCEEVPDGFVCVAEATFREGPPAAFSGHNASSGRLLGGLSLAFRTRDSEAWLLRAAAGALEGVWLAVRNGSLAGGVRGGHGLPGAVLPIPGPRVADGAWHRVRLAMERPAATTSRWLLWLDGAATPVALRGLASDLGFLQGPGAVRILLAENFTGCLGRVALGGLPLPLARPRPGAAPGAREHFASWPGTPAPILGCRGAPVCAPSPCLHDGACRDLFDAFACACGPGWEGPRCEAHVDPCHSAPCARGRCHTHPDGRFECRCPPGFGGPRCRLPVPSKECSLNVTCLDGSPCEGGSPAANCSCLEGLAGQRCQVPTLPCEANPCLNGGTCRAAGGVSECICNARFSGQFCEVAKGLPLPLPFPLLEVAVPAACACLLLLLLGLLSGILAARKRRQSEGTYSPSQQEVAGARLEMDSVLKVPPEERLI

SEQ ID NO: 3488 - protein, 220 aa, Homo sapiens
MAGLSRGSARALLAALLASTLLALLVSPARGRGGRDHGDWDEASRLPPLPPREDAARVARFVTHVSDWGALATISTLEAVRGRPFADVLSLSDGPPGAGSGVPYFYLSPLQLSVSNLQENPYATLTMTLAQTNFCKKHGFDPQSPLCVHIMLSGTVTKVNETEMDIAKHSLFIRHPEMKTWPSSHNWFFAKLNITNIWVLDYFGGPKIVTPEEYYNVTVQ

SEQ ID NO: 3489 - protein, 290 aa, Homo sapiens
MSVRRGRRPARPGTRLSWLLCCSALLSPAAGYVIVSSVSWAVTNEVDEELDSASTEEAMPALLEDSGSIWQQSFPASAHKEDAHLRPRAGAARARPPPAPPGMFSYRREGGQTASAPPGPRLRAATARSLAHASVWGCLATVSTHKKIQGLPFGNCLPVSDGPFNNSTGIPFFYMTAKDPVVADLMKNPMASLMLPESEGEFCRKNIVDPEDPRCVQLTLTGQMIAVSPEEVEFAKQAMFSRHPGMRKWPRQYEWFFMKMRIEHIWLQKWYGGASSISREEYFKAVPRKA

SEQ ID NO: 3490 - protein, 422 aa, Homo sapiens
MAPWPPKGLVPAMLWGLSLFLNLPGPIWLQPSPPPQSSPPPQPHPCHTCRGLVDSFNKGLERTIRDNFGGGNTAWEEENLSKYKDSETRLVEVLEGVCSKSDFECHRLLELSEELVESWWFHKQQEAPDLFQWLCSDSLKLCCPAGTFGPSCLPCPGGTERPCGGYGQCEGEGTRGGSGHCDCQAGYGGEACGQCGLGYFEAERNASHLVCSACFGPCARCSGPEESNCLQCKKGWALHHLKCVDIDECGTEGANCGADQFCVNTEGSYECRDCAKACLGCMGAGPGRCKKCSPGYQQVGSKCLDVDECETEVCPGENKQCENTEGGYRCICAEGYKQMEGICVKEQIPGAFPILTDLTPETTRRWKLGSHPHSTYVKMKMQRDEATFPGLYGKQVAKLGSQSRQSDRGTRLIHSQQASSQR

SEQ ID NO: 3491 - protein, 420 aa, Homo sapiens
MAPWPPKGLVPAMLWGLSLFLNLPGPIWLQPSPPPQSSPPPQPHPCHTCRGLVDSFNKGLERTIRDNFGGGNTAWEEENLSKYKDSETRLVEVLEGVCSKSDFECHRLLELSEELVESWWFHKQQEAPDLFQWLCSDSLKLCCPAGTFGPSCLPCPGGTERPCGGYGQCEGEGTRGGSGHCDCQAGYGGEACGQCGLGYFEAERNASHLVCSACFGPCARCSGPEESNCLQCKKGWALHHLKCVDIDECGTEGANCGADQFCVNTEGSYECRDCAKACLGCMGAGPGRCKKCSPGYQQVGSKCLDVDECETEVCPGENKQCENTEGGYRCICAEGYKQMEGICVKEQIPESAGFFSEMTEDELVVLQQMFFGIIICALATLAAKGDLVFTAIFIGAVAAMTGYWLSERSDRVLEGFIKGR

SEQ ID NO: 3492 - protein, 420 aa, Homo sapiens; identical to SEQ ID NO: 3491

SEQ ID NO: 3493 - protein, 420 aa, Homo sapiens; identical to SEQ ID NO: 3491

SEQ ID NO: 3494 - protein, 101 aa, Homo sapiens
MAPWPPKGLVPAMLWGLSLFLNLPGPIWLQPSPPPQSSPPPQPHPCHTCRGLVDSFNKGLERTIRDNFGGGNTAWEEENLSKYKDSLSWGNREALRWLRAV

SEQ ID NO: 3495 - protein, 100 aa, Homo sapiens
  SITE 1: note = misc_feature - Xaa can be any naturally occurring amino acid
XPAHLSADIDECGTEGANCGADQFCVNTEGSYECRDCAKACLGCMGAGPGRCKKCSPGYQQMWMSVRQRCVRERTSSVKTPRAVIAASVPRATSRWKASV

SEQ ID NO: 3496 - protein, 229 aa, Homo sapiens
MRLPRRAALGLLPLLLLLPPAPEAAKKPTPCHRCRGLVDKFNQGMVDTAKKNFGGGNTAWEEKTLSKYESSEIRLLEILEGLCESSDFECNQMLEAQEEHLEAWWLQLKSEYPDLFEWFCVKTLKVCCSPGTYGPDCLACQGGSQRPCSGNGHCSGDGSRQGDGSCRCHMGYQGPLCTDCMDGYFSSLRNETHSICTACDESCKTCSGLTNRDCGECEVGWVLDEGACV

SEQ ID NO: 3497 - protein, 353 aa, Homo sapiens
MRLPRRAALGLLPLLLLLPPAPEAAKKPTPCHRCRGLVDKFNQGMVDTAKKNFGGGNTAWEEKTLSKYESSEIRLLEILEGLCESSDFECNQMLEAQEEHLEAWWLQLKSEYPDLFEWFCVKTLKVCCSPGTYGPDCLACQGGSQRPCSGNGHCSGDGSRQGDGSCRCHMGYQGPLCTDCMDGYFSSLRNETHSICTACDESCKTCSGLTNRDCGECEVGWVLDEGACVDVDECAAEPPPCSAAQFCKNANGSYTCEECDSSCVGCTGEGPGNCKECISGYAREHGQCADVDECSLAEKTCVRKNENCYNTPGSYVCVCPDGFEETEDACVPPAEAEATEGESPTQLPSREDL

SEQ ID NO: 3498 - protein, 321 aa, Homo sapiens
MRLPRRAALGLLPLLLLLPPAPEAAKKPTPCHRCRGLVDKFNQGMVDTAKKNFGGGNTAWEEKTLSKYESSEIRLLEILEGLCESSDFECNQMLEAQEEHLEAWWLQLKSEYPDLFEWFCVKTLKVCCSPGTYGPDCLACQGGSQRPCSGNGHCSGDGSRQGDGSCRCHMGYQGPLCTDCMDGYFSSLRNETHSICTACDESCKTCSGLTNRDCGECEVGWVLDEGACVDVDECAAEPPPCSAAQFCKNANGSYTCEDVDECSLAEKTCVRKNENCYNTPGSYVCVCPDGFEETEDACVPPAEAEATEGESPTQLPSREDL

SEQ ID NO: 3499 - protein, 325 aa, Homo sapiens
MRLPRRAALGLLPLLLLLPPAPEAAKKPTPCHRCRGLVDKFNQGMVDTAKKNFGGGNTAWEEKTLSKYESSEIRLLEILEGLCESSDFECNQMLEAQEEHLEAWWLQLKSEYPDLFEWFCVKTLKVCCSPGTYGPDCLACQGGSQRPCSGNGHCSGDGSRQGDGSCRCHMGYQGPLCTDCMDGYFSSLRNETHSICTACDESCKTCSGLTNRDCGECEVGWVLDEGACVECDSSCVGCTGEGPGNCKECISGYAREHGQCADVDECSLAEKTCVRKNENCYNTPGSYVCVCPDGFEETEDACVPPAEAEATEGESPTQLPSREDL

SEQ ID NO: 3500 - protein, 402 aa, Homo sapiens
MRLPRRAALGLLPLLLLLPPAPEAAKKPTPCHRCRGLVDKFNQGMVDTAKKNFGGGNTAWEEKTLSKYESSEIRLLEILEGLCESSDFECNQMLEAQEEHLEAWWLQLKSEYPDLFEWFCVKTLKVCCSPGTYGPDCLACQGGSQRPCSGNGHCSGDGSRQGDGSCRCHMGYQGPLCTDCMDGYFSSLRNETHSICTVRTGLSDSYPPCCLSLGCWRGVGHAWIRGRNTHTQPGYSSRVWIAAFSPACDESCKTCSGLTNRDCGECEVGWVLDEGACVDVDECAAEPPPCSAAQFCKNANGSYTCEECDSSCVGCTGEGPGNCKECISGYAREHGQCADVDECSLAEKTCVRKNENCYNTPGSYVCVCPDGFEETEDACVPPAEAEATEGESPTQLPSREDL

SEQ ID NO: 3501 - protein, 196 aa, Homo sapiens
MRLPLLVSAGVLLVALLPCPPCRALLSRGPVPGARQAPQHPQPLDFFQPPPQSEQPQQPQARPVLLRMGEEYFLRLGNLNKSPAAPLSPASSLLAGGSGSRPSPEQATANFFRVLLQQLLLPRRSLDSPAALAERGARNALGGHQEAPERERRSEEPPISLDLTFHLLREVLEMARAEQLAQQAHSNRKLMEIIGK

SEQ ID NO: 3502 - protein, 322 aa, Homo sapiens
MSPNFKLQCHFILIFLTALRGESRYLELREAADYDPFLLFSANLKRELAGEQPYRRALRCLDMLSLQGQFTFTADRPQLHCAAFFISEPEEFITIHYDQVSIDCQGGDFLKVFDGWILKGEKFPSSQDHPLPSAERYIDFCESGLSRRSIRSSQNVAMIFFRVHEPGNGFTLTIKTDPNLFPCNVISQTPNGKFTLVVPHQHRNCSFSIIYPVVIKISDLTLGHVNGLQLKKSSAGCEGIGDFVELLGGTGLDPSKMTPLADLCYPFHGPAQMKVGCDNTVVRMVSSGKHVNRVTFEYRQLEPYELENPNGNSIGEFCLSGL

SEQ ID NO: 3503 - protein, 238 aa, Homo sapiens
MSPNFKLQCHFILIFLTALRGESRYLELREAADYDPFLLFSANLKRELAGEQPYRRALRCLDMLSLQGQFTFTADRPQLHCAAFFISEPEEFITIHYDQVSIDCQGGDFLKVFDGWILKGEKFPSSQDHPLPSAERYIDFCESGLSRRSIRSSQNVAMIFFRVHEPGNGFTLTIKTDPNLFPCNVISQTPNGKFTLVVPHQHRNCSFSIIYPVVIKISDLTLGHVNGLQLKVSCLLVS

SEQ ID NO: 3504 - protein, 375 aa, Homo sapiens
MGGHPQLRLVKALLLLGLNPVSASLQDQHCESLSLASNISDNGYRECLANGSWAARVNYSECQEILNEEKKSKVHYHVAVIINYLGHCISLVALLVAFVLFLRLRSIRCLRNIIHWNLISAFILRNATWFVVQLTMSPEVHQSNVGWCRLVTAAYNYFHVTNFFWMFGEGCYLHTAIVLTYSTDRLRKWMFICIGWGVPFPIIVAWAIGKLYYDNEKCWFGKRPGVYTDYIYQGPMILVLLINFIFLFNIVRILMTKLRASTTSETIQYRKAVKATLVLLPLLGITYMLFFVNPGEDEVSRVVFIYFNSFLESFQGFFVSVFYCFLNSEVRSAIRKRWHRWQDKHSIRARVARAMSIPTSPTRVSFHSIKQSTAV

SEQ ID NO: 3505 - protein, 154 aa, Homo sapiens
MGGHPQLRLVKALLLLGLNPVSASLQDQHCESLSLASNISEKKQGALPCRSHHQLPGPLYLPGGPPGGLCPLSAAQEHPVPAKHHPLEPHLRLHPAQRHLVRGPANHEPRGPPEQRGLVQVGDSRLQLLPCDQLLLDVRRGLLPAHSHRAHLLH

SEQ ID NO: 3506 - protein, 430 aa, Homo sapiens
MGGHPQLRLVKALLLLGLNPVSASLQDQHCESLSLASNISGLQCNASVDLIGTCWPRSPAGQLVVRPCPAFFYGVRYNTTNNGYRECLANGSWAARVNYSECQEILNEEKKSKVHYHVAVIINYLGHCISLVALLVAFVLFLRLRPGCTHWGDQADGALEVGAPWSGAPFQVRRSIRCLRNIIHWNLISAFILRNATWFVVQLTMSPEVHQSNVGWCRLVTAAYNYFHVTNFFWMFGEGCYLHTAIVLTYSTDRLRKWMFICIGWGVPFPIIVAWAIGKLYYDNEKCWFGKRPGVYTDYIYQGPMILVLLINFIFLFNIVRILMTKLRASTTSETIQYRKAVKATLVLLPLLGITYMLFFVNPGEDEVSRVVFIYFNSFLESFQVRSAIRKRWHRWQDKHSIRARVARAMSIPTSPTRVSFHSIKQSTAV

SEQ ID NO: 3507 - protein, 444 aa, Homo sapiens
MGGHPQLRLVKALLLLGLNPVSASLQDQHCESLSLASNISGLQCNASVDLIGTCWPRSPAGQLVVRPCPAFFYGVRYNTTNNGYRECLANGSWAARVNYSECQEILNEEKKSKVHYHVAVIINYLGHCISLVALLVAFVLFLRLRPGCTHWGDQADGALEVGAPWSGAPFQVRRSIRCLRNIIHWNLISAFILRNATWFVVQLTMSPEVHQSNVGWCRLVTAAYNYFHVTNFFWMFGEGCYLHTAIVLTYSTDRLRKWMFICIGWGVPFPIIVAWAIGKLYYDNEKCWFGKRPGVYTDYIYQGPMILVLLINFIFLFNIVRILMTKLRASTTSETIQYRKAVKATLVLLPLLGITYMLFFVNPGEDEVSRVVFIYFNSFLESFQGFFVSVFYCFLNSEVRSAIRKRWHRWQDKHSIRARVARAMSIPTSPTRVSFHSIKQSTAV

SEQ ID NO: 3508 - protein, 415 aa, Homo sapiens
MGGHPQLRLVKALLLLGLNPVSASLQDQHCESLSLASNISGLQCNASVDLIGTCWPRSPAGQLVVRPCPAFFYGVRYNTTNNGYRECLANGSWAARVNYSECQEILNEEKKSKVHYHVAVIINYLGHCISLVALLVAFVLFLRLRSIRCLRNIIHWNLISAFILRNATWFVVQLTMSPEVHQSNVGWCRLVTAAYNYFHVTNFFWMFGEGCYLHTAIVLTYSTDRLRKWMFICIGWGVPFPIIVAWAIGKLYYDNEKCWFGKRPGVYTDYIYQGPMILVLLINFIFLFNIVRILMTKLRASTTSETIQYRKAVKATLVLLPLLGITYMLFFVNPGEDEVSRVVFIYFNSFLESFQGFFVSVFYCFLNSEVRSAIRKRWHRWQDKHSIRARVARAMSIPTSPTRVSFHSIKQSTAV

SEQ ID NO: 3509 - protein, 401 aa, Homo sapiens
MGGHPQLRLVKALLLLGLNPVSASLQDQHCESLSLASNISGLQCNASVDLIGTCWPRSPAGQLVVRPCPAFFYGVRYNTTNNGYRECLANGSWAARVNYSECQEILNEEKKSKVHYHVAVIINYLGHCISLVALLVAFVLFLRLRSIRCLRNIIHWNLISAFILRNATWFVVQLTMSPEVHQSNVGWCRLVTAAYNYFHVTNFFWMFGEGCYLHTAIVLTYSTDRLRKWMFICIGWGVPFPIIVAWAIGKLYYDNEKCWFGKRPGVYTDYIYQGPMILVLLINFIFLFNIVRILMTKLRASTTSETIQYRKAVKATLVLLPLLGITYMLFFVNPGEDEVSRVVFIYFNSFLESFQVRSAIRKRWHRWQDKHSIRARVARAMSIPTSPTRVSFHSIKQSTAV

SEQ ID NO: 3510 - protein, 145 aa, Homo sapiens
MGGHPQLRLVKALLLLGLNPVSASLQDQHCESLSLASNISGLQCNASVDLIGTCWPRSPAGQLVVRPCPAFFYGVRYNTTNNGYRECLANGSWAARVNYSECQEILNEEKKSKVHYHVAVIINYLGHCISLVALLVAFVLFLRLS

SEQ ID NO: 3511 - protein, 314 aa, Homo sapiens
MVSATIPQKKSKVHYHVAVIINYLGHCISLVALLVAFVLFLRLRSIRCLRNIIHWNLISAFILRNATWFVVQLTMSPEVHQSNVGWCRLVTAAYNYFHVTNFFWMFGEGCYLHTAIVLTYSTDRLRKWMFICIGWGVPFPIIVAWAIGKLYYDNEKCWFGKRPGVYTDYIYQGPMILVLLINFIFLFNIVRILMTKLRASTTSETIQYRKAVKATLVLLPLLGITYMLFFVNPGEDEVSRVVFIYFNSFLESFQGFFVSVFYCFLNSEVRSAIRKRWHRWQDKHSIRARVARAMSIPTSPTRVSFHSIKQSTAV

SEQ ID NO: 3512 - protein, 52 aa, Homo sapiens
  SITE 1: note = misc_feature - Xaa can be any naturally occurring amino acid
XCWFGKRPGVYTDYIYQGPMILVLLEGCESHSGAAAPPGHHLHAVLRQSRGG

SEQ ID NO: 3513 - protein, 75 aa, Homo sapiens
  SITE 1: note = misc_feature - Xaa can be any naturally occurring amino acid
XCWFGKRPGVYTDYIYQGPMILVLLINFIFLFNIVRILMTKLRASTTSETIQYRASLCLCSTVSSIVRSVLPSGR

SEQ ID NO: 3514 - protein, 93 aa, Homo sapiens
  SITE 1: note = misc_feature - Xaa can be any naturally occurring amino acid
XSLASNISGLQCNASVDLIGTCWPRSPAGQLVVRPCPAFFYGVRYNTTNNGYRECLANGSWAARVNYSECQEILNEEEPGPQAQPGRAHRGGT

SEQ ID NO: 3515 - protein, 152 aa, Homo sapiens
YGVRYNTTNNGYRECLANGSWAARVNYSECQEILNEEKKSKVHYHVAVIINYLGHCISLVALLVAFVLFLRLRSIRCLRNIIHWNLISAFILRNATWFVVQLTMSPEVHQSNVVCPSPSLWPGPLGSCTTTMRSAGLAKGLGCTPTTSTRAP

SEQ ID NO: 3516 - protein, 411 aa, Homo sapiens
MDAALLHSLLEANCSLALAEELLLDGWGPPLDPEGPYSYCNTTLDQIGTCWPRSAAGALVERPCPEYFNGVKYNTTRNAYRECLENGTWASKINYSQCEPILDDKQRKYDLHYRIALVVNYLGHCVSVAALVAAFLLFLALRSIRCLRNVIHWNLITTFILRNVMWFLLQLVDHEVHESNEVWCRCITTIFNYFVVTNFFWMFVEGCYLHTAIVMTYSTERLRKCLFLFIGWCIPFPIIVAWAIGKLYYENEQCWFGKEPGDLVDYIYQGPIILVLLINFVFLFNIVRILMTKLRASTTSETIQYRKAVKATLVLLPLLGITYMLFFVNPGEDDLSQIMFIYFNSFLQSFQGFFVSVFYCFFNGEVRSAVRKRWHRWQDHHSLRVPMARAMSIPTSPTRISFHSIKQTAAV

SEQ ID NO: 3517 - protein, 387 aa, Homo sapiens
MDAALLHSLLEANCSLALAEELLLDGWGPPLDPEGPYSYCNTTLDQIGTCWPRSAAGALVERPCPEYFNGVKYNTTRNAYRECLENGTWASKINYSQCEPILDDKQRKYDLHYRIALVVNYLGHCVSVAALVAAFLLFLALRSIRCLRNVIHWNLITTFILRNVMWFLLQLVDHEVHESNEVWCRCITTIFNYFVVTNFFWMFVEGCYLHTAIVMTYSTERLRKCLFLFIGWCIPFPIIVAWAIGKLYYENEQCWFGKEPGDLVDYIYQGPIILVLLINFVFLFNIVRILMTKLRASTTSETIQYRKAVKATLVLLPLLGITYMLFFVNPGEDDLSQIMFIYFNSFLQSFQGFFVSVFYCFFNGESWVSKEAQAAGPHGREKPEQRW

SEQ ID NO: 3518 - protein, 397 aa, Homo sapiens
MGREPWPEDRDLGFPQLFCQGPYSYCNTTLDQIGTCWPRSAAGALVERPCPEYFNGVKYNTTRNAYRECLENGTWASKINYSQCEPILDDKQRKYDLHYRIALVVNYLGHCVSVAALVAAFLLFLALRSIRCLRNVIHWNLITTFILRNVMWFLLQLVDHEVHESNEVWCRCITTIFNYFVVTNFFWMFVEGCYLHTAIVMTYSTERLRKCLFLFIGWCIPFPIIVAWAIGKLYYENEQCWFGKEPGDLVDYIYQGPIILVLLINFVFLFNIVRILMTKLRASTTSETIQYRKAVKATLVLLPLLGITYMLFFVNPGEDDLSQIMFIYFNSFLQSFQGFFVSVFYCFFNGEVRSAVRKRWHRWQDHHSLRVPMARAMSIPTSPTRISFHSIKQTAAV

SEQ ID NO: 3519 - protein, 438 aa, Homo sapiens
MRGPSGPPGLLYVPHLLLCLLCLLPPPLQYAAGQSQMPKDQPLWALLEQYCHTIMTLTNLSGPYSYCNTTLDQIGTCWPRSAAGALVERPCPEYFNGVKYNTTRNAYRECLENGTWASKINYSQCEPILDDKQRKYDLHYRIALVVNYLGHCVSVAALVAAFLLFLALRSIRCLRNVIHWNLITTFILRNVMWFLLQLVDHEVHESNEVWCRCITTIFNYFVVTNFFWMFVEGCYLHTAIVMTYSTERLRKCLFLFIGWCIPFPIIVAWAIGKLYYENEQCWFGKEPGDLVDYIYQGPIILVLLINFVFLFNIVRILMTKLRASTTSETIQYRKAVKATLVLLPLLGITYMLFFVNPGEDDLSQIMFIYFNSFLQSFQGFFVSVFYCFFNGEVRSAVRKRWHRWQDHHSLRVPMARAMSIPTSPTRISFHSIKQTAAV

SEQ ID NO: 3520 - protein, 64 aa, Homo sapiens
MRGPSGPPGLLYVPHLLLCLLCLLPPPLQYAAGQSQMPKDQPLWALLEQYCHTIMTLTNLSGWS

SEQ ID NO: 3521 - protein, 64 aa, Homo sapiens; identical to SEQ ID NO: 3520

SEQ ID NO: 3522 - protein, 99 aa, Homo sapiens
MRGPSGPPGLLYVPHLLLCLLCLLPPPLQYAAGQSQMPKDQPLWALLEQYCHTIMTLTNLSVTPGAHSHSLSARGCGTRWTRHCSTACWRPTAAWRWLK

SEQ ID NO: 3523 - protein, 178 aa, Homo sapiens
MEIKHLLFLVAAACLLPMLSMKKKSARDQFNKLVTDLPNVQEEIVNIHNALRRRVVPPASNMLKMSWSEEAAQNARIFSKYCDMTESNPLERRLPNTFCGENMHMTSYPVSWSSVIGVWYSESTSFKHGEWTTTDDDITTDHYTQIVWATSYLIGCAIASCRQQGSPRYLYVCHYCHD

SEQ ID NO: 3524 - protein, 178 aa, Homo sapiens; identical to SEQ ID NO: 3523

SEQ ID NO: 3525 - protein, 249 aa, Homo sapiens
MEIKHLLFLVAAACLLPMLSMKKKSARDQFNKLVTDLPNVQEEIVNIHNALRRRVVPPASNMLKMSWSEEAAQNARIFSKYCDMTESNPLERRLPNTFCGENMHMTSYPVSWSSVIGVWYSESTSFKHGEWTTTDDDITTDHYTQIVWATSYLIGCAIASCRQQGSPRYLYVCHYCHEGNDPETKNEPYKTGVPCEACPSNCEDKLCTNPCIYYDEYFDCDIQVHYLGCNHSTTILFCKATCLCDTEIK

SEQ ID NO: 3526 - protein, 249 aa, Homo sapiens; identical to SEQ ID NO: 3525

SEQ ID NO: 3527 - protein, 243 aa, Homo sapiens
MALLPVLFLVTVLLPSLPAEGKDPAFTALLTTQLQVQREIVNKHNELRKAVSPPASNMLKMEWSREVTTNAQRWANKCTLQHSDPEDRKTSTRCGENLYMSSDPTSWSSAIQSWYDEILDFVYGVGPKSPNAVVGHYTQLVWYSTYQVGCGIAYCPNQDSLKYYYVCQYCPAGNNMNRKNTPYQQGTPCAGCPDDCDKGLCTNSCQYQDLLSNCDSLKNTAGCEHELLKEKCKATCLCENKIY

SEQ ID NO: 3528 - protein, 243 aa, Homo sapiens; identical to SEQ ID NO: 3527

SEQ ID NO: 3529 - protein, 278 aa, Homo sapiens
MALLPVLFLVTVLLPSLPAEGKDPAFTALLTTQLQVQREIVNKHNELRKAVSPPASNMLKMEWSREVTTNAQRWANKCTLQHSDPEDRKTSTRCGENLYMSSDPTSWSSAIQSWYDEILDFVYGVGPKSPNAVVGHYTQLVWYSTYQVGCGIAYCPNQDSLKYYYVCQYCPAMKTYLNKREGINVWKCFLRLRHFQLLRGEQLLTFSGNNMNRKNTPYQQGTPCAGCPDDCDKGLCTNSCQYQDLLSNCDSLKNTAGCEHELLKEKCKATCLCENKIY

SEQ ID NO: 3530 - protein, 276 aa, Homo sapiens
MKQILHPALETTACTNHFNADPCSTGFVFPAMTLFPVLLFLVAGLLPSFPANEDKDPAFTALLTTQTQVQREIVNKHNELRRAVSPPARNMLKMEWNKEAAANAQKWANQCNYRHSNPKDRMTSLKCGENLYMSSASSSWSQAIQSWFDEYNDFDFGVGPKTPNAVVGHYTQVVWYSSYLVGCGNAYCPNQKVLKYYYVCQYCPAGNWANRLYVPYEQGAPCASCPDNCDDGLCTNGCKYEDLYSNCKSLKLTLTCKHQLVRDSCKASCNCSNSIY

SEQ ID NO: 3531 - protein, 258 aa, Homo sapiens
MKQILHPALETTAMTLFPVLLFLVAGLLPSFPANEDKDPAFTALLTTQTQVQREIVNKHNELRRAVSPPARNMLKMEWNKEAAANAQKWANQCNYRHSNPKDRMTSLKCGENLYMSSASSSWSQAIQSWFDEYNDFDFGVGPKTPNAVVGHYTQVVWYSSYLVGCGNAYCPNQKVLKYYYVCQYCPAGNWANRLYVPYEQGAPCASCPDNCDDGLCTNGCKYEDLYSNCKSLKLTLTCKHQLVRDSCKASCNCSNSIY

SEQ ID NO: 3532 - protein, 191 aa, Homo sapiens
MKQILHPALETTDPCSTGFVFPAMTLFPVLLFLVAGLLPSFPANEDKDPAFTALLTTQTQVQREIVNKHNELRRAVSPPARNMLKMEWNKEAAANAQKWANQCNYRHSNPKDRMTSLKCGENLYMSSASSSWSQAIQSWFDEYNDFDFGVGPKTPNAVVGHYTQVVWYSSYLVGCGNAYCPNQKVLKYYYV

SEQ ID NO: 3533 - protein, 268 aa, Homo sapiens
MKQILHPALETTDPCSTGFVFPAMTLFPVLLFLVAGLLPSFPANEDKDPAFTALLTTQTQVQREIVNKHNELRRAVSPPARNMLKMEWNKEAAANAQKWANQCNYRHSNPKDRMTSLKCGENLYMSSASSSWSQAIQSWFDEYNDFDFGVGPKTPNAVVGHYTQVVWYSSYLVGCGNAYCPNQKVLKYYYVCQYCPAGNWANRLYVPYEQGAPCASCPDNCDDGLCTNGCKYEDLYSNCKSLKLTLTCKHQLVRDSCKASCNCSNSIY

SEQ ID NO: 3534 - protein, 112 aa, Homo sapiens
MCTHYTQIVWATTNKIGCAVNTCRKMTVWGEVWENAVYFVCNYSPKGNWIGEAPYKNGRPCSECPPSYGGSCRNNLCYREETYTPKPETDEMNEVETAPIPEENHVWLQPRV

SEQ ID NO: 3535 - protein, 210 aa, Homo sapiens
MCTHYTQIVWATTNKIGCAVNTCRKMTVWGEVWENAVYFVCNYSPKGNWIGEAPYKNGRPCSECPPSYGGSCRNNLCYREETYTPKPETDEMNEVETAPIPEENHVWLQPRVMRPTKPKKTSAVNYMTQVVRCDTKMKDRCKGSTCNRYQCPAGCLNHKAKIFGTLFYESSSSICRAAIHYGILDDKGGLVDITRNGKVPFFVKSERHGV

SEQ ID NO: 3536 - protein, 19 aa, Homo sapiens
MSCVLGGVIPLGLLFLVCG

SEQ ID NO: 3537 - protein, 120 aa, Homo sapiens
MSCVLGGVIPLGLLFLVCGSQGYLLPNVTLLEELLSKYQHNESHSRVRRAIPREDKEEILMLHNKLRGQVQPQASNMEYMTWDDELEKSAAAWASQCIWEHGPTSLLVSIGQNLGAHWGR

SEQ ID NO: 3538 - protein, 497 aa, Homo sapiens
MSCVLGGVIPLGLLFLVCGSQGYLLPNVTLLEELLSKYQHNESHSRVRRAIPREDKEEILMLHNKLRGQVQPQASNMEYMTWDDELEKSAAAWASQCIWEHGPTSLLVSIGQNLGAHWGRYRSPGFHVQSWYDEVKDYTYPYPSECNPWCPERCSGPMCTHYTQIVWATTNKIGCAVNTCRKMTVWGEVWENAVYFVCNYSPKGNWIGEAPYKNGRPCSECPPSYGGSCRNNLCYREETYTPKPETDEMNEVETAPIPEENHVWLQPRVMRPTKPKKTSAVNYMTQVVRCDTKMKDRCKGSTCNRYQCPAGCLNHKAKIFGTLFYESSSSICRAAIHYGILDDKGGLVDITRNGKVPFFVKSERHGVQSLSKYKPSSSFMVSKVKVQDLDCYTTVAQLCPFEKPATHCPRIHCPAHCKDEPSYWAPVFGTNIYADTSSICKTAVHAGVISNESGGDVDVMPVDKKKTYVGSLRNGVQSESLGTPRDGKAFRIFAVRQ

SEQ ID NO: 3539 - protein, 449 aa, Homo sapiens
MSCVLGGVIPLGLLFLVCGSQGYLLPNVTLLEELLSKYQHNESHSRVRRAIPREDKEEILMLHNKLRGQVQPQASNMEYMTWDDELEKSAAAWASQCIWEHGPTSLLVSIGQNLGAHWGRYRSPGFHVQSWYDEVKDYTYPYPSECNPWCPERCSGPMCTHYTQIVWATTNKIGCAVNTCRKMTVWGEVWENAVYFVCNYSPKGNWIGEAPYKNGRPCSECPPSYGGSCRNNLCYREETYTPKPETDEMNEVETAPIPEENHVWLQPRVMRPTKPKKTSAVNYMTQVVRCDTKMKDRCKGSTCNRYQCPAGCLNHKAKIFGTLFYESSSSICRAAIHYGILDDKGGLVDITRNGKVPFFVKSERHGVQSLSKYKPSSSFMVSKVKVQDLDCYTTVAQLCPFEKPATHCPRIHCPAHCKDEPSYWAPVFGTNIYADVSRMHFQQLSRKAC

SEQ ID NO: 3540 - protein, 496 aa, Homo sapiens
MSCVLGGVIPLGLLFLVCGSQGYLLPNVTLLEELLSKYQHNESHSRVRRAIPREDKEEILMLHNKLRGQVQPQASNMEYMTWDDELEKSAAAWASQCIWEHGPTSLLVSIGQNLGAHWGRYRSPGFHVQSWYDEVKDYTYPYPSECNPWCPERCSGPMCTHYTQIVWATTNKIGCAVNTCRKMTVWGEVWENAVYFVCNYSPKGNWIGEAPYKNGRPCSECPPSYGGSCRNNLCYRETYTPKPETDEMNEVETAPIPEENHVWLQPRVMRPTKPKKTSAVNYMTQVVRCDTKMKDRCKGSTCNRYQCPAGCLNHKAKIFGTLFYESSSSICRAAIHYGILDDKGGLVDITRNGKVPFFVKSERHGVQSLSKYKPSSSFMVSKVKVQDLDCYTTVAQLCPFEKPATHCPRIHCPAHCKDEPSYWAPVFGTNIYADTSSICKTAVHAGVISNESGGDVDVMPVDKKKTYVGSLRNGVQSESLGTPRDGKAFRIFAVRQ

SEQ ID NO: 3541 - protein, 43 aa, Homo sapiens
  SITE 1: note = misc_feature - Xaa can be any naturally occurring amino acid
XKTAVHAGVISNESGGDVDVMPVDKKKTYVGSLRNGVQSERNM

SEQ ID NO: 3542 - protein, 422 aa, Homo sapiens
MPAGRRGPAAQSARRPPPLLPLLLLLCVLGAPRAGSGAHTAVISPQDPTLLIGSSLLATCSVHGDPPGATAEGLYWTLNGRRLPPELSRVLNASTLALALANLNGSRQRSGDNLVCHARDGSILAGSCLYVGLPPEKPVNISCWSKNMKDLTCRWTPGAHGETFLHTNYSLKYKLRWYGQDNTCEEYHTVGPHSCHIPKDLALFTPYEIWVEATNRLGSARSDVLTLDILDVVTTDPPPDVHVSRVGGLEDQLSVRWVSPPALKDFLFQAKYQIRYRVEDSVDWKVVDDVSNQTSCRLAGLKPGTVYFVQVRCNPFGIYGSKKAGIWSEWSHPTAASTPRSERPGPGGGACEPRGGEPSSGPVRRELKQFLGWLKKHAYCSNLSFRLYDQWRAWMQKSHKTRNQDEGILPSGRRGTARGPAR

SEQ ID NO: 3543 - protein, 173 aa, Homo sapiens
  SITE 1: note = misc_feature - Xaa can be any naturally occurring amino acid
XQDNTCEEYHTVGPHSCHIPKDLALFTPYEIWVEATNRLGSARSDVLTLDILDVVTTDPPPDVHVSRVGGLEDQLSVRWVSPPALKDFLFQAKYQIRYRVEDSVDWKVVDDVSNQTSCRLAGLKPGTVYFVQVRCNPFGIYGSKKAGIWKRPGPGGGACEPRGGEPSSGPVRR

SEQ ID NO: 3544 - protein, 102 aa, Homo sapiens
MEKLLCFLVLTSLSHAFGQTDMSRKAFVFPKESDTSYVSLKAPLTKPLKAFTVCLHFYTELSSTHEINTIYLGGPFSPNVLNWRALKYEVQGEVFTKPQLWP

SEQ ID NO: 3545 - protein, 102 aa, Homo sapiens; identical to SEQ ID NO: 3544

SEQ ID NO: 3546 - protein, 91 aa, Homo sapiens
MEKLLCFLVLTSLSHAFGQTDMSRKAFVFPKESDTSYVSLKAPLTKPLKAFTVCLHFYTELSSTRGPNVLNWRALKYEVQGEVFTKPQLWP

SEQ ID NO: 3547 - protein, 224 aa, Homo sapiens
MEKLLCFLVLTSLSHAFGQTDMSRKAFVFPKESDTSYVSLKAPLTKPLKAFTVCLHFYTELSSTRGYSIFSYATKRQDNEILIFWSKDIGYSFTVGGSEILFEVPEVTVAPVHICTSWESASGIVEFWVDGKPRVRKSLKKGYTVGAEASIILGQEQDSFGGNFEGSQSLVGDIGNVNMWDFVLSPDEINTIYLGGPFSPNVLNWRALKYEVQGEVFTKPQLWP

SEQ ID NO: 3548 - protein, 46 aa, Homo sapiens
MWDFVLSPDEINTIYLGGPFSPNVLNWRALKYEVQGEVFTKPQLWP

SEQ ID NO: 3549 - protein, 645 aa, Homo sapiens
MAPSADPGMSRMLPFLLLLWFLPITEGSQRAEPMFTAVTNSVLPPDYDSNPTQLNYGVAVTDVDHDGDFEIVVAGYNGPNLVLKYDRAQKRLVNIAVDERSSPYYALRDRQGNAIGVTACDIDGDGREEIYFLNTNNAFSGVATYTDKLFKFRNNRWEDILSDEVNVARGVASLFAGRSVACVDRKGSGRYSIYIANYAYGNVGPDALIEMDPEASDLSRGILALRDVAAEAGVSKYTGGRGVSVGPILSSSASDIFCDNENGPNFLFHNRGDGTFVDAAASAGVDDPHQHGRGVALADFNRDGKVDIVYGNWNGPHRLYLQMSTHGKVRFRDIASPKFSMPSPVRTVITADFDNDQELEIFFNNIAYRSSSANRLFRVIRREHGDPLIEELNPGDALEPEGRGTGGVVTDFDGDGMLDLILSHGESMAQPLSVFRGNQGFNNNWLRVVPRTRFGAFARGAKVVLYTKKSGAHLRIIDGGSGYLCEMEPVAHFGLGKDEASSVEVTWPDGKMVSRNVASGEMNSVLEILYPRDEDTLQDPAPLECGQGFSQQENGHCMDTNECIQFPFVCPRDKPVCVNTYGSYRCRTNKKCSRGYEPNEDGTACVAQVAFLGGYSSAASRISEPLSRASYLSLGLGLCLQLYAL

SEQ ID NO: 3550 - protein, 661 aa, Homo sapiens
MAPSADPGMSRMLPFLLLLWFLPITEGSQRAEPMFTAVTNSVLPPDYDSNPTQLNYGVAVTDVDHDGDFEIVVAGYNGPNLVLKYDRAQKRLVNIAVDERSSPYYALRDRQGNAIGVTACDIDGDGREEIYFLNTNNAFSGVATYTDKLFKFRNNRWEDILSDEVNVARGVASLFAGRSVACVDRKGSGRYSIYIANYAYGNVGPDALIEMDPEASDLSRGILALRDVAAEAGVSKYTGGRGVSVGPILSSSASDIFCDNENGPNFLFHNRGDGTFVDAAASAGVDDPHQHGRGVALADFNRDGKVDIVYGNWNGPHRLYLQMSTHGKVRFRDIASPKFSMPSPVRTVITADFDNDQELEIFFNNIAYRSSSANRLFRVIRREHGDPLIEELNPGDALEPEGRGTGGVVTDFDGDGMLDLILSHGESMAQPLSVFRGNQGFNNNWLRVVPRTRFGAFARGAKVVLYTKKSGAHLRIIDGGSGYLCEMEPVAHFGLGKDEASSVEVTWPDGKMVSRNVASGEMNSVLEILYPRDEDTLQDPAPLECGQGFSQQENGHCMDTNECIQFPFVCPRDKPVCVNTYGSYRCRTNKKCSRGYEPNEDGTACVGTLGQSPGPRPTTPTAAAATAAAAAAAGAATAAPVLVDGDLNLGSVVKESCEPSC

SEQ ID NO: 3551 - protein, 637 aa, Homo sapiens
MSRMLPFLLLLWFLPITEGSQRAEPMFTAVTNSVLPPDYDSNPTQLNYGVAVTDVDHDGDFEIVVAGYNGPNLVLKYDRAQKRLVNIAVDERSSPYYALRDRQGNAIGVTACDIDGDGREEIYFLNTNNAFSGVATYTDKLFKFRNNRWEDILSDEVNVARGVASLFAGRSVACVDRKGSGRYSIYIANYAYGNVGPDALIEMDPEASDLSRGILALRDVAAEAGVSKYTGGRGVSVGPILSSSASDIFCDNENGPNFLFHNRGDGTFVDAAASAGVDDPHQHGRGVALADFNRDGKVDIVYGNWNGPHRLYLQMSTHGKVRFRDIASPKFSMPSPVRTVITADFDNDQELEIFFNNIAYRSSSANRLFRVIRREHGDPLIEELNPGDALEPEGRGTGGVVTDFDGDGMLDLILSHGESMAQPLSVFRGNQGFNNNWLRVVPRTRFGAFARGAKVVLYTKKSGAHLRIIDGGSGYLCEMEPVAHFGLGKDEASSVEVTWPDGKMVSRNVASGEMNSVLEILYPRDEDTLQDPAPLECGQGFSQQENGHCMDTNECIQFPFVCPRDKPVCVNTYGSYRCRTNKKCSRGYEPNEDGTACVAQVAFLGGYSSAASRISEPLSRASYLSLGLGLCLQLYAL

SEQ ID NO: 3552 - protein, 79 aa, Homo sapiens
  SITE 1: note = misc_feature - Xaa can be any naturally occurring amino acid
XDEDTLQDPAPLETPMNASSSHSCALETSPYVSTPMEATGAGPTRSAVGATSPTRMAQPAWKEPCYLVSAISLENRMLL

SEQ ID NO: 3553 - protein, 524 aa, Homo sapiens
YALRDRQGNAIGVTACDIDGDGREEIYFLNTNNAFSGVATYTDKLFKFRNNRWEDILSDEVNVARGVASLFAGRSVACVDRKGSGRYSIYIANYAYGNVGPDALIEMDPEASDLSRGILALRDVAAEAGVSKYTGGRGVSVGPILSSSASDIFCDNENGPNFLFHNRGDGTFVDAAASAGVDDPHQHGRGVALADFNRDGKVDIVYGNWNGPHRLYLQMSTHGKVRFRDIASPKFSMPSPVRTVITADFDNDQELEIFFNNIAYRSSSANRLFRVIRREHGDPLIEELNPGDALEPEGRGTGGVVTDFDGDGMLDLILSHGESMAQPLSVFRGNQGFNNNWLRVVPRTRFGAFARGAKVVLYTKKSGAHLRIIDGGSGYLCEMEPVAHFGLGKDEASSVEVTWPDGKMVSRNVASGEMNSVLEILYPRDEDTLQDPAPLETPMNASSSHSCALETSPYVSTPMEATGAGPTRSAVGATSPTRMAQPAWGLSASHRAPAPPPPPLLLPLPLLLPLLELPLLHRSS

SEQ ID NO: 3554 - protein, 401 aa, Homo sapiens
MEPGRRGAAALLALLCVACALRAGRAQYERYSFRSFPRDELMPLESAYRHALDKYSGEHWAESVGYLEISLRLHRLLRDSEAFCHRNCSAAPQPEPAAGLASYPELRLFGGLLRRAHCLKRCKQGLPAFRQSQPSREVLADFQRREPYKFLQFAYFKANNLPKAIAAAHTFLLKHPDDEMMKRNMAYYKSLPGAEDYIKDLETKSYESLFIRAVRAYNGENWRTSITDMELALPDFFKAFYECLAACEGSREIKDFKDFYLSIADHYVEVLECKIQCEENLTPVIGGYPVEKFVATMYHYLQFAYYKLNDLKNAAPCAVSYLLFDQNDKVMQQNLVYYQYHRDTWGLSDEHFQPRPEAVQFFNVTTLQKELYDFAKENIMDDDEGEVVEYVDDLLELEETS

SEQ ID NO: 3555 - protein, 358 aa, Homo sapiens
MEPGRRGAAALLALLCVACALRAGRAQYERYSFRSFPRDELMPLESAYRHALDKYSGEHWAESVGYLEISLRLHRLLRDSEAFCHRNCSAAPQPEPAAGLASYPELRLFGGLLRRAHCLKRCKQGLPAFRQSQPSREVLADFQRREPYKFLQFAYFKANNLPKAIAAAHTFLLKHPDDEMMKRNMAYYKSLPGAEDYIKDLETKSYESLFIRAVRAYNGENWRTSITDMELALPDFFKAFYECLAACEGSREIKDFKDFYLSIAVNDLKNAAPCAVSYLLFDQNDKVMQQNLVYYQYHRDTWGLSDEHFQPRPEAVQFFNVTTLQKELYDFAKENIMDDDEGEVVEYVDDLLELEETS

SEQ ID NO: 3556 - protein, 593 aa, Homo sapiens
MAATVATAAAVAPAPAPGTDSASSVHWFRKGLRLHDNPALLAAVRGARCVRCVYILDPWFAASSSVGINRWRFLLQSLEDLDTSLRKLNSRLFVVRGQPADVFPRLFKEWGVTRLTFEYDSEPFGKERDAAIMKMAKEAGVEVVTENSHTLYDLDRIIELNGQKPPLTYKRFQAIISRMELPKKPVGLVTSQQMESCRAEIQENHDETYGVPSLEELGFPTEGLGPAVWQGGETEALARLDKHLERKAWVANYERPRMNANSLLASPTGLSPYLRFGCLSCRLFYYRLWDLYKKVKRNSTPPLSLFGQLLWREFFYTAATNNPRFDRMEGNPICIQIPWDRNPEALAKWAEGKTGFPWIDAIMTQLRQEGWIHHLARHAVACFLTRGDLWVSWESGVRVFDELLLDADFSVNAGSWMWLSCSAFFQQFFHCYCPVGFGRRTDPSGDYIRRYLPKLKAFPSRYIYEPWNAPESIQKAAKCIIGVDYPRPIVNHAETSRLNIERMKQIYQQLSRYRGLCLLASVPSCVEDLSHPVAEPSSSQAGSMSSAGPRPLPSGPASPKRKLEAAEEPPGEELSKRARVAELPTPELPSKDA

SEQ ID NO: 3557 - protein, 614 aa, Homo sapiens
MGGVHVAYRGGAGVAGAVWTVMAATVATAAAVAPAPAPGTDSASSVHWFRKGLRLHDNPALLAAVRGARCVRCVYILDPWFAASSSVGINRWRFLLQSLEDLDTSLRKLNSRLFVVRGQPADVFPRLFKEWGVTRLTFEYDSEPFGKERDAAIMKMAKEAGVEVVTENSHTLYDLDRIIELNGQKPPLTYKRFQAIISRMELPKKPVGLVTSQQMESCRAEIQENHDETYGVPSLEELGFPTEGLGPAVWQGGETEALARLDKHLERKAWVANYERPRMNANSLLASPTGLSPYLRFGCLSCRLFYYRLWDLYKKVKRNSTPPLSLFGQLLWREFFYTAATNNPRFDRMEGNPICIQIPWDRNPEALAKWAEGKTGFPWIDAIMTQLRQEGWIHHLARHAVACFLTRGDLWVSWESGVRVFDELLLDADFSVNAGSWMWLSCSAFFQQFFHCYCPVGFGRRTDPSGDYIRRYLPKLKAFPSRYIYEPWNAPESIQKAAKCIIGVDYPRPIVNHAETSRLNIERMKQIYQQLSRYRGLCLLASVPSCVEDLSHPVAEPSSSQAGSMSSAGPRPLPSGPASPKRKLEAAEEPPGEELSKRARVAELPTPELPSKDA

SEQ ID NO: 3558 - protein, 614 aa, Homo sapiens; identical to SEQ ID NO: 3557

SEQ ID NO: 3559 - protein, 532 aa, Homo sapiens
MPAPPGRTHTWFLLQSLEDLDTSLRKLNSRLFVVRGQPADVFPRLFKEWGVTRLTFEYDSEPFGKERDAAIMKMAKEAGVEVVTENSHTLYDLDRIIELNGQKPPLTYKRFQAIISRMELPKKPVGLVTSQQMESCRAEIQENHDETYGVPSLEELGFPTEGLGPAVWQGGETEALARLDKHLERKAWVANYERPRMNANSLLASPTGLSPYLRFGCLSCRLFYYRLWDLYKKVKRNSTPPLSLFGQLLWREFFYTAATNNPRFDRMEGNPICIQIPWDRNPEALAKWAEGKTGFPWIDAIMTQLRQEGWIHHLARHAVACFLTRGDLWVSWESGVRVFDELLLDADFSVNAGSWMWLSCSAFFQQFFHCYCPVGFGRRTDPSGDYIRRYLPKLKAFPSRYIYEPWNAPESIQKAAKCIIGVDYPRPIVNHAETSRLNIERMKQIYQQLSRYRGLCLLASVPSCVEDLSHPVAEPSSSQAGSMSSAGPRPLPSGPASPKRKLEAAEEPPGEELSKRARVAELPTPELPSKDA

SEQ ID NO: 3560 - protein, 142 aa, Homo sapiens
IQKGTSVSQKVCEWKEPEELKQLLDLELRSQGESQKQILERCRAVIRYSVKTGHPRFFNQLFSGLDPHALAGRIITESLNTSQYTYEIAPVFVLMEEEVLRKLRALVGWSSGDGIFCPVSLLHPEGSCVSGTWHRQCPSGQG

SEQ ID NO: 3561 - protein, 135 aa, Homo sapiens
MADSEALPSLAGDPVAVEALLRAVFGVVVDEAIQKGTSVSQKCHYSIQKGAAFLGLGTDSVRVVKADERGKMVPEDLERQIGMAEAEGAVPFLVSATSGTTVLGAFDPLEAIADVCQRHGLWLHVDAAWGGSVLL

SEQ ID NO: 3562 - protein, 346 aa, Homo sapiens
MADSEALPSLAGDPVAVEALLRAVFGVVVDEAIQKGTSVSQKCHYSIQKGAAFLGLGTDSVRVVKADERGKMVPEDLERQIGMAEAEGAVPFLVSATSGTTVLGAFDPLEAIADVCQRHGLWLHVDAAWGGSVLLSQTHRHLLDGIQRADSVAWNPHKLLAAGLQCSALLLQDTSNLLKRCHGSQASYLFQQDKFYDVALDTGDKVVQCGRRVDCLKLWLMWKAQGDQGLERRIDQAFVLARYLVEEMKKREGFELVMEPEFVNVCFWFVPPSLRGKQESPDYHERLSKVAPVLKERMVKEGSMMIGYQPHGTRGNFFRVVVANSALTCADMDFLLNELERLGQDL

SEQ ID NO: 3563 - protein, 129 aa, Homo sapiens
MADSEALPSLAGDPVAVEALLRAVFGVVVDEAIQKGTSVSQKVCEWKEPEELKQLLDLELRSQGESQKQILERCRAVIRYSVKTGHPRFFNQLFSGLDPHALAGRIITESLNTSQYTYEIAPVFVLMEE

SEQ ID NO: 3564 - protein, 146 aa, Homo sapiens
MADSEALPSLAGDPVAVEALLRAVFGVVVDEAIQKGTSVSQKVCEWKEPEELKQLLDLELRSQGESQKQILERCRAVIRYSVKTGHPRFFNQLFSGLDPHALAGRIITESLNTSQYTYEIAPVFVLMEEEVLRKLRALVGWSSGDG

SEQ ID NO: 3565 - protein, 163 aa, Homo sapiens
MADSEALPSLAGDPVAVEALLRAVFGVVVDEAIQKGTSVSQKVCEWKEPEELKQLLDLELRSQGESQKQILERCRAVIRYSVKTGHPRFFNQLFSGLDPHALAGRIITESLNTSQYTYEIAPVFVLMEEEVLRKLRALVGWSSGDGIFCPGGSISNMYAVNLA

SEQ ID NO: 3566 - protein, 493 aa, Homo sapiens
MADSEALPSLAGDPVAVEALLRAVFGVVVDEAIQKGTSVSQKVCEWKEPEELKQLLDLELRSQGESQKQILERCRAVIRYSVKTGHPRFFNQLFSGLDPHALAGRIITESLNTSQYTYEIAPVFVLMEEEVLRKLRALVGWSSGDGIFCPGGSISNMYAVNLARYQRYPDCKQRGLRTLPPLALFTSKECHYSIQKGAAFLGLGTDSVRVVKADERGKMVPEDLERQIGMAEAEGAVPFLVSATSGTTVLGAFDPLEAIADVCQRHGLWLHVDAAWGGSVLLSQTHRHLLDGIQRADSVAWNPHKLLAAGLQCSALLLQDTSNLLKRCHGSQASYLFQQDKFYDVALDTGDKVVQCGRRVDCLKLWLMWKAQGDQGLERRIDQAFVLARYLVEEMKKREGFELVMEPEFVNVCFWFVPPSLRGKQESPDYHERLSKVAPVLKERMVKEGSMMIGYQPHGTRGNFFRVVVANSALTCADMDFLLNELERLGQDL

SEQ ID NO: 3567 - protein, 493 aa, Homo sapiens; identical to SEQ ID NO: 3566

SEQ ID NO: 3568 - protein, 267 aa, Homo sapiens
MADSEALPSLAGDPVAVEALLRAVFGVVVDEAIQKGTSVSQKVCEWKEPEELKQLLDLELRSQGESQKQILERCRAVIRYSVKTGHPRFFNQLFSGLDPHALAGRIITESLNTSQYTYEIAPVFVLMEEEVLRKLRALVGWSSGDGIFCPGGSISNMYAVNLARYQRYPDCKQRGLRTLPPLALFTSKEVGKRHRPNPGLLILISSHVTTPSRRELRFWDLAPTVSEWSRLMREGKWSPRIWRGRLVWPRLRVLCRSWSVPPLAPLC

SEQ ID NO: 3569 - protein, 267 aa, Homo sapiens; identical to SEQ ID NO: 3568

SEQ ID NO: 3570 - protein, 45 aa, Homo sapiens
MADSEALPSLAGDPVAVEALLRAVFGVVVDEAIQKGTSVSQKVHI

SEQ ID NO: 3571 - protein, 520 aa, Homo sapiens
MSIPLKSSFLLSYLCTLPPALLSREILMADSEALPSLAGDPVAVEALLRAVFGVVVDEAIQKGTSVSQKVCEWKEPEELKQLLDLELRSQGESQKQILERCRAVIRYSVKTGHPRFFNQLFSGLDPHALAGRIITESLNTSQYTYEIAPVFVLMEEEVLRKLRALVGWSSGDGIFCPGGSISNMYAVNLARYQRYPDCKQRGLRTLPPLALFTSKECHYSIQKGAAFLGLGTDSVRVVKADERGKMVPEDLERQIGMAEAEGAVPFLVSATSGTTVLGAFDPLEAIADVCQRHGLWLHVDAAWGGSVLLSQTHRHLLDGIQRADSVAWNPHKLLAAGLQCSALLLQDTSNLLKRCHGSQASYLFQQDKFYDVALDTGDKVVQCGRRVDCLKLWLMWKAQGDQGLERRIDQAFVLARYLVEEMKKREGFELVMEPEFVNVCFWFVPPSLRGKQESPDYHERLSKVAPVLKERMVKEGSMMIGYQPHGTRGNFFRVVVANSALTCADMDFLLNELERLGQDL

SEQ ID NO: 3572 - protein, 519 aa, Homo sapiens
  SITE 1: note = misc_feature - Xaa can be any naturally occurring amino acid
XLGDARRGAAGYLCTLPPALLSREILMADSEALPSLAGDPVAVEALLRAVFGVVVDEAIQKGTSVSQKVCEWKEPEELKQLLDLELRSQGESQKQILERCRAVIRYSVKTGHPRFFNQLFSGLDPHALAGRIITESLNTSQYTYEIAPVFVLMEEEVLRKLRALVGWSSGDGIFCPGGSISNMYAVNLARYQRYPDCKQRGLRTLPPLALFTSKECHYSIQKGAAFLGLGTDSVRVVKADERGKMVPEDLERQIGMAEAEGAVPFLVSATSGTTVLGAFDPLEAIADVCQRHGLWLHVDAAWGGSVLLSQTHRHLLDGIQRADSVAWNPHKLLAAGLQCSALLLQDTSNLLKRCHGSQASYLFQQDKFYDVALDTGDKVVQCGRRVDCLKLWLMWKAQGDQGLERRIDQAFVLARYLVEEMKKREGFELVMEPEFVNVCFWFVPPSLRGKQESPDYHERLSKVAPVLKERMVKEGSMMIGYQPHGTRGNFFRVVVANSALTCADMDFLLNELERLGQDL

SEQ ID NO: 3573 - protein, 150 aa, Homo sapiens
MGWGRLQRISLPSQCLSLLSTWLGSLLLLVCLLASRSITEEVSEYCSHMIGSGHLQSLQRLIDSQMETSCQITFEFVDQEQLKDPVCYLKKAFLLVQDIMEDTMRFRDNTPNAIAIVQLQELSLRLKSCFTKDYEEHDKACVRTFYETPL

SEQ ID NO: 3574 - protein, 113 aa, Homo sapiens
MIGSGHLQSLQRLIDSQMETSCQITFEFVDQEQLKDPVCYLKKAFLLVQDIMEDTMRFRDNTPNAIAIVQLQELSLRLKSCFTKDYEEHDKACVRTFYETPLQLLEKVKNVFN

SEQ ID NO: 3575 - protein, 285 aa, Homo sapiens
MTAPGAAGRCPPTIDSQMETSCQITFEFVDQEQLKDPVCYLKKAFLLVQDIMEDTMRFRDNTPNAIAIVQLQELSLRLKSCFTKDYEEHDKACVRTFYETPLQLLEKVKNVFNETKNLLDKDWNIFSKNCNNSFAECSSQDVVTKPDCNCLYPKAIPSSDPASVSPHQPLAPSMAPVAGLTWEDSEGTEGSSLLPGEQPLHTVDPGSAKQRPPRSTCQSFEPPETPVVKDSTIGGSPQPRPSVGAFNPGMEDILDSAMGTNWVPEEASGEASEIPVPQGTELSPS

SEQ ID NO: 3576 - protein, 119 aa, Homo sapiens
MTAPGAAGRCPPTTWLGSLLLLVCLLASRSITEEVSEYCSHMIGSGHLQSLQRLIDSQMETSCQITFEFVDQEQLKDPVCYLKKAFLLVQDIMEDTMRFRDNTPNAIAIVQLQELSLRL

SEQ ID NO: 3577 - protein, 554 aa, Homo sapiens
MTAPGAAGRCPPTTWLGSLLLLVCLLASRSITEEVSEYCSHMIGSGHLQSLQRLIDSQMETSCQITFEFVDQEQLKDPVCYLKKAFLLVQDIMEDTMRFRDNTPNAIAIVQLQELSLRLKSCFTKDYEEHDKACVRTFYETPLQLLEKVKNVFNETKNLLDKDWNIFSKNCNNSFAECSSQDVVTKPDCNCLYPKAIPSSDPASVSPHQPLAPSMAPVAGLTWEDSEGTEGSSLLPGEQPLHTVDPGSAKQRPPRSTCQSFEPPETPVVKDSTIGGSPQPRPSVGAFNPGMEDILDSAMGTNWVPEEASGEASEIPVPQGTELSPSRPGGGSMQTEPARPSNFLSASSPLPASAKGQQPADVTGTALPRVGPVRPTGQDWNHTPQKTDHPSALLRDPPEPGSPRISSLRPQGLSNPSTLSAQPQLSRSHSSGSVLPLGELEGRRSTRDRRSPAEPEGGPASEGAARPLPRFNSVPLTDTGHERQSEGSFSPQLQESVFHLLVPSVILVLLAVGGLLFYRWRRRSHQEPQRADSPLEQPEGSPLTQDDRQVELPV

SEQ ID NO: 3578 - protein, 554 aa, Homo sapiens; identical to SEQ ID NO: 3577

SEQ ID NO: 3579 - protein, 438 aa, Homo sapiens
MTAPGAAGRCPPTTWLGSLLLLVCLLASRSITEEVSEYCSHMIGSGHLQSLQRLIDSQMETSCQITFEFVDQEQLKDPVCYLKKAFLLVQDIMEDTMRFRDNTPNAIAIVQLQELSLRLKSCFTKDYEEHDKACVRTFYETPLQLLEKVKNVFNETKNLLDKDWNIFSKNCNNSFAECSSQDVVTKPDCNCLYPKAIPSSDPASVSPHQPLAPSMAPVAGLTWEDSEGTEGSSLLPGEQPLHTVDPGSAKQRPPRSTCQSFEPPETPVVKDSTIGGSPQPRPSVGAFNPGMEDILDSAMGTNWVPEEASGEASEIPVPQGTELSPSRPGGGSMQTEPARPSNFLSASSPLPASAKGQQPADVTGHERQSEGSFSPQLQESVFHLLVPSVILVLLAVGGLLFYRWRRRSHQEPQRADSPLEQPEGSPLTQDDRQVELPV

SEQ ID NO: 3580 - protein, 256 aa, Homo sapiens
MTAPGAAGRCPPTTWLGSLLLLVCLLASRSITEEVSEYCSHMIGSGHLQSLQRLIDSQMETSCQITFEFVDQEQLKDPVCYLKKAFLLVQDIMEDTMRFRDNTPNAIAIVQLQELSLRLKSCFTKDYEEHDKACVRTFYETPLQLLEKVKNVFNETKNLLDKDWNIFSKNCNNSFAECSSQGHERQSEGSFSPQLQESVFHLLVPSVILVLLAVGGLLFYRWRRRSHQEPQRADSPLEQPEGSPLTQDDRQVELPV

SEQ ID NO: 3581 - protein, 64 aa, Homo sapiens
AGSPWALGQRPFGAQGLKGPVCVAATAHADEKEALMSELKIMSHLGQHENIVNLLGACTHGGIS

SEQ ID NO: 3582 - protein, 972 aa, Homo sapiens
MGPGVLLLLLVATAWHGQGIPVIEPSVPELVVKPGATVTLRCVGNGSVEWDGPPSPHWTLYSDGSSSILSTNNATFQNTGTYRCTEPGDPLGGSAAIHLYVKDPARPWNVLAQEVVVFEDQDALLPCLLTDPVLEAGVSLVRVRGRPLMRHTNYSFSPWHGFTIHRAKFIQSQDYQCSALMGGRKVMSISIRLKVQKVIPGPPALTLVPAELVRIRGEAAQIVCSASSVDVNFDVFLQHNNTKLAIPQQSDFHNNRYQKVLTLNLDQVDFQHAGNYSCVASNVQGKHSTSMFFRVVESAYLNLSSEQNLIQEVTVGEGLNLKVMVEAYPGLQGFNWTYLGPFSDHQPEPKLANATTKDTYRHTFTLSLPRLKPSEAGRYSFLARNPGGWRALTFELTLRYPPEVSVIWTFINGSGTLLCAASGYPQPNVTWLQCSGHTDRCDEAQVLQVWDDPYPEVLSQEPFHKVTVQSLLTVETLEHNQTYECRAHNSVGSGSWAFIPISAGAHTHPPDEFLFTPVVVACMSIMALLLLLLLLLLYKYKQKPKYQVRWKIIESYEGNSYTFIDPTQLPYNEKWEFPRNNLQFGKTLGAGAFGKVVEATAFGLGKEDAVLKVAVKMLKSTAHADEKEALMSELKIMSHLGQHENIVNLLGACTHGGPVLVITEYCCYGDLLNFLRRKAEAMLGPSLSPGQDPEGGVDYKNIHLEKKYVRRDSGFSSQGVDTYVEMRPVSTSSNDSFSEQDLDKEDGRPLELRDLLHFSSQVAQGMAFLASKNCIHRDVAARNVLLTNGHVAKIGDFGLARDIMNDSNYIVKGNARLPVKWMAPESIFDCVYTVQSDVWSYGILLWEIFSLGLNPYPGILVNSKFYKLVKDGYQMAQPAFAPKNIYSIMQACWALEPTHRPTFQQICSFLQEQAQEDRRERDYTNLPSSSRSGGSGSSSSELEEESSSEHLTCCEQGDIAQPLLQPNNYQFC

SEQ ID NO: 3583 - protein, 671 aa, Homo sapiens
MGPGVLLLLLVATAWHGQGIPVIEPSVPELVVKPGATVTLRCVGNGSVEWDGPPSPHWTLYSDGSSSILSTNNATFQNTGTYRCTEPGDPLGGSAAIHLYVKDPARPWNVLAQEVVVFEDQDALLPCLLTDPVLEAGVSLVRVRGRPLMRHTNYSFSPWHGFTIHRAKFIQSQDYQCSALMGGRKVMSISIRLKVQKVIPGPPALTLVPAELVRIRGEAAQIVCSASSVDVNFDVFLQHNNTKLAIPQQSDFHNNRYQKVLTLNLDQVDFQHAGNYSCVASNVQGKHSTSMFFRVVESAYLNLSSEQNLIQEVTVGEGLNLKVMVEAYPGLQGFNWTYLGPFSDHQPEPKLANATTKDTYRHTFTLSLPRLKPSEAGRYSFLARNPGGWRALTFELTLRYPPEVSVIWTFINGSGTLLCAASGYPQPNVTWLQCSGHTDRCDEAQVLQVWDDPYPEVLSQEPFHKVTVQSLLTVETLEHNQTYECRAHNSVGSGSWAFIPISAGAHTHPPDEFLFTPVVVACMSIMALLLLLLLLLLYKYKQKPKYQVRWKIIESYEGNSYTFIDPTQLPYNEKWEFPRNNLQFGKTLGAGAFGKVVEATAFGLGKEDAVLKVAVKMLKSTAHADEKEALMSELKIMSHLGQHENIVNLLGACTHGGTVASPARVWTPMWR

SEQ ID NO: 3584 - protein, 306 aa, Homo sapiens
MGPGVLLLLLVATAWHGQGIPVIEPSVPELVVKPGATVTLRCVGNGSVEWDGPPSPHWTLYSDGSSSILSTNNATFQNTGTYRCTEPGDPLGGSAAIHLYVKDPARPWNVLAQEVVVFEDQDALLPCLLTDPVLEAGVSLVRVRGRPLMRHTNYSFSPWHGFTIHRAKFIQSQDYQCSALMGGRKVMSISIRLKVQKVIPGPPALTLVPAELVRIRGEAAQIVCSASSVDVNFDVFLQHNNTKLAIPQQSDFHNNRYQKVLTLNLDQVDFQHAGNYSCVASNVQGKHSTSMFFRVVGTPSPSLCPA

SEQ ID NO: 3585 - protein, 49 aa, Homo sapiens
MRHTNYSFSPWHGFTIHRAKFIQSQDYQCSALMGGRKVMSISIRLKVQK

SEQ ID NO: 3586 - protein, 144 aa, Homo sapiens
MWLQSLLLLGTVACSISAPARSPSPSTQPWEHVNAIQEARRLLNLSRDTAAEMNETVEVISEMFDLQEPTCLQTRLELYKQGLRGSLTKLKGPLTMMASHYKQHCPPTPETSCATQIITFESFKENLKDFLLVIPFDCWEPVQE

SEQ ID NO: 3587 - protein, 238 aa, Homo sapiens
MLLLVTSLLLCELPHPAFLLIPEKSDLRTVAPASSLNVRFDSRTMNLSWDCQENTTFSKCFLTDKKNRVVEPRLSNNECSCTFREICLHEGVTFEVHVNTSQRGFQQKLLYPNSGREGTAAQNFSCFIYNADLMNCTWARGPTAPRDVQYFLYIRNSKRRREIRCPYYIQDSGTHVGCHLDNLSGLTSRNYFLVNGTSREIGIQFFDSLLDTKKIERFNPPSNVTVRCNTTHCLVRWK

SEQ ID NO: 3588 - protein, 377 aa, Homo sapiens
MLLLVTSLLLCELPHPAFLLIPEKSDLRTVAPASSLNVRFDSRTMNLSWDCQENTTFSKCFLTDKKNRVVEPRLSNNECSCTFREICLHEGVTFEVHVNTSQRGFQQKLLYPNSGREGTAAQNFSCFIYNADLMNCTWARGPTAPRDVQYFLYIRNSKRRREIRCPYYIQDSGTHVGCHLDNLSGLTSRNYFLVNGTSREIGIQFFDSLLDTKKIERFNPPSNVTVRCNTTHCLVRWKQPRTYQKLSYLDFQYQLDVHRKNTQPGTENLLINVSGDLENRYNFPSSEPRAKHSVKIRAADVRILNWSSWSEAIEFDHLGGIHPRGRERLPRRGLDREGNYLRPRGCRNGMDISASATRGNCFLDDAVNLYIIFYVFI

SEQ ID NO: 3589 - protein, 410 aa, Homo sapiens
MLLLVTSLLLCELPHPAFLLIPEKSDLRTVAPASSLNVRFDSRTMNLSWDCQENTTFSKCFLTDKKNRVVEPRLSNNECSCTFREICLHEGVTFEVHVNTSQRGFQQKLLYPNSGREGTAAQNFSCFIYNADLMNCTWARGPTAPRDVQYFLYIRNSKRRREIRCPYYIQDSGTHVGCHLDNLSGLTSRNYFLVNGTSREIGIQFFDSLLDTKKIERFNPPSNVTVRCNTTHCLVRWKQPRTYQKLSYLDFQYQLDVHRKNTQPGTENLLINVSGDLENRYNFPSSEPRAKHSVKIRAADVRILNWSSWSEAIEFGSDDGNLGSVYIYVLLIVGTLVCGIVLGFLFKRFLRIQRLFPPVPQIKDKLNDNHEVEDEMGPQRHHRCGWNLYPTPGPSPGSGSSPRLGSESSL

SEQ ID NO: 3590 - protein, 333 aa, Homo sapiens
MLLLVTSLLLCELPHPAFLLIPEKSDLRTVAPASSLNVRFDSRTMNLSWDCQENTTFSKCFLTDKKNRVVEPRLSNNECSCTFREICLHEGVTFEVHVNTSQRGFQQKLLYPNSGREGTAAQNFSCFIYNADLMNCTWARGPTAPRDVQYFLYIRNSKRRREIRCPYYIQDSGTHVGCHLDNLSGLTSRNYFLVNGTSREIGIQFFDSLLDTKKIERFNPPSNVTVRCNTTHCLVRWKQPRTYQKLSYLDFQYQLDVHRKNTQPGTENLLINVSGDLENRYNFPSSEPRAKHSVKIRAADVRILNWSSWSEAIEFGSLGYSGCSRQFHRSKTN

SEQ ID NO: 3591 - protein, 400 aa, Homo sapiens
MLLLVTSLLLCELPHPAFLLIPEKSDLRTVAPASSLNVRFDSRTMNLSWDCQENTTFSKCFLTDKKNRVVEPRLSNNECSCTFREICLHEGVTFEVHVNTSQRGFQQKLLYPNSGREGTAAQNFSCFIYNADLMNCTWARGPTAPRDVQYFLYIRNSKRRREIRCPYYIQDSGTHVGCHLDNLSGLTSRNYFLVNGTSREIGIQFFDSLLDTKKIERFNPPSNVTVRCNTTHCLVRWKQPRTYQKLSYLDFQYQLDVHRKNTQPGTENLLINVSGDLENRYNFPSSEPRAKHSVKIRAADVRILNWSSWSEAIEFGSDDGNLGSVYIYVLLIVGTLVCGIVLGFLFKRFLRIQRLFPPVPQIKDKLNDNHEVEDEIIWEEFTPEEGKGYREEVLTVKEIT

SEQ ID NO: 3592 - protein, 400 aa, Homo sapiens; identical to SEQ ID NO: 3591

SEQ ID NO: 3593 - protein, 434 aa, Homo sapiens
MLLLVTSLLLCELPHPAFLLIPEKSDLRTVAPASSLNVRFDSRTMNLSWDCQENTTFSKCFLTDKKNRVVEPRLSNNECSCTFREICLHEGVTFEVHVNTSQRGFQQKLLYPNSGREGTAAQNFSCFIYNADLMNCTWARGPTAPRDVQYFLYIRNSKRRREIRCPYYIQDSGTHVGCHLDNLSGLTSRNYFLVNGTSREIGIQFFDSLLDTKKIERFNPPSNVTVRCNTTHCLVRWKQPRTYQKLSYLDFQYQLDVHRKNTQPGTENLLINVSGDLENRYNFPSSEPRAKHSVKIRAADVRILNWSSWSEAIEFGSHSVTQAGVQWHNLGSLQPPSPRLKRFSCLRLPGSDDGNLGSVYIYVLLIVGTLVCGIVLGFLFKRFLRIQRLFPPVPQIKDKLNDNHEVEDEIIWEEFTPEEGKGYREEVLTVKEIT

SEQ ID NO: 3594 - protein, 285 aa, Homo sapiens
MLLLVTSLLLCELPHPAFLLIPEKSDLRTVAPASSLNVRFDSRTMNLSWDCQENTTFSKCFLTDKKNRVVEPRLSNNECSCTFREICLHEGVTFEVHVNTSQRGFQQKLLYPNSGREGTAAQNFSCFIYNADLMNCTWARGPTAPRDVQYFLYIRNSKRRREIRCPYYIQDSGTHVGCHLDNLSGLTSRNYFLVNGTSREIGIQFFDSLLDTKKIERFNPPSNVTVRCNTTHCLVRWKQPRTYQKLSYLDFQYQLDVHRKNTQPGTENLLVLTTGTSALCTFMCS

SEQ ID NO: 3595 - protein, 400 aa, Homo sapiens; identical to SEQ ID NO: 3591

SEQ ID NO: 3596 - protein, 233 aa, Homo sapiens
MLLLVTSLLLCELPHPAFLLIPEKSDLRTVAPASSLNVRFDSRTMNLSWDCQENTTFSKCFLTDKKNRVVEPRLSNNECSCTFREICLHEGVTFEVHVNTSQRGFQQKLLYPNSGREGTAAQNFSCFIYNADLMNCTWARGPTAPRDVQYFLYIRNSKRRREIRCPYYIQDSGTHVGCHLDNLSGLTSRNYFLVNGTSREIGIQFFDSLLDTKKIGSLGYSGCSRQFHRSKTN

SEQ ID NO: 3597 - protein, 90 aa, Homo sapiens
MLLLVTSLLLCELPHPAFLLIPEKSDLRTVAPASSLNVRFDSRTMNLSWDCQENTTFSKCFLTDKKNRVVEPRMEFPSCCPDRTIAHQPA

SEQ ID NO: 3598 - protein, 267 aa, Homo sapiens
MNCTWARGPTAPRDVQYFLYIRNSKRRREIRCPYYIQDSGTHVGCHLDNLSGLTSRNYFLVNGTSREIGIQFFDSLLDTKKIERFNPPSNVTVRCNTTHCLVRWKQPRTYQKLSYLDFQYQLDVHRKNTQPGTENLLINVSGDLENRYNFPSSEPRAKHSVKIRAADVRILNWSSWSEAIEFGSDDGNLGSVYIYVLLIVGTLVCGIVLGFLFKRFLRIQRLFPPVPQIKDKLNDNHEVEDEIIWEEFTPEEGKGYREEVLTVKEIT

SEQ ID NO: 3599 - protein, 155 aa, Homo sapiens
MAGPATQSPMKLMALQLLLWHSALWTVQEATPLGPASSLPQSFLLKCLEQVRKIQGDGAALQEKLAGCLSQLHSGLFLYQGLLQALEGISPELGPTLDTLQLDVADFATTIWQQMEELGMAPALQPTQGAMPAFASAFQRRAGGVLVASHLQSFL

SEQ ID NO: 3600 - protein, 204 aa, Homo sapiens
MAGPATQSPMKLMALQLLLWHSALWTVQEATPLGPASSLPQSFLLKCLEQVRKIQGDGAALQEKLCATYKLCHPEELVLLGHSLGIPWAPLSSCPSQALQLAGCLSQLHSGLFLYQGLLQALEGISPELGPTLDTLQLDVADFATTIWQQMEELGMAPALQPTQGAMPAFASAFQRRAGGVLVASHLQSFLEVSYRVLRHLAQP

SEQ ID NO: 3601 - protein, 171 aa, Homo sapiens
MAGPATQSPMKLMALQLLLWHSALWTVQEATPLGPASSLPQSFLLKCLEQVRKIQGDGAALQEKLVSEAGCLSQLHSGLFLYQGLLQALEGISPELGPTLDTLQLDVADFATTIWQQMEELGMAPALQPTQGAMPAFASAFQRRAGGVLVASHLQSFLEVSYRVLRHLAQP

SEQ ID NO: 3602 - protein, 207 aa, Homo sapiens
MAGPATQSPMKLMALQLLLWHSALWTVQEATPLGPASSLPQSFLLKCLEQVRKIQGDGAALQEKLVSECATYKLCHPEELVLLGHSLGIPWAPLSSCPSQALQLAGCLSQLHSGLFLYQGLLQALEGISPELGPTLDTLQLDVADFATTIWQQMEELGMAPALQPTQGAMPAFASAFQRRAGGVLVASHLQSFLEVSYRVLRHLAQP

SEQ ID NO: 3603 - protein, 57 aa, Homo sapiens
MAGPATQSPMKLMVCHLQAVPPRGAGAARTLSGHPLGSPEQLPQPGPAAGRLLEPTP

SEQ ID NO: 3604 - protein, 164 aa, Homo sapiens
MSPEPALSPALQLLLWHSALWTVQEATPLGPASSLPQSFLLKCLEQVRKIQGDGAALQEKLAGCLSQLHSGLFLYQGLLQALEGISPELGPTLDTLQLDVADFATTIWQQMEELGMAPALQPTQGAMPAFASAFQRRAGGVLVASHLQSFLEVSYRVLRHLAQP

SEQ ID NO: 3605 - protein, 200 aa, Homo sapiens
MSPEPALSPALQLLLWHSALWTVQEATPLGPASSLPQSFLLKCLEQVRKIQGDGAALQEKLCATYKLCHPEELVLLGHSLGIPWAPLSSCPSQALQLAGCLSQLHSGLFLYQGLLQALEGISPELGPTLDTLQLDVADFATTIWQQMEELGMAPALQPTQGAMPAFASAFQRRAGGVLVASHLQSFLEVSYRVLRHLAQP

SEQ ID NO: 3606 - protein, 14 aa, Homo sapiens
MMMVRRGLLAWISR

SEQ ID NO: 3607 - protein, 53 aa, Homo sapiens
MMMVRRGLLAWISRVVVLLVLLCCAISVLYMLACTPKGDEEQLALPRANSPTG

SEQ ID NO: 3608 - protein, 96 aa, Homo sapiens
MMMVRRGLLAWISRVVVLLVLLCCAISVLYMLACTPKGDEEQLALPRANSPTGKEGYQAVLQEWEEQHRNYVSSLKRQIAQLKEELQERSEQLRNG

SEQ ID NO: 3609 - protein, 104 aa, Homo sapiens
MMMVRRGLLAWISRVVVLLVLLCCAISVLYMLACTPKGDEEQLALPRANSPTGKEGYQAVLQEWEEQHRNYVSSLKRQIAQLKEELQERSEQLRNGQYQASDAA

SEQ ID NO: 3610 - protein, 532 aa, Homo sapiens
MMMVRRGLLAWISRVVVLLVLLCCAISVLYMLACTPKGDEEQLALPRANSPTGKEGYQAVLQEWEEQHRNYVSSLKRQIAQLKEELQERSEQLRNGQYQASDAAGLGLDRSPPEKTQADLLAFLHSQVDKAEVNAGVKLATEYAAVPFDSFTLQKVYQLETGLTRHPEEKPVRKDKRDELVEAIESALETLNSPAENSPNHRPYTASDFIEGIYRTERDKGTLYELTFKGDHKHEFKRLILFRPFGPIMKVKNEKLNMANTLINVIVPLAKRVDKFRQFMQNFREMCIEQDGRVHLTVVYFGKEEINEVKGILENTSKAANFRNFTFIQLNGEFSRGKGLDVGARFWKGSNVLLFFCDVDIYFTSEFLNTCRLNTQPGKKVFYPVLFSQYNPGIIYGHHDAVPPLEQQLVIKKETGFWRDFGFGMTCQYRSDFINIGGFDLDIKGWGGEDVHLYRKYLHSNLIVVRTPVRGLFHLWHEKRCMDELTPEQYKMCMQSKAMNEASHGQLGMLVFRHEIEAHLRKQKQKTSSKKT

SEQ ID NO: 3611 - protein, 297 aa, Homo sapiens
MMMVRRGLLAWISRVVVLLVLLCCAISVLYMLACTPKGDEEQLALPRANSPTGKEGYQAVLQEWEEQHRNYVSSLKRQIAQLKEELQERSEQLRNGQYQASDAAGLGLDRSPPEKTQADLLAFLHSQVDKAEVNAGVKLATEYAAVPFDSFTLQKVYQLETGLTRHPEEKPVRKDKRDELVEAIESALETLNSPAENSPNHRPYTASDFIEGIYRTERDKGTLYELTFKGDHKHEFKRLILFRPFGPIMKVKNEKLNMANTLINVIVPLAKRVDKFRQFMQNFRPADEVFRCVPLSP

SEQ ID NO: 3612 - protein, 297 aa, Homo sapiens; identical to SEQ ID NO: 3611

SEQ ID NO: 3613 - protein, 532 aa, Homo sapiens; identical to SEQ ID NO: 3610

SEQ ID NO: 3614 - protein, 532 aa, Homo sapiens; identical to SEQ ID NO: 3610

SEQ ID NO: 3615 - protein, 217 aa, Homo sapiens
MAPGSRTSLLLAFALLCLPWLQEAGAVQTVPLSRLFDHAMLQAHRAHQLAIDTYQEFEETYIPKDQKYSFLHDSQTSFCFSDSIPTPSNMEETQQKSNLELLRISLLLIESWLEPVRFLRSMFANNLVYDTSDSDDYHLLKDLEEGIQTLMGRLEDGSRRTGQILKQTYSKFDTNSHNHDALLKNYGLLYCFRKDMDKVETFLRMVQCRSVEGSCGF

SEQ ID NO: 3616 - protein, 256 aa, Homo sapiens
MAPGSRTSLLLAFALLCLPWLQEAGAVQTVPLSRLFDHAMLQAHRAHQLAIDTYQEFEETYIPKDQKYSFLHDSQTSFCFSDSIPTPSNMEETQQKSNLELLRISLLLIESWLEPVRFLRSMFANNLVYDTSDSDDYHLLKDLEEGIQTLMGVRVAPGVTNPGTPLASRAGGEKYCCPLFSSKALTQENSPYSSFRLVNPPGLSLHPEGEGGKWINERGREQCPSAWPLLLFLHFAEAGRRQPPDWADPQADLQQV

SEQ ID NO: 3617 - protein, 122 aa, Homo sapiens
MAPGSRTSLLLAFALLCLPWLQEAGAVQTVPLSRLFDHAMLQAHRAHQLAIDTYQEFRLEDGSRRTGQILKQTYSKFDTNSHNHDALLKNYGLLYCFRKDMDKVETFLRMVQCRSVEGSCGF

SEQ ID NO: 3618 - protein, 128 aa, Homo sapiens
MEETQQKSNLELLRISLLLIESWLEPVRFLRSMFANNLVYDTSDSDDYHLLKDLEEGIQTLMGRLEDGSRRTGQILKQTYSKFDTNSHNHDALLKNYGLLYCFRKDMDKVETFLRMVQCRSVEGSCGF

SEQ ID NO: 3619 - protein, 160 aa, Homo sapiens
MAAGSRTSLLLAFALLCLPWLQEADSIPTPSNMEETQQKSNLELLRISLLLIESWLEPVRFLRSMFANNLVYDTSDSDDYHLLKDLEEGIQTLMGRLEDGSRRTGQILKQTYSKFDTNSHNHDALLKNYGLLYCFRKDMDKVETFLRMVQCRSVEGSCGF

SEQ ID NO: 3620 - protein, 217 aa, Homo sapiens
MAAGSRTSLLLAFALLCLPWLQEAGAVQTVPLSRLFDHAMLQAHRAHQLAIDTYQEFEETYIPKDQKYSFLHDSQTSFCFSDSIPTPSNMEETQQKSNLELLRISLLLIESWLEPVRFLRSMFANNLVYDTSDSDDYHLLKDLEEGIQTLMGRLEDGSRRTGQILKQTYSKFDTNSHNHDALLKNYGLLYCFRKDMDKVETFLRMVQCRSVEGSCGF

SEQ ID NO: 3621 - protein, 167 aa, Homo sapiens
MAAGSRTSLLLAFALLCLPWLQEAGAVQTVPLSRLFDHAMLQAHRAHQLAIDTYQEFEETYIPKDQKYSFLHDSQTSFCFSDSIPTPSNMEETQQKSNLELLRISLLLIESWLEPVRFLRSMFANNLVYDTSDSDDYHLLKDLEEGIQTLMGVRVAPGVANPGTPLA

SEQ ID NO: 3622 - protein, 122 aa, Homo sapiens
MAAGSRTSLLLAFALLCLPWLQEAGAVQTVPLSRLFDHAMLQAHRAHQLAIDTYQEFRLEDGSRRTGQILKQTYSKFDTNSHNHDALLKNYGLLYCFRKDMDKVETFLRMVQCRSVEGSCGF

SEQ ID NO: 3623 - protein, 128 aa, Homo sapiens; identical to SEQ ID NO: 3618

SEQ ID NO: 3624 - protein, 139 aa, Homo sapiens
MAADSIPTSSNMEETQQKSNLELLHISLLLIESRLEPVRFLRSTFTNNLVYDTSDSDDYHLLKDLEEGIQMLMGRLEDGSHLTGQTLKQTYSKFDTNSHNHDALLKNYGLLHCFRKDMDKVETFLRMVQCRSVEGSCGF

SEQ ID NO: 3625 - protein, 178 aa, Homo sapiens
MAADSIPTSSNMEETQQKSNLELLHISLLLIESRLEPVRFLRSTFTNNLVYDTSDSDDYHLLKDLEEGIQMLMGVRVAPGVPNPGSPLASRAGGEKHCCPLFSSQALTQENSPYSSFPLVNPPGLSLHPEGEGGKWINERGREQCPSAWSLLLLLHFAEAGRRQPPDWADPQADLQQV

SEQ ID NO: 3626 - protein, 160 aa, Homo sapiens
MAAGSRTSLLLAFALLCLPWLQEADSIPTSSNMEETQQKSNLELLHISLLLIESRLEPVRFLRSTFTNNLVYDTSDSDDYHLLKDLEEGIQMLMGRLEDGSHLTGQTLKQTYSKFDTNSHNHDALLKNYGLLHCFRKDMDKVETFLRMVQCRSVEGSCGF

SEQ ID NO: 3627 - protein, 222 aa, Homo sapiens
MAAGSRTSLLLAFALLCLPWLQEAGAVQTVPLSRLFKEAMLQAHRAHQLAIDTYQEFISSWGMEAYITKEQKYSFLHDSQTSFCFSDSIPTSSNMEETQQKSNLELLHISLLLIESRLEPVRFLRSTFTNNLVYDTSDSDDYHLLKDLEEGIQMLMGRLEDGSHLTGQTLKQTYSKFDTNSHNHDALLKNYGLLHCFRKDMDKVETFLRMVQCRSVEGSCGF

SEQ ID NO: 3628 - protein, 217 aa, Homo sapiens [sequence omitted]

SEQ ID NO: 3629 - protein, 128 aa, Homo sapiens
MEETQQKSNLELLHISLLLIESRLEPVRFLRSTFTNNLVYDTSDSDDYHLLKDLEEGIQMLMGRLEDGSHLTGQTLKQTYSKFDTNSHNHDALLKNYGLLHCFRKDMDKVETFLRMVQCRSVEGSCGF

SEQ ID NO: 3630 - protein, 167 aa, Homo sapiens
MEETQQKSNLELLHISLLLIESRLEPVRFLRSTFTNNLVYDTSDSDDYHLLKDLEEGIQMLMGVRVAPGVPNPGSPLASRAGGEKHCCPLFSSQALTQENSPYSSFPLVNPPGLSLHPEGEGGKWINERGREQCPSAWSLLLLLHFAEAGRRQPPDWADPQADLQQV

SEQ ID NO: 3631 - protein, 76 aa, Homo sapiens
KMESSISSSSEEQIRRMNENSHVQVPFQQLNQLAAYPYAVWYYPQIMQYVPFPPFSDISNPTAHENYEKNNVMLQW

SEQ ID NO: 3632 - protein, 185 aa, Homo sapiens
MRLLILTCLVAVALARPKLPLRYPERLQNPSESSEPIPLESREEYMNGMNRQRNILREKQTDEIKDTRNESTQNCVVAEPEKMESSISSSSEEMSLSKCAEQFCRLNEYNQLQLQAAHAQEQIRRMNENSHVQVPFQQLNQLAAYPYAVWYYPQIMQYVPFPPFSDISNPTAHENYEKNNVMLQW

SEQ ID NO: 3633 - protein, 177 aa, Homo sapiens
MRLLILTCLVAVALARPKLPLRYPERLQNPSESSEPIPLESREEYMNGMNRQRNILREKQTDEIKDTRNESTQNCVVAEPEKMESSISSSSEEQFCRLNEYNQLQLQAAHAQEQIRRMNENSHVQVPFQQLNQLAAYPYAVWYYPQIMQYVPFPPFSDISNPTAHENYEKNNVMLQW

SEQ ID NO: 3634 - protein, 169 aa, Homo sapiens
MRLLILTCLVAVALARPKLPLRYPERLQNPSESSEPIPLESREEYMNGMNRQRNILREKQTDEIKNCVVAEPEKMESSISSSSEEQFCRLNEYNQLQLQAAHAQEQIRRMNENSHVQVPFQQLNQLAAYPYAVWYYPQIMQYVPFPPFSDISNPTAHENYEKNNVMLQW

SEQ ID NO: 3635 - protein, 176 aa, Homo sapiens
MRLLILTCLVAVALARPKLPLRYPERLQNPSESSEPIPLESREEYMNGMNRRNILREKQTDEIKDTRNESTQNCVVAEPEKMESSISSSSEEQFCRLNEYNQLQLQAAHAQEQIRRMNENSHVQVPFQQLNQLAAYPYAVWYYPQIMQYVPFPPFSDISNPTAHENYEKNNVMLQW

SEQ ID NO: 3636 - protein, 55 aa, Homo sapiens
QRNILREKQTDEIKNCVVAEPEKMESSISSSSEEMSLSKCAEQFCRLNEYNQLQL

SEQ ID NO: 3637 - protein, 226 aa, Homo sapiens
MKVLILACLVALALARETIESLSSSEESITEYKQKVEKVKHEDQQQGEDEHQDKIYPSFQPQPLIYPFVEPIPYGFLPQNILPLAQPAVVLPVPQPEIMEVPKAKDTVYTKGRVMPVLKSPTIPFFDPQIPKLTDLENLHLPLPLLQPLMQQVPQPIPQTLALPPQPLWSVPQPKVLPIPQQVVPYPQRAVPVQALLLNQELLLNPTHQIYPVTQPLAPVHNPISV

SEQ ID NO: 3638 - protein, 182 aa, Homo sapiens
MKSFLLVVNALALTLPFLAVEVQNQKQPACHENDERPFYQKTAPYVPMYYVPNSYPYYGTNLYQRRPAIAINNPYVPRTYYANPAVVRPHAQIPQRQYLPNSHPPTVVRRPNLHPSFIAIPPKKIQDKIIIPTINTIATVEPTPAPATEPTVDSVVTPEAFSESIITSTPETTTVAVTPPTA

SEQ ID NO: 3639 - protein, 141 aa, Homo sapiens
MAQYLSTLLLLLATLAVALAWSPKEEDRIIPGGIYNADLNDEWVQRALHFAISEYNKATKDDYYRRPLRVLRARQQTVGGVNYFFDVEVGRTICTKSQPNLDTCAFHEQPELQKKQLCSFEIYEVPWENRRSLVKSRCQES

SEQ ID NO: 3640 - protein, 141 aa, Homo sapiens; identical to SEQ ID NO: 3639

SEQ ID NO: 3641 - protein, 103 aa, Homo sapiens
MMAEPWQALQLLLAILLTLMALPYQARKKTFLSVHEVMAVENYAKDSLQWITDQYNKESDDKYHFRIFRVLKVQRQQVNCFFSVFAVPWFEQYKILNKSCSSD

SEQ ID NO: 3642 - protein, 138 aa, Homo sapiens
MMAEPWQALQLLLAILLTLMALPYQARKKTFLSVHEVMAVENYAKDSLQWITDQYNKESDDKYHFRIFRVLKVQRQVTDHLEYHLNVEMQWTTCQKPETTNCVPQERELHKQVNCFFSVFAVPWFEQYKILNKSCSSD

SEQ ID NO: 3643 - protein, 141 aa, Homo sapiens
MAWPLCTLLLLLATQAVALAWSPQEEDRIIEGGIYDADLNDERVQRALHFVISEYNKATEDEYYRRLLRVLRAREQIVGGVNYFFDIEVGRTICTKSQPNLDTCAFHEQPELQKKQLCSFQIYEVPWEDRMSLVNSRCQEA

SEQ ID NO: 3644 - protein, 146 aa, Homo sapiens
MAGPLRAPLLLLAILAVALAVSPAAGSSPGKPPRLVGGPMDASVEEEGVRRALDFAVGEYNKASNDMYHSRALQVVRARKQIVAGVNYFLDVELGRTTCTKTQPNLDNCPFHDQPHLKRKAFCSFQIYAVPWQGTMTLSKSTCQDA

SEQ ID NO: 3645 - protein, 146 aa, Homo sapiens; identical to SEQ ID NO: 3644

SEQ ID NO: 3646 - protein, 146 aa, Homo sapiens; identical to SEQ ID NO: 3644

SEQ ID NO: 3647 - protein, 141 aa, Homo sapiens
MARPLCTLLLLMATLAGALASSSKEENRIIPGGIYDADLNDEWVQRALHFAISEYNKATEDEYYRRPLQVLRAREQTFGGVNYFFDVEVGRTICTKSQPNLDTCAFHEQPELQKKQLCSFEIYEVPWEDRMSLVNSRCQEA

SEQ ID NO: 3648 - protein, 142 aa, Homo sapiens
MMWPMHTPLLLLTALMVAVAGSASAQSRTLAGGIHATDLNDKSVQCALDFAISEYNKVINKDEYYSRPLQVMAAYQQIVGGVNYYFNVKFGRTTCTKSQPNLDNCPFNDQPKLKEEEFCSFQINEVPWEDKISILNYKCRKV

SEQ ID NO: 3649 - protein, 149 aa, Homo sapiens
MARSNLPLALGLALVAFCLLALPRDARARPQERMVGELRDLSPDDPQVQKAAQAAVASYNMGSNSIYYFRDTHIIKAQSQLVAGIKYFLTMEMGSTDCRKTRVTGDHVDLTTCPLAAGAQQEKLRCDFEVLVVPWQNSSQLLKHNCVQM

SEQ ID NO: 3650 - protein, 145 aa, Homo sapiens
MRAAGTLLAFCCLVLSTTGGPSPDTCSQDLNSRVKPGFPKTIKTNDPGVLQAARYSVEKFNNCTNDMFLFKESRITRALVQIVKGLKYMLEVEIGRTTCKKNQHLRLDDCDFQTNHTLKQTLSCYSEVWVVPWLQHFEVPVLRCH

SEQ ID NO: 3651 - protein, 134 aa, Homo sapiens
MPRCRWLSLILLTIPLALVARKDPKKNETGVLRKLKPVNASNANVKQCLWFAMQEYNKESEDKYVFLVVKTLQAQLQVTNLLEYLIDVEIARSDCRKPLSTNEICAIQENSKLKRKLSCSFLVGALPWNGEFTV

SEQ ID NO: 3652 - protein, 142 aa, Homo sapiens
MPRCRWLSLILLTIPLALVARKDPKKNETGVLRKLKPVNASNANVKQCLWFAMQEYNKESEDKYVFLVVKTLQAQLQVTNLLEYLIDVEIARSDCRKPLSTNEICAIQENSKLKRKLSCSFLVGALPWNGEFTVMEKKCEDA

SEQ ID NO: 3653 - protein, 159 aa, Homo sapiens
MSSPQRRKAMPWALSLLLMGFQLLVTYAWCSEEEMGGNNKIVQDPMFLATVEFALNTFNVQSKEEHAYRLLRVLSSWREDSMDRKWRGKMVFSMNLQLRQTVCRKFEDDIDNCPFQESLELNNVRQGISFPQVHSCGCCMGCGVGTGAADKAIPRDKGK

SEQ ID NO: 3654 - protein, 147 aa, Homo sapiens
MLGLPWKGGLSWALLLLLLGSQILLIYAWHFHEQRDCDEHNVMARYLPATVEFAVHTFNQQSKDYYAYRLGHILNSWKEQVESKTVFSMELLLGRTRCGKFEDDIDNCHFQESTELNNTFTCFFTISTRPWMTQFSLLNKTCLEGFH

SEQ ID NO: 3655 - protein, 145 aa, Homo sapiens
MGIGCWRNPLLLLIALVLSAKLGHFQRWEGFQQKLMSKKNMNSTLNFFIQSYNNASNDTYLYRVQRLIRSQMQLTTGVEYIVTVKIGWTKCKRNDTSNSSCPLQSKKLRKSLICESLIYTMPWINYFQLWNNSCLEAEHVGRNLR

SEQ ID NO: 3656 - protein, 145 aa, Homo sapiens; identical to SEQ ID NO: 3655

SEQ ID NO: 3657 - protein, 37 aa, Homo sapiens
MNSTLNFFIQSYNNASNDTYLYRVQRLIRSQMQQVHC

SEQ ID NO: 3658 - protein, 242 aa, Homo sapiens
MLRLLRLALAFYGRTADPAERQGPQQQGLPQGDTQLTTVQGVVTSFCGDYGMIDESIYFSSDVVTGNVPLKVGQKVNVVVEEDKPHYGLRAIKVDVVPRHLYGAGPSDSGTRVLIGCVTSINEDNIYISNSIYFSIAIVSEDFVPYKGDLLEVEYSTEPGISNIKATSVKPIRCIHTEEVCITSVHGRNGVIDYTIFFTLDSVKLPDGYVPQVDDIVNVVMVESIQFCFIWRAISITPVHKS

SEQ ID NO: 3659 - protein, 264 aa, Homo sapiens
MLRLLRLALAFYGRTADPAERQGPQQQGLPQGDTQLTTVQGVVTSFCGDYGMIDESIYFSSDVVTGNVPLKVGQKVNVVVEEDKPHYGLRAIKVDVVPRHLYGAGPSDSGTRVLIGCVTSINEDNIYISNSIYFSIAIVSEDFVPYKGDLLEVEYSTEPGISNIKATSVKPIRCIHTEEVCITSVHGRNGVIDYTIFFTLDSVKLPDGYVPQVDDIVNVVMVESIQFCFIWRAISITPVHKSSSGFQDDGGLGRPKRERRSQSI

SEQ ID NO: 3660 - protein, 385 aa, Homo sapiens
MSRPQLRRWRLVSSPPSGVPGLALLALLALLALRLAAGTDCPCPEPELCRPIRHHPDFEVFVFDVGQKTWKSYDWSQITTVATFGKYDSELMCYAHSKGARVVLKGDVSLKDIIDPAFRASWIAQKLNLAKTQYMDGINIDIEQEVNCLSPEYDALTALVKETTDSFHREIEGSQVTFDVAWSPKNIDRRCYNYTGIADACDFLFVMSYDEQSQIWSECIAAANAPYNQTLTGYNDYIKMSINPKKLVMGVPWYGYDYTCLNLSEDHVCTIAKVPFRGAPCSDAAGRQVPYKTIMKQINSSISGNLWDKDQRAPYYNYKDPAGHFHQVWYDNPQSISLKATYIQNYRLRGIGMWNANCLDYSGDAVAKQQTEEMWEVLKPKLLQR

SEQ ID NO: 3661 - protein, 77 aa, Homo sapiens
MSRPQLRRWRLVSSPPSGVPGLALLALLALLALRLAAGTDCPCPEPELCRPIRHHPDFEVSAFLCSSRSGLQGTKRS

SEQ ID NO: 3662 - protein, 77 aa, Homo sapiens; identical to SEQ ID NO: 3661

SEQ ID NO: 3663 - protein, 349 aa, Homo sapiens
MTAASMGPVRVAFVVLLALCSRPAVGQNCSGPCRCPDEPAPRCPAGVSLVLDGCGCCRVCAKQLGELCTERDPCDPHKGLFCHFGSPANRKIGVCTAKDGAPCIFGGTVYRSGESFQSSCKYQCTCLDGAVGCMPLCSMDVRLPSPDCPFPRRVKLPGKCCEEWVCDEPKDQTVVGPALAAYRLEDTFGPDPTMIRANCLVQTTEWSACSKTCGMGISTRVTNDNASCRLEKQSRLCMVRPCEADLEENIKKGKKCIRTPKISKPIKFELSGCTSMKTYRAKFCGVCTDGRCCTPHRTTTLPVEFKCPDGEVMKKNMMFIKTCACHYNCPGDNDIFESLYYRKMYGDMA

SEQ ID NO: 3664 - protein, 243 aa, Homo sapiens
MRPQGPAASPQRLRGLLLLLLLQLPAPSSASEIPKGKQKAQLRQREVVDLYNGMCLQGPAGVPGRDGSPGANGIPGTPGIPGRDGFKGEKGECLRESFEESWTPNYKQCSWSSLNYGIDLGKIAECTFTKMRSNSALRVLFSGSLRLKCRNACCQRWYFTFNGAECSGPLPIEAIIYLDQGSPEMNSTINIHRTSSVEGLCEGIGAGLVDVAIWVGTCSDYPKGDASTGWNSVSRIIIEELPK

SEQ ID NO: 3665 - protein, 147 aa, Homo sapiens
MRPQGPAASPQRLRGLLLLLLLQLPAPSSASEIPKGKQKAQLRQREVVDLYNGMCLQGPAGVPGRDGSPGANGIPGTPGIPGRDGFKGEKGECLRESFEESWTPNYKQCSWSSLNYGIDLGKIAVSLNYFKIEARFKGFHILVLIFR

SEQ ID NO: 3666 - protein, 113 aa, Homo sapiens
MRSNSALRVLFSGSLRLKCRNACCQRWYFTFNGAECSGPLPIEAIIYLDQGSPEMNSTINIHRTSSVEGLCEGIGAGLVDVAIWVGTCSDYPKGDASTGWNSVSRIIIEELPK

SEQ ID NO: 3667 - protein, 229 aa, Homo sapiens
MWPPGRSITVKLREKTVSRKLEMNGPSAFQGLICGKYNGMCLQGPAGVPGRDGSPGANGIPGTPGIPGRDGFKGEKGECLRESFEESWTPNYKQCSWSSLNYGIDLGKIAECTFTKMRSNSALRVLFSGSLRLKCRNACCQRWYFTFNGAECSGPLPIEAIIYLDQGSPEMNSTINIHRTSSVEGLCEGIGAGLVDVAIWVGTCSDYPKGDASTGWNSVSRIIIEELPK

SEQ ID NO: 3668 - protein, 174 aa, Homo sapiens
MACLGFQRHKAQLNLATRTWPCTLLFFLLFIPVFCKAMHVAQPAVVLASSRGIASFVCEYASPGKATEVRVTVLRQADSQVTEVCAATYMMGNELTFLDDSICTGTSSGNQVNLTIQGLRAMDTGLYICKVELMYPPPYYLGIGNGTQIYVIAKEKKPSYNRGLCENAPNRARM

SEQ ID NO: 3669 - protein, 223 aa, Homo sapiens
MACLGFQRHKAQLNLATRTWPCTLLFFLLFIPVFCKAMHVAQPAVVLASSRGIASFVCEYASPGKATEVRVTVLRQADSQVTEVCAATYMMGNELTFLDDSICTGTSSGNQVNLTIQGLRAMDTGLYICKVELMYPPPYYLGIGNGTQIYVIDPEPCPDSDFLLWILAAVSSGLFFYSFLLTAVSLSKMLKKRSPLTTGVYVKMPPTEPECEKQFQPYFIPIN

SEQ ID NO: 3670 - protein, 79 aa, Homo sapiens
MACLGFQRHKAQLNLATRTWPCTLLFFLLFIPVFCKAMHVAQPAVVLASSRGIASFVSKEKKPSYNRGLCENAPNRARM

SEQ ID NO: 3671 - protein, 137 aa, Homo sapiens
MHVAQPAVVLASSRGIASFVCEYASPGKATEVRVTVLRQADSQVTEVCAATYMMGNELTFLDDSICTGTSSGNQVNLTIQGLRAMDTGLYICKVELMYPPPYYLGIGNGTQIYVIAKEKKPSYNRGLCENAPNRARM

SEQ ID NO: 3672 - protein, 53 aa, Homo sapiens
MIRNWLTIFILFPLKLVEKCESSVSLTVPPVVKLENGSSTNVSLTLRLWCLLE

SEQ ID NO: 3673 - protein, 75 aa, Homo sapiens
MIRNWLTIFILFPLKLVEKCESSVSLTVPPVVKLENGSSTNVSLTLRPPLNATLVITFEITFRSKNITILELPDE

SEQ ID NO: 3674 - protein, 122 aa, Homo sapiens
MIRNWLTIFILFPLKLVEKCESSVSLTVPPVVKLENGSSTNVSLTLRPPLNATLVITFEITFRSKNITILELPDELVEAGGEECRDEISSHEAHQDGLQISSEPPRKQTGVKHDQSPACGNL

SEQ ID NO: 3675 - protein, 163 aa, Homo sapiens
MIRNWLTIFILFPLKLVEKCESSVSLTVPPVVKLENGSSTNVSLTLRPPLNATLVITFEITFRSKNITILELPDEVVVPPGVTNSSFQVTSQNVGQLTVYLHGNHSNQTGPRIRFLVIRSSAISIINQVIGWIYFVAWSISFYPQVIMNWRRKSVIGLSFDFV

SEQ ID NO: 3676 - protein, 367 aa, Homo sapiens
MIRNWLTIFILFPLKLVEKCESSVSLTVPPVVKLENGSSTNVSLTLRPPLNATLVITFEITFRSKNITILELPDEVVVPPGVTNSSFQVTSQNVGQLTVYLHGNHSNQTGPRIRFLVIRSSAISIINQVIGWIYFVAWSISFYPQVIMNWRRKSVIGLSFDFVALNLTGFVAYSVFNIGLLWVPYIKEQFLLKYPNGVNPVNSNDVFFSLHAVVLTLIIIVQCCLYERGGQRVSWPAIGFLVLAWLFAFVTMIVAAVGVTTWLQFLFCFSYIKLAVTLVKYFPQAYMNFYYKSTEGWSIGNVLLDFTGGSFSLLQMFLQSYNNDQWTLIFGDPTKFGLGVFSIVFDVVFFIQHFCLYRKRPGYDQLN

SEQ ID NO: 3677 - protein, 400 aa, Homo sapiens
MIRNWLTIFILFPLKLVEKCESSVSLTVPPVVKLENGSSTNVSLTLRPPLNATLVITFEITFRSKNITILELPDEVVVPPGVTNSSFQVTSQNVGQLTVYLHGNHSNQTGPRIRFLVIRSSAISIINQVIGWIYFVAWSISFYPQVIMNWRRKSVIGLSFDFVALNLTGFVAYSVFNIGLLWVPYIKEQFLLKYPNGVNPVNSNDVFFSLHAVVLTLIIIVQCCLYERGGQRVSWPAIGFLVLAWLFAFVTMIVAAVGVTTWLQFLFCFSYIKLAVTLVKYFPQAYMNFYYKSTEGWSIGNVLLDFTGGSFSLLQMFLQSYNNDQWTLIFGDPTKFGLGVFSIVFDVVFFIQHFCLYRKRPGLQAARTGSGSRLRQDWAPSLQPKALPQTTSVSASSLKG

SEQ ID NO: 3678 - protein, 20 aa, Homo sapiens
MNWRRKSVIGLSFDFVALNL

SEQ ID NO: 3679 - protein, 28 aa, Homo sapiens
MNWRRKSVIGLSFDFVALNLTGFVAYSV

SEQ ID NO: 3680 - protein, 263 aa, Homo sapiens
MASLWLLSCFSLVGAAFGCGVPAIHPVLSGLSRIVNGEDAVPGSWPWQVSLQDKTGFHFCGGSLISEDWVVTAAHCGVRTSDVVVAGEFDQGSDEENIQVLKIAKVFKNPKFSILTVNNDITLLKLATPARFSQTVSAVCLPSADDDFPAGTLCATTGWGKTKYNANKTPDKLQQAALPLLSNAECKKSWGRRITDVMICAGASGVSSCMGDSGGPLVCQKDGAWTLVGIVSWGSDTCSTSSPGVYARVTKLIPWVQKILAAN

SEQ ID NO: 3681 - protein, 182 aa, Homo sapiens
MCQGGPELASVDWGRTGRAARRQVRPRWVWGLSPYSPHSPPGCGVPAIHPVLSGLSRIVNGEDAVPGSWPWQVSLQDKTGFHFCGGSLISEDWVVTAAHCGVRTSDVVVAGEFDQGSDEENIQVLKIAKVFKNPKFSILTVNNDITLLKLATPARFSQTVSAVCLPSADDDFPAGTLCATTG

SEQ ID NO: 3682 - protein, 16 aa, Homo sapiens
  SITE 1: note = misc_feature - Xaa can be any naturally occurring amino acid
XVTKLIPWVQKILAAN

SEQ ID NO: 3683 - protein, 114 aa, Homo sapiens
DKTGFHFCGGSLISEDWVVTAAHCGVRTSDVVVAGEFDQGSDEENIQVLKIAKVFKNPKFSILTVNNDITLLKLATPARFSQTVSAVCLPSADDDFPAGTLCATTGWGKTKYNG

SEQ ID NO: 3684 - protein, 168 aa, Homo sapiens
EFDQGSDEENIQVLKIAKVFKNPKFSILTVNNDITLLKLATPARFSQTVSAVCLPSADDDFPAGTLCATTGWGKTKYNANKTPDKLQQAALPLLSNAECKKSWGRRITDVMICAGGDSGGPLVCQKDGAWTLVGIVSWGSRTCSTTTPAVYARVAKLIPWVQKILAAN

SEQ ID NO: 3685 - protein, 263 aa, Homo sapiens
MAFLWLLSCWALLGTTFGCGVPAIHPVLSGLSRIVNGEDAVPGSWPWQVSLQDKTGFHFCGGSLISEDWVVTAAHCGVRTSDVVVAGEFDQGSDEENIQVLKIAKVFKNPKFSILTVNNDITLLKLATPARFSQTVSAVCLPSADDDFPAGTLCATTGWGKTKYNANKTPDKLQQAALPLLSNAECKKSWGRRITDVMICAGASGVSSCMGDSGGPLVCQKDGAWTLVGIVSWGSRTCSTTTPAVYARVAKLIPWVQKILAAN

SEQ ID NO: 3686 - protein, 137 aa, Homo sapiens
VAGEFDQGSDEENIQVLKIAKVFKNPKFSILTVNNDITLLKLATPARFSQTVSAVCLPSADDDFPAGTLCATTGWGKTKYNANKTPDKLQQAALPLLSNAECKKSWGRRITDVMICAGASGVSSCMVRLALPRPWPG

SEQ ID NO: 3687 - protein, 268 aa, Homo sapiens [sequence omitted]

SEQ ID NO: 3688 - protein, 69 aa, Homo sapiens
MLGITVLAALLACATPGPTVWPWERTTWRWKTKKDPCLWVWTPSTSTRDGMPSCCAMILPSSSLQSMWS

SEQ ID NO: 3689 - protein, 190 aa, Homo sapiens
MLLLSLTLSLVLLGSSWGCGIPAIKPALSFSQRIVNGENAVLGSWPWQVSLQDSSGFHFCGGSLISQSWVVTAAHCNVSPGRHFVVLGEYDRSSNAEPLQVLSVSRAITHPSWNSTTMNNDVTLLKLASPAQYTTRISPVCLASSNEALLSARRETHGCLLVLSPGAPKTAMCAHLLCILELASSAPGST

SEQ ID NO: 3690 - protein, 264 aa, Homo sapiens
MLLLSLTLSLVLLGSSWGCGIPAIKPALSFSQRIVNGENAVLGSWPWQVSLQDSSGFHFCGGSLISQSWVVTAAHCNVSPGRHFVVLGEYDRSSNAEPLQVLSVSRAITHPSWNSTTMNNDVTLLKLASPAQYTTRISPVCLASSNEALTEGLTCVTTGWGRLSGVGNVTPAHLQQVALPLVTVNQCRQYWGSSITDSMICAGGAGASSCQGDSGGPLVCQKGNTWVLIGIVSWGTKNCNVRAPAVYTRVSKFSTWINQVIAYN

SEQ ID NO: 3691 - protein, 190 aa, Homo sapiens
MLLLSLTLSLVLLGSSWGQQRLPLLRWFSHQPVLGGHCCPLQCQVLSVSRVSAWAADTEEKWAVQAITHPSWNSTTMNNDVTLLKLASPAQYTTRISPVCLASSNEALTEGLTCVTTGWGRLSGVGNVTPAHLQQVALPLVTVNQCRQYWGSSITDSMICAGGAGASSCQGDSGGPLVCQKGNTWVLIGI

SEQ ID NO: 3692 - protein, 110 aa, Homo sapiens
MIRAAPPPLFLLLLLLLLLVSWASRGEAAPDQDEIQRLPGLAKQPSFRQYSGYLKGSGSKHLHYWFVESQKDPENSPVVLWLNGGPGCSSLDGLLTEHGPFLVQPDGVTL

SEQ ID NO: 3693 - protein, 480 aa, Homo sapiens
MIRAAPPPLFLLLLLLLLLVSWASRGEAAPDQDEIQRLPGLAKQPSFRQYSGYLKGSGSKHLHYWFVESQKDPENSPVVLWLNGGPGCSSLDGLLTEHGPFLVQPDGVTLEYNPYSWNLIANVLYLESPAGVGFSYSDDKFYATNDTEVAQSNFEALQDFFRLFPEYKNNKLFLTGESYAGIYIPTLAVLVMQDPSMNLQGLAVGNGLSSYEQNDNSLVYFAYYHGLLGNRLWSSLQTHCCSQNKCNFYDNKDLECVTNLQEVARIVGNSGLNIYNLYAPCAGGVPSHFRYEKDTVVVQDLGNIFTRLPLKRMWHQALLRSGDKVRMDPPCTNTTAASTYLNNPYVRKALNIPEQLPQWDMCNFLVNLQYRRLYRSMNSQYLKLLSSQKYQILLYNGDVDMACNFMGDEWFVDSLNQKMEVQRRPWLVKYGDSGEQIAGFVKEFSHIAFLTIKGAGHMVPTDKPLAAFTMFSRFLNKQPY

SEQ ID NO: 3694 - protein, 480 aa, Homo sapiens; identical to SEQ ID NO: 3693

SEQ ID NO: 3695 - protein, 480 aa, Homo sapiens; identical to SEQ ID NO: 3693

SEQ ID NO: 3696 - protein, 82 aa, Homo sapiens
MTSSPRAPPGEQGRGGAEMIRAAPPPLFLLLLLLLLLVSWASRGEAAPDQDEIQRLPGLAKQPSFRQYSGYLKGSGSKHLHY

SEQ ID NO: 3697 - protein, 481 aa, Homo sapiens
MTSSPRAPPGEQGRGGAEMIRAAPPPLFLLLLLLLLLVSWASRGEAAPDQDEIQRLPGLAKQPSFRQYSGYLKGSGSKHLHYWFVESQKDPENSPVVLWLNGGPGCSSLDGLLTEHGPFLIANVLYLESPAGVGFSYSDDKFYATNDTEVAQSNFEALQDFFRLFPEYKNNKLFLTGESYAGIYIPTLAVLVMQDPSMNLQGLAVGNGLSSYEQNDNSLVYFAYYHGLLGNRLWSSLQTHCCSQNKCNFYDNKDLECVTNLQEVARIVGNSGLNIYNLYAPCAGGVPSHFRYEKDTVVVQDLGNIFTRLPLKRMWHQALLRSGDKVRMDPPCTNTTAASTYLNNPYVRKALNIPEQLPQWDMCNFLVNLQYRRLYRSMNSQYLKLLSSQKYQILLYNGDVDMACNFMGDEWFVDSLNQKMEVQRRPWLVKYGDSGEQIAGFVKEFSHIAFLTIKGAGHMVPTDKPLAAFTMFSRFLNKQPY

SEQ ID NO: 3698 - protein, 498 aa, Homo sapiens
MTSSPRAPPGEQGRGGAEMIRAAPPPLFLLLLLLLLLVSWASRGEAAPDQDEIQRLPGLAKQPSFRQYSGYLKGSGSKHLHYWFVESQKDPENSPVVLWLNGGPGCSSLDGLLTEHGPFLVQPDGVTLEYNPYSWNLIANVLYLESPAGVGFSYSDDKFYATNDTEVAQSNFEALQDFFRLFPEYKNNKLFLTGESYAGIYIPTLAVLVMQDPSMNLQGLAVGNGLSSYEQNDNSLVYFAYYHGLLGNRLWSSLQTHCCSQNKCNFYDNKDLECVTNLQEVARIVGNSGLNIYNLYAPCAGGVPSHFRYEKDTVVVQDLGNIFTRLPLKRMWHQALLRSGDKVRMDPPCTNTTAASTYLNNPYVRKALNIPEQLPQWDMCNFLVNLQYRRLYRSMNSQYLKLLSSQKYQILLYNGDVDMACNFMGDEWFVDSLNQKMEVQRRPWLVKYGDSGEQIAGFVKEFSHIAFLTIKGAGHMVPTDKPLAAFTMFSRFLNKQPY

SEQ ID NO: 3699 - protein, 231 aa, Homo sapiens
MTSSPRAPPGEQGRGGAEMIRAAPPPLFLLLLLLLLLVSWASRGEAAPDQDEIQRLPGLAKQPSFRQYSGYLKGSGSKHLHYWFVESQKDPENSPVVLWLNGGPGCSSLDGLLTEHGPFLVQPDGVTLEYNPYSWNLIANVLYLESPAGVGFSYSDDKFYATNDTEVAQSNFEALQDFFRLFPEYKNNKLFLTGESYAGIYIPTLAVLVMQDPSMNLQVQGAGCGQWTLLL

SEQ ID NO: 3700 - protein, 202 aa, Homo sapiens
QDFFRLFPEYKNNKLFLTGESYAGIYIPTLAVLVMQDPSMNLQGLAVGNGLSSYEQNDNSLVYFAYYHGLLGNRLWSSLQTHCCSQNKCNFYDNKDLECVTNLQEVARIVGNSGLNIYNLYAPCAGGVPSHFRTLLWSRIWATSSLACHSSGCGIRHCCAQGIKCAWTPPAPTQQLLPPTSTTRTCGRPSTSRSSCHNGTCA

SEQ ID NO: 3701 - protein, 21 aa, Homo sapiens
MWQLWASLCCLLVLANARSRP

SEQ ID NO: 3702 - protein, 32 aa, Homo sapiens
MWQLWASLCCLLVLANARSRPSFHPLSDELVN

SEQ ID NO: 3703 - protein, 55 aa, Homo sapiens
MWQLWASLCCLLVLANARSRPSFHPLSDELVNYVNKRNTTWQAGHNFYNVDMSYL

SEQ ID NO: 3704 - protein, 68 aa, Homo sapiens
MWQLWASLCCLLVLANARSRPSFHPLSDELVNYVNKRNTTWQAGHNFYNVDMSYLKRLCGTFLGGPKP

SEQ ID NO: 3705 - protein, 70 aa, Homo sapiens
MWQLWASLCCLLVLANARSRPSFHPLSDELVNYVNKRNTTWQAGHNFYNVDMSYLKRLCGTFLGGPKPPQ

SEQ ID NO: 3706 - protein, 70 aa, Homo sapiens; identical to SEQ ID NO: 3705

SEQ ID NO: 3707 - protein, 92 aa, Homo sapiens
MWQLWASLCCLLVLANARSRPSFHPLSDELVNYVNKRNTTWQAGHNFYNVDMSYLKRLCGTFLGGPKPPQRVMFTEDLKLPASFDAREQWPQ

SEQ ID NO: 3708 - protein, 98 aa, Homo sapiens
MWQLWASLCCLLVLANARSRPSFHPLSDELVNYVNKRNTTWQAGHNFYNVDMSYLKRLCGTFLGGPKPPQRVMFTEDLKLPASFDAREQWPQCPTIKE

SEQ ID NO: 3709 - protein, 101 aa, Homo sapiens
MWQLWASLCCLLVLANARSRPSFHPLSDELVNYVNKRNTTWQAGHNFYNVDMSYLKRLCGTFLGGPKPPQRVMFTEDLKLPASFDAREQWPQCPTIKEIRD

SEQ ID NO: 3710 - protein, 136 aa, Homo sapiens
MWQLWASLCCLLVLANARSRPSFHPLSDELVNYVNKRNTTWQAGHNFYNVDMSYLKRLCGTFLGGPKPPQRVMFTEDLKLPASFDAREQWPQCPTIKEIRDQGSCGSCWAFGAVEAISDRICIHTNAHVSVEVSAE

SEQ ID NO: 3711 - protein, 143 aa, Homo sapiens
MWQLWASLCCLLVLANARSRPSFHPLSDELVNYVNKRNTTWQAGHNFYNVDMSYLKRLCGTFLGGPKPPQRVMFTEDLKLPASFDAREQWPQCPTIKEIRDQGSCGSCWAFGAVEAISDRICIHTNAHVSVEVSAEDLLTCCG

SEQ ID NO: 3712 - protein, 143 aa, Homo sapiens; identical to SEQ ID NO: 3711

SEQ ID NO: 3713 - protein, 149 aa, Homo sapiens
MWQLWASLCCLLVLANARSRPSFHPLSDELVNYVNKRNTTWQAGHNFYNVDMSYLKRLCGTFLGGPKPPQRVMFTEDLKLPASFDAREQWPQCPTIKEIRDQGSCGSCWAFGAVEAISDRICIHTNAHVSVEVSAEDLLTCCGSMCGDG

SEQ ID NO: 3714 - protein, 165 aa, Homo sapiens
MWQLWASLCCLLVLANARSRPSFHPLSDELVNYVNKRNTTWQAGHNFYNVDMSYLKRLCGTFLGGPKPPQRVMFTEDLKLPASFDAREQWPQCPTIKEIRDQGSCGSCWAFGAVEAISDRICIHTNAHVSVEVSAEDLLTCCGSMCGDGCNGGYPAEAWNFWTRK

SEQ ID NO: 3715 - protein, 170 aa, Homo sapiens
MWQLWASLCCLLVLANARSRPSFHPLSDELVNYVNKRNTTWQAGHNFYNVDMSYLKRLCGTFLGGPKPPQRVMFTEDLKLPASFDAREQWPQCPTIKEIRDQGSCGSCWAFGAVEAISDRICIHTNAHVSVEVSAEDLLTCCGSMCGDGCNGGYPAEAWNFWTRKGLVSG

SEQ ID NO: 3716 - protein, 175 aa, Homo sapiens
MWQLWASLCCLLVLANARSRPSFHPLSDELVNYVNKRNTTWQAGHNFYNVDMSYLKRLCGTFLGGPKPPQRVMFTEDLKLPASFDAREQWPQCPTIKEIRDQGSCGSCWAFGAVEAISDRICIHTNAHVSVEVSAEDLLTCCGSMCGDGCNGGYPAEAWNFWTRKGLVSGGLYES

SEQ ID NO: 3717 - protein, 339 aa, Homo sapiens
MWQLWASLCCLLVLANARSRPSFHPLSDELVNYVNKRNTTWQAGHNFYNVDMSYLKRLCGTFLGGPKPPQRVMFTEDLKLPASFDAREQWPQCPTIKEIRDQGSCGSCWAFGAVEAISDRICIHTNAHVSVEVSAEDLLTCCGSMCGDGCNGGYPAEAWNFWTRKGLVSGGLYESHVGCRPYSIPPCEHHVNGSRPPCTGEGDTPKCSKICEPGYSPTYKQDKHYGYNSYSVSNSEKDIMAEIYKNGPVEGAFSVYSDFLLYKSGVYQHVTGEMMGGHAIRILGWGVENGTPYWLVANSWNTDWGDNGFFKILRGQDHCGIESEVVAGIPRTDQYWEKI

SEQ ID NO: 3718 - protein, 339 aa, Homo sapiens; identical to SEQ ID NO: 3717

SEQ ID NO: 3719 - protein, 339 aa, Homo sapiens; identical to SEQ ID NO: 3717

SEQ ID NO: 3720 - protein, 339 aa, Homo sapiens; identical to SEQ ID NO: 3717

SEQ ID NO: 3721 - protein, 339 aa, Homo sapiens; identical to SEQ ID NO: 3717

SEQ ID NO: 3722 - protein, 339 aa, Homo sapiens; identical to SEQ ID NO: 3717

SEQ ID NO: 3723 - protein, 339 aa, Homo sapiens; identical to SEQ ID NO: 3717

SEQ ID NO: 3724 - protein, 110 aa, Homo sapiens
MWQLWASLCCLLVLANARSRPSFHPLSDELVNYVNKRNTTWQAGHNFYNVDMSYLKRLCGTFLGGPKPPQRVMFTEDLKLPASFDAREQWPQCPTIKEIRDQGSCGSCWL

SEQ ID NO: 3725 - protein, 76 aa, Homo sapiens
SGVYQHVTGEMMGGHAIRILGWGVENGTPYWLVANSWNTDWGDNGFFKILRGQDHCGIESEVVAGIPRTDQYWEKI

SEQ ID NO: 3726 - protein, 141 aa, Homo sapiens
MGAGPSLLLAALLLLLSGDGAVRCDTPANCTYLDLLGTWVFQVGSSGSQRDVNCSVMGPQEKKVVVYLQKLDTAYDDLGNSGHFTIIYNQGFEIVLNDYKWFAFFKDVTDFISHLFMQLGTVGIYDLPHLRNKLAMNRRWG

SEQ ID NO: 3727 - protein, 137 aa, Homo sapiens
MGAGPSLLLAALLLLLSGDGAVRCDTPANCTYLDLLGTWVFQVGSSGSQRDVNCSVMGPQEKKVVVYLQKLDTAYDDLGNSGHFTIIYNQGFEIVLNDYKWFAFFKDVTDFISHLFMQLGTVGIYDLPHLRNKLVIK

SEQ ID NO: 3728 - protein, 463 aa, Homo sapiens
MGAGPSLLLAALLLLLSGDGAVRCDTPANCTYLDLLGTWVFQVGSSGSQRDVNCSVMGPQEKKVVVYLQKLDTAYDDLGNSGHFTIIYNQGFEIVLNDYKWFAFFKYKEEGSKVTTYCNETMTGWVHDVLGRNWACFTGKKVGTASENVYVNIAHLKNSQEKYSNRLYKYDHNFVKAINAIQKSWTATTYMEYETLTLGDMIRRSGGHSRKIPRPKPAPLTAEIQQKILHLPTSWDWRNVHGINFVSPVRNQASCGSCYSFASMGMLEARIRILTNNSQTPILSPQEVVSCSQYAQGCEGGFPYLIAGKYAQDFGLVEEACFPYTGTDSPCKMKEDCFRYYSSEYHYVGGFYGGCNEALMKLELVHHGPMAVAFEVYDDFLHYKKGIYHHTGLRDPFNPFELTNHAVLLVGYGTDSASGMDYWIVKNSWGTGWGENGYFRIRRGTDECAIESIAVAATPIPKL

SEQ ID NO: 3729 - protein, 36 aa, Homo sapiens
  SITE 1: note = misc_feature - Xaa can be any naturally occurring amino acid
XDVTDFISHLFMQLGTVGIYDLPHLRNKLAMNRRWG

SEQ ID NO: 3730 - protein, 245 aa, Homo sapiens
  SITE 1: note = misc_feature - Xaa can be any naturally occurring amino acid
XVVDSPLARSARLPGPQEKKVVVYLQKLDTAYDDLGNSGHFTIIYNQGFEIVLNDYKWFAFFKYKEEGSKVTTYCNETMTGWVHDVLGRNWACFTGKKVGTASENVYVNIAHLKNSQEKYSNRLYKYDHNFVKAINAIQKSWTATTYMEYETLTLGDMIRRSGGHSRKIPRPKPAPLTAEIQQKILHLPTSWDWRNVHGINFVSPVRNQASCGSCYSFASMGMLEARIRILTNNSQTPILSPQEV

SEQ ID NO: 3731 - protein, 299 aa, Homo sapiens
MPRPVVDRIPLHKFTSIRRTMSEVGGSVEDLIAKGPVSKYSQAVPAVTEGPIPEVLKNYMDAQYYGEIGIGTPPQCFTVVFDTGSSNLWVPSIHCKLLDIACWIHHKYNSDKSSTYVKNGTSFDIHYGSGSLSGYLSQDTVSVPCQSASSASALGGVKVERQVFGEATKQPGITFIAAKFDGILGMAYPRISVNNVLPVFDNLMQQKLVDQNIFSFYLSRDPDAQPGGELMLGGTDSKYYKGSLSYLNVTRKAYWQVHLDQVEVASGLTLCKEGCEAIVDTGTSLMVGPVDEVRELQKA

SEQ ID NO: 3732 - protein, 405 aa, Homo sapiens
MQPSSLLPLALCLLAAPASALVRIPLHKFTSIRRTMSEVGGSVEDLIAKGPVSKYSQAVPAVTEGPIPEAQYYGEIGIGTPPQCFTVVFDTGSSNLWVPSIHCKLLDIACWIHHKYNSDKSSTYVKNGTSFDIHYGSGSLSGYLSQDTVSVPCQSASSASALGGVKVERQVFGEATKQPGITFIAAKFDGILGMAYPRISVNNVLPVFDNLMQQKLVDQNIFSFYLSRDPDAQPGGELMLGGTDSKYYKGSLSYLNVTRKAYWQVHLDQVEVASGLTLCKEGCEAIVDTGTSLMVGPVDEVRELQKAIGAVPLIQGEYMIPCEKVSTLPAITLKLGGKGYKLSPEDYTLKVSQAGKTLCLSGFMGMDIPPPSGPLWILGDVFIGRYYTVFDRDNNRVGFAEAARL

SEQ ID NO: 3733 - protein, 412 aa, Homo sapiens
MQPSSLLPLALCLLAAPASALVRIPLHKFTSIRRTMSEVGGSVEDLIAKGPVSKYSQAVPAVTEGPIPEVLKNYMDAQYYGEIGIGTPPQCFTVVFDTGSSNLWVPSIHCKLLDIACWIHHKYNSDKSSTYVKNGTSFDIHYGSGSLSGYLSQDTVSVPCQSASSASALGGVKVERQVFGEATKQPGITFIAAKFDGILGMAYPRISVNNVLPVFDNLMQQKLVDQNIFSFYLSRDPDAQPGGELMLGGTDSKYYKGSLSYLNVTRKAYWQVHLDQVEVASGLTLCKEGCEAIVDTGTSLMVGPVDEVRELQKAIGAVPLIQGEYMIPCEKVSTLPAITLKLGGKGYKLSPEDYTLKVSQAGKTLCLSGFMGMDIPPPSGPLWILGDVFIGRYYTVFDRDNNRVGFAEAARL

SEQ ID NO: 3734 - protein, 276 aa, Homo sapiens
MQPSSLLPLALCLLAAPASALVRIPLHKFTSIRRTMSEVGGSVEDLIAKGPVSKYSQAVPAVTEGPIPEVLKNYMDAQYYGEIGIGTPPQCFTVVFDTGSSNLWVPSIHCKLLDIACWIHHKYNSDKSSTYVKNGTSFDIHYGSGSLSGYLSQDTVSVPCQSASSASALGGVKVERQVFGEATKQPGITFIAAKFDGILGMAYPRISVNNVLPVFDNLMQQKLVDQNIFSFYLSRDPDAQPGGELMLGGTDSKYYKGSLSYLNVTRKAYWQVHLDQ

SEQ ID NO: 3735 - protein, 406 aa, Homo sapiens
MQPSSLLPLALCLLAAPASALVRIPLHKFTSIRRTMSEVGGSVEDLIAKGPVSKYSQAVPAVTEGPIPEVLKNYMDAQYYGEIGIGTPPQCFTVVFDTGSSNLWVPSIHCKLLDIACWIHHKYNSDKSSTYVKNGTSFDIHYGSGSLSGYLSQDTVSVPCQSASSASALGGVKVERQVFGEATKQPGITFIAAKFDGILGMAYPRISVNNVLPVFDNLMQQKLVDQNIFSFYLSRDPDAQPGGELMLGGTDSKYYKGSLSYLNVTRKAYWVEVASGLTLCKEGCEAIVDTGTSLMVGPVDEVRELQKAIGAVPLIQGEYMIPCEKVSTLPAITLKLGGKGYKLSPEDYTLKVSQAGKTLCLSGFMGMDIPPPSGPLWILGDVFIGRYYTVFDRDNNRVGFAEAARL

SEQ ID NO: 3736 - protein, 405 aa, Homo sapiens
MQPSSLLPLALCLLAAPASALVRIPLHKFTSIRRTMSEVGGSVEDLIAKGPVSKYSQAVPAVTEGPIPEVLKNYMDAQYYGEIGIGTPPQCFTVVFDTGSSNLWVPSIHCKLLDIACWIHHKYNSDKSSTYVKNGTSFDIHYGSGSLSGYLSQDTVSVPCQSASSASALGGVKVERQVFGEATKQPGITFIAAKFDGILGMAYPRISVNNVLPVFDNLMQQKLVDQNIFSFYLSRDPDAQPGGELMLGGTDSKYYKGSLSYLNVTRKAYWQVHLDQVEVASGLTLCKEGCEAIVDTGTSLMVGPVDEVRELQKAIGAVPLIQGEVSTLPAITLKLGGKGYKLSPEDYTLKVSQAGKTLCLSGFMGMDIPPPSGPLWILGDVFIGRYYTVFDRDNNRVGFAEAARL

SEQ ID NO: 3737 - protein, 409 aa, Homo sapiens
MQPSSLLPLALCLLAAPASALVRIPLHKFTSIRRTMSEVGGSVEDLIAKGPVSKYSQAVPAVTEGPIPEVLKNYMDAQYYGEIGIGTPPQCFTVVFDTGSSNLWVPSIHCKLLDIACWIHHKYNSDKSSTYVKNGTSFDIHYGSGSLSGYLSQDTVSVPCQSASSASALGGVKVERQVFGEATKQPGITFIAAKFDGILGMAYPRISVNNVLPVFDNLMQQKLVDQNIFSFYLSRDPDAQPGGELMLGGTDSKYYKGSLSYLNVTRKAYWQVHLDQVEVASGLTLCKEGCEAIVDTGTSLMVGPVDEVRELQKAIGAVPLIQGEYMIPCEKVSTLPAITLKLGGKGYKLSPEDYTLKAGKTLCLSGFMGMDIPPPSGPLWILGDVFIGRYYTVFDRDNNRVGFAEAARL

SEQ ID NO: 3738 - protein, 410 aa, Homo sapiens
MQPSSLLPLALCLLAAPASALVRIPLHKFTSIRRTMSEVGGSVEDLIAKGPVSKYSQAVPAVTEGPIPEVLKNYMDYYGEIGIGTPPQCFTVVFDTGSSNLWVPSIHCKLLDIACWIHHKYNSDKSSTYVKNGTSFDIHYGSGSLSGYLSQDTVSVPCQSASSASALGGVKVERQVFGEATKQPGITFIAAKFDGILGMAYPRISVNNVLPVFDNLMQQKLVDQNIFSFYLSRDPDAQPGGELMLGGTDSKYYKGSLSYLNVTRKAYWQVHLDQVEVASGLTLCKEGCEAIVDTGTSLMVGPVDEVRELQKAIGAVPLIQGEYMIPCEKVSTLPAITLKLGGKGYKLSPEDYTLKVSQAGKTLCLSGFMGMDIPPPSGPLWILGDVFIGRYYTVFDRDNNRVGFAEAARL

SEQ ID NO: 3739 - protein, 94 aa, Homo sapiens
MSEVGGSVEDLIAKGPVSKYSQAVPAVTEGPIPEVLKNYMDAQYYGEIGIGTPPQCFTVVFDTGSSNLWVPSIHCKLLDIACWIHHKYNSDKSS

SEQ ID NO: 3740 - protein, 199 aa, Homo sapiens
MSEVGGSVEDLIAKGPVSKYSQAVPAVTEGPIPEVLKNYMDAQYYGEIGIGTPPQCFTVVFDTGSSNLWVPSIHCKLLDIACWIHHKYNSDKSSTYVKNGTSFDIHYGSGSLSGYLSQDTVSVPCQSASSASALGGVKVERQVFGEATKQPGITFIAAKFDGILGMAYPRISVNNVLPVFDNLMQQKLVDQNIFSFYLS

SEQ ID NO: 3741 - protein, 189 aa, Homo sapiens
NVTRKAYWQVHLDQSPEGRRVQPSQGRGSQGGALGPQGTLQSRQGLHALTPRRVEVASGLTLCKEGCEAIVDTGTSLMVGPVDEVRELQKAIGAVPLIQGEYMIPCEKVSTLPAITLKLGGKGYKLSPEDYTLKVSQAGKTLCLSGFMGMDIPPPSGPLWILGDVFIGRYYTVFDRDNNRVGFAEAARL

SEQ ID NO: 3742 - protein, 396 aa, Homo sapiens
MKTLLLLLLVLLELGEAQGSLHRVPLRRHPSLKKKLRARSQLSEFWKSHNLDMIQFTESCSMDQSAKEPLINYLDMEYFGTISIGSPPQNFTVIFDTGSSNLWVPSVYCTSPACKTHSRFQPSQSSTYSQPGQSFSIQYGTGSLSGIIGADQVSVEGLTVVGQQFGESVTEPGQTFVDAEFDGILGLGYPSLAVGGVTPVFDNMMAQNLVDLPMFSVYMSSNPEGGAGSELIFGGYDHSHFSGSLNWVPVTKQAYWQIALDNIQVGGTVMFCSEGCQAIVDTGTSLITGPSDKIKQLQNAIGAAPVDGEYAVECANLNVMPDVTFTINGVPYTLSPTAYTLLDFVDGMQFCSSGFQGLDIHPPAGPLWILGDVFIRQFYSVFDRGNNRVGLAPAVP

SEQ ID NO: 3743 - protein, 363 aa, Homo sapiens
MKTLLLLLLVLLELGEAQGSLHRVPLRRHPSLKKKLRARSQLSEFWKSHNLDMIQFTESCSMDQSAKEPLINYLDMEYFGTISIGSPPQNFTVIFDTGSSNLWVPSVYCTSPACKTHSRFQPSQSSTYSQPGQSFSIQYGTGSLSGIIGADQVSVEGLTVVGQQFGESVTEPGQTFVDAEFDGILGLGYPSLAVGGVTPVFDNMMAQNLVDLPMFSVYMSSNPEGGAGSELIFGGYDHSHFSGSLNWVPVTKQAYWQIALDNMLWSVPTLTSCRMSPSPLTESPIPSAQLPTPYWTSWMECSSAAVAFKDLTSTLQLGPSGSWGMSSFDSFTQSLTVGITVWDWPQQSPKEGPCVCACLSDRP

SEQ ID NO: 3744 - protein, 484 aa, Homo sapiens [sequence omitted]

SEQ ID NO: 3745 - protein, 120 aa, Homo sapiens
MVCRLPVSKKTLLCSFQVLDELGRHVLLRKDCGPVDTKVPGAGEPKSAFTQGSAMISSLSQNHPDNRNETFSSVISLLNEDPLSQDLPVKMASIFKNFVITYNRTYESKEEARWRLSVFV

SEQ ID NO: 3746 - protein, 283 aa, Homo sapiens
  SITE 1: note = misc_feature - Xaa can be any naturally occurring amino acid
XQNHPDNRNETFSSVISLLNEDPLSQDLPVKMASIFKNFVITYNRTYESKEARWRLSVFVNNMVRAQKIQALDRGTAQYGVTKFSDLTEEEFRTIYLNTLLRKEPGNKMKQAKSVGDLAPPEWDWRSKGAVTKVKDQGMCGSCWAFSVTGNVEGQWFLNQGTLLSLSEQELLDCDKMDKACMGGLPSNAYSAIKNLGGLETEDDYSYQGHMQSCNFSAEKAKVYINDSVELSQNEQKLAAWLAKRGPISVAINAFGMQFYRHGISRPLRPLCSPWLIDHAVLL

SEQ ID NO: 3747 - protein, 82 aa, Homo sapiens
  SITE 1: note = misc_feature - Xaa can be any naturally occurring amino acid
XRTIYLNTLLRKEPGNKMKQAKSVGDLAPPEWDWRSKGAVTKVKDQGMCGSCWAFSVTGNVEGQWFLNQGTLLSLSEQALGL

SEQ ID NO: 3748 - protein, 255 aa, Homo sapiens
MQPLLLLLAFLLPTGAEAGEIIGGRESRPHSRPYMAYLQIQSPAGQSRCGGFLVREDFVLTAAHCWGSNINVTLGAHNIQRRENTQQHITARRAIRHPQYNQRTIQNDIMLLQLSRRVRRNRNVNPVALPRAQEGLRPGTLCTVAGWGRVSMRRGTDTLREVQLRVQRDRQCLRIFGSYDPRRQICVGDRRERKAAFKGDSGGPLLCNNVAHGIVSYGKSSGVPPEVFTRVSSFLPWIRTTMRSFKLLDQMETPL

SEQ ID NO: 3749 - protein, 134 aa, Homo sapiens
MALNQFSDMSFAEIKHKYLWSEPQNCSATKSNYLRGTGPYPPSVDWRKKGNFVSPVKNQGACGSCWTFSTTGALESAIAIATGKMLSLAEQQLVDCAQDFNNHGCQGGLPSQAFEYILYNKGIMGEDTYPYQGK

SEQ ID NO: 3750 - protein, 323 aa, Homo sapiens
MWATLPLLCAAELCVNSLEKFHFKSWMSKHRKTYSTEEYHHRLQTFASNWRKINAHNNGNHTFKMALNQFSDMSFAEIKHKYLWSEPQNCSATKSNYLRGTGPYPPSVDWRKKGNFVSPVKNQGACGSCWTFSTTGALESAIAIATGKMLSLAEQQLVDCAQDFNNHGCQGGLPSQAFEYILYNKGIMGEDTYPYQGKDGYCKFQPGKAIGFVKDVANITIYDEEAMVEAVALYNPVSFAFEVTQDFMMYRTGIYSSTSCHKTPDKVNHAVLAVGYGEKNGIPYWIVKNSWGPQWGMNGYFLIERGKNMCGLAACASYPIPLV

SEQ ID NO: 3751 - protein, 335 aa, Homo sapiens
MWATLPLLCAGAWLLGVPVCGAAELCVNSLEKFHFKSWMSKHRKTYSTEEYHHRLQTFASNWRKINAHNNGNHTFKMALNQFSDMSFAEIKHKYLWSEPQNCSATKSNYLRGTGPYPPSVDWRKKGNFVSPVKNQGACGSCWTFSTTGALESAIAIATGKMLSLAEQQLVDCAQDFNNHGCQGGLPSQAFEYILYNKGIMGEDTYPYQGKDGYCKFQPGKAIGFVKDVANITIYDEEAMVEAVALYNPVSFAFEVTQDFMMYRTGIYSSTSCHKTPDKVNHAVLAVGYGEKNGIPYWIVKNSWGPQWGMNGYFLIERGKNMCGLAACASYPIPLV

SEQ ID NO: 3752 - protein, 62 aa, Homo sapiens
MWATLPLLCAGAWLLGVPVCGAAELCVNSLEKFHFKSWMSKKTKAHCVLVAESVGEHQCMCF

SEQ ID NO: 3753 - protein, 41 aa, Homo sapiens
MWATLPLLCAGAWLLGVPVCGAAELCVNSLGTQRARRPRGC

SEQ ID NO: 3754 - protein, 118 aa, Homo sapiens
MWATLPLLCAGAWLLGVPVCGAAELCVNSLVAGLSPPLGPWSLRSPSQPERCCPWRNSSWWTAPRTSIITAAKGVSPARLSSISCTTRGSWVKTPTPTRARMVIASSNLERPSALSRM

SEQ ID NO: 3755 - protein, 258 aa, Homo sapiens
MHKENEEIYNVSENRKHCPIFPCPLLTRSGKVPEFRHEREERLEEMIRRQNLDGNLSFVMWGLKVLLLPVVSFALYPEEILDTHWELWKKTHRKQYNNKVDEISRRLIWEKNLKYISIHNLEASLGVHTYELAMNHLGDMTSEEVVQKMTGLKVPLSHSRSNDTLYIPEWEGRAPDSVDYRKKGYVTPVKNQGQCGSCWAFSSVGALEGQLKKKTGKLLNLSPQNLVDCVSENDGCGGGYMTNAFQYVQKNRGIDSED

SEQ ID NO: 3756 - protein, 329 aa, Homo sapiens
MWGLKVLLLPVVSFALYPEEILDTHWELWKKTHRKQYNNKVDEISRRLIWEKNLKYISIHNLEASLGVHTYELAMNHLGDMTSEEVVQKMTGLKVPLSHSRSNDTLYIPEWEGRAPDSVDYRKKGYVTPVKNQGQCGSCWAFSSVGALEGQLKKKTGKLLNLSPQNLVDCVSENDGCGGGYMTNAFQYVQKNRGIDSEDAYPYVGQEESCMYNPTGKAAKCRGYREIPEGNEKALKRAVARVGPVSVAIDASLTSFQFYSKGVYYDESCNSDNLNHAVLAVGYGIQKGNKHWIIKNSWGENWGNKGYILMARNKNNACGIANLASFPKM

SEQ ID NO: 3757 - protein, 333 aa, Homo sapiens [sequence omitted]

SEQ ID NO: 3758 - protein, 333 aa, Homo sapiens [sequence omitted]

SEQ ID NO: 3759 - protein, 225 aa, Homo sapiens
MNPTLILAAFCLGIASATLTFDHSLEAQWTKWKAMHNRLYGMNEEGWRRAVWEKNMKMIELHNQEYREGKHSFTMAMNAFGDMTSEEFRQVMNGFQNRKPRKGKVFQEPLFYEAPRSVDWREKGYVTPVKNQGQCGSCWAFSATGALEGQMFRKTGRLISLSEQNLVDCSGPQGNEGCNGGLMDYAFQYVQDNGGLDSEESYPYEATVSGAPCHHSSSAFGRWTL

SEQ ID NO: 3760 - protein, 321 aa, Homo sapiens
MDVRALPWLPWLLWLLCRGGGDADSRAPFTPTWPRSREREAAAFRESLNRHRYLNSLFPSENSTAFYGINQFSYLFPEEFKAIYLRSKPSKFPRYSAEVHMSIPNVSLPLRFDWRDKQVVTQVRNQQMCGGCWAFSVVGAVESAYAIKGKPLEDLSVQQVIDCSYNNYGCNGGSTLNALNWLNKMQVKLVKDSEYPFKAQNGLCHYFSGSHSGFSIKGYSAYDFSDQEDEMAKALLTFGPLVVIVDAVSWQDYLGGIIQHHCSSGEANHAVLITGFDKTGSTPYWIVRNSWGSSWGVDGYAHVKMGSNVCGIADSVSSIFV

SEQ ID NO: 3761 - protein, 117 aa, Homo sapiens
IIDNKGIDSDASYPYKAMDQKCQYDSKYRAATCSKYTELPYGREDVLKEAVANKGPVSVGVDARHPSFFLYRSDGVLLCCQAGVRWHDLSSLQPLPPGFKQFSCLSLLSSWDYRCLL

SEQ ID NO: 3762 - protein, 281 aa, Homo sapiens
MKRLVCVLLVCSSAVAQLHKDPTLDHHWHLWKKTYGKQYKEKNEEAVRRLIWEKNLKFVMLHNLEHSMGMHSYDLGMNHLGDMGSCGACWAFSAVGALEAQLKLKTGKLVSLSAQNLVDCSTEKYGNKGCNGGFMTTAFQYIIDNKGIDSDASYPYKAMDQKCQYDSKYRAATCSKYTELPYGREDVLKEAVANKGPVSVGVDARHPSFFLYRSGVYYEPSCTQNVNHGVLVVGYGDLNGKEYWLVKNSWGHNFGEEGYIRMARNKGNHCGIASFPSYPEI

SEQ ID NO: 3763 - protein, 331 aa, Homo sapiens
MKRLVCVLLVCSSAVAQLHKDPTLDHHWHLWKKTYGKQYKEKNEEAVRRLIWEKNLKFVMLHNLEHSMGMHSYDLGMNHLGDMTSEEVMSLMSSLRVPSQWQRNITYKSNPNRILPDSVDWREKGCVTEVKYQGSCGACWAFSAVGALEAQLKLKTGKLVSLSAQNLVDCSTEKYGNKGCNGGFMTTAFQYIIDNKGIDSDASYPYKAMDQKCQYDSKYRAATCSKYTELPYGREDVLKEAVANKGPVSVGVDARHPSFFLYRSGVYYEPSCTQNVNHGVLVVGYGDLNGKEYWLVKNSWGHNFGEEGYIRMARNKGNHCGIASFPSYPEI

SEQ ID NO: 3764 - protein, 96 aa, Homo sapiens
  SITE 1: note = misc_feature - Xaa can be any naturally occurring amino acid
XVLKEAVANKGPVSVGVDARHPSFFLYRSGVYYEPSCTQNVNHGVLVVGYGDLNGKEYWLVKNSWGHNFGEEGYIRMARNKGNHCGIASFPSYPEI

SEQ ID NO: 3765 - protein, 5 aa, Homo sapiens
  SITE 1: note = misc_feature - Xaa can be any naturally occurring amino acid
XYPEI

SEQ ID NO: 3766 - protein, 334 aa, Homo sapiens
MNLSLVLAAFCLGIASAVPKFDQNLDTKWYQWKATHRRLYGANEEGWRRAVWEKNMKMIELHNGEYSQGKHGFTMAMNAFGDMTNEEFRQMMGCFRNQKFRKGKVFREPLFLDLPKSVDWRKKGYVTPVKNQKQCGSCWAFSATGALEGQMFRKTGKLVSLSEQNLVDCSRPQGNQGCNGGFMARAFQYVKENGGLDSEESYPYVAVDEICKYRPENSVANDTGFTVVAPGKEKALMKAVATVGPISVAMDAGHSSFQFYKSGIYFEPDCSSKNLDHGVLVVGYGFEGANSNNSKYWLVKNSWGPEWGSNGYVKIAKDKNNHCGIATAASYPNV

SEQ ID NO: 3767 - protein, 334 aa, Homo sapiens; identical to SEQ ID NO: 3766

SEQ ID NO: 3768 - protein, 211 aa, Homo sapiens
ALTAHPSCLLALLVAGLAQGIRGPLRAQDLGPQPLELKEAFKLFQIQFNRSYLSPEEHAHRLDIFAHNLAQAQRLQEEDLGTAEFGVTPFSDLTEEEFGQLYGYRRAAGGVPSMGREIRSEEPEESVPFSCDWRKVASAISPIKDQKNCNCCWAMAAAGNIETLWRISFWDFVDVSVQGGLASEKDYPFQGKVRAHRCHPKKYQKVAWIQD

SEQ ID NO: 3769 - protein, 376 aa, Homo sapiens
MALTAHPSCLLALLVAGLAQGIRGPLRAQDLGPQPLELKEAFKLFQIQFNRSYLSPEEHAHRLDIFAHNLAQAQRLQEEDLGTAEFGVTPFSDLTEEEFGQLYGYRRAAGGVPSMGREIRSEEPEESVPFSCDWRKVASAISPIKDQKNCNCCWAMAAAGNIETLWRISFWDFVDVSVQELLDCGRCGDGCHGGFVWDAFITVLNNSGLASEKDYPFQGKVRAHRCHPKKYQKVAWIQDFIMLQNNEHRIAQYLATYGPITVTINMKPLQLYRKGVIKATPTTCDPQLVDHSVLLVGFGSVKSEEGIWAETVSSQSQPQPPHPTPYWILKNSWGAQWGEKGYFRLHRGSNTCGITKFPLTARVQKPDMKPRVSCPP

SEQ ID NO: 3770 - protein, 364 aa, Homo sapiens
MALTAHPSCLLALLVAGLAQGIRGPLRAQDLGPQPLELKEAFKLFQIQFNRSYLSPEEHAHRLDIFAHNLAQAQRLQEEDLGTAEFGVTPFSDLTEEEFGQLYGYRRAAGGVPSMGREIRSEEPEESVPFSCDWRKVASAISPIKDQKNCNCCWAMAAAGNIETLWRISFWDFVDVSVQELLDCGRCGDGCHGGFVWDAFITVLNNSGLASEKDYPFQGKVRAHRCHPKKYQKVAWIQDFIMLQNNEHRIAQYLATYGPITVTINMKPLQLYRKGVIKATPTTCDPQLVDHSVLLVGFGSVKSEEGIWAETVSSQSQPQPPHPTPYWILKNSWGAQWGEKVSVIYWGRGQGRTGLFPPSRPYVP

SEQ ID NO: 3771 - protein, 303 aa, Homo sapiens
MARRGPGWRPLLLLVLLAGAAQGGLYFRRGQTCYRPLRGDGLAPLGRSTYPRPHEYLSPADLPKSWDWRNVDGVNYASITRNQHIPQYCGSCWAHASTSAMADRINIKRKGAWPSTLLSVQNVIDCGNAGSCEGGNDLSVWDYAHQHGIPDETCNNYQAKDQECDKFNQCGTCNEFKECHAIRNYTLWRVGDYGSLSGREKMMAEIYANGPISCGIMATERLANYTGGIYAEYQDTTYINHVVSVAGWGISDGTEYWIVRNSWGEPWGERGWLRIVTSTYKDGKGARYNLAIEEHCTFGDPIV

SEQ ID NO: 3772 - protein, 3623 aa, Homo sapiens
MMNMSLPFLWSLLTLLIFAEVNGEAGELELQRQKRSINLQQPRMATERGNLVFLTGSAQNIEFRTGSLGKIKLNDEDLSECLHQIQKNKEDIIELKGSAIGLPQNISSQIYQLNSKLVDLERKFQGLQQTVDKKVCSSNPCQNGGTCLNLHDSFFCICPPQWKGPLCSADVNECEIYSGTPLSCQNGGTCVNTMGSYSCHCPPETYGPQCASKYDDCEGGSVARCVHGICEDLMREQAGEPKYSCVCDAGWMFSPNSPACTLDRDECSFQPGPCSTLVQCFNTQGSFYCGACPTGWQGNGYICEDINECEINNGGCSVAPPVECVNTPGSSHCQACPPGYQGDGRVCTLTDICSVSNGGCHPDASCSSTLGSLPLCTCLPGYTGNGYGPNGCVQLSNICLSHPCLNGQCIDTVSGYFCKCDSGWTGVNCTENINECLSNPCLNGGTCVDGVDSFSCECTRLWTGALCQVPQQVCGESLSGINGSFSYRSPDVGYVHDVNCFWVIKTEMGKVLRITFTFFRLESMDNCPHEFLQVYDGDSSSAFQLGRFCGSSLPHELLSSDNALYFHLYSEHLRNGRGFTVRWETQQPECGGILTGPYGSIKSPGYPGNYPPGRDCVWIVVTSPDLLVTFTFGTLSLEHHDDCNKDYLEIRDGPLYQDPLLGKFCTTFSVPPLQTTGPFARIHFHSDSQISDQGFHITYLTSPSDLRCGGNYTDPEGELFLPELSGPFTHTRQCVYMMKQPQGEQIQINFTHVELQCQSDSSQNYIEVRDGETLLGKVCGNGTISHIKSITNSVWIRFKIDASVEKASFRAVYQVACGDELTGEGVIRSPFFPNVYPGERTCRWTIHQPQSQVILLNFTVFEIGSSAHCETDYVEIGSSSILGSPENKKYCGTDIPSFITSVYNFLYVTFVKSSSTENHGFMAKFSAEDLACGEILTESTGTIQSPGHPNVYPHGINCTWHILVQPNHLIHLMFETFHLEFHYNCTNDYLEVYDTDSETSLGRYCGKSIPPSLTSSGNSLMLVFVTDSDLAYEGFLINYEAISAATACLQDYTDDLGTFTSPNFPNNYPNNWECIYRITVRTGQLIAVHFTNFSLEEAIGNYYTDFLEIRDGGYEKSPLLGIFYGSNLPPTIISHSNKLWLKFKSDQIDTRSGFSAYWDGSSTGCGGNLTTSSGTFISPNYPMPYYHSSECYWWLKSSHGSAFELEFKDFHLEHHPNCTLDYLAVYDGPSSNSHLLTQLCGDEKPPLIRSSGDSMFIKLRTDEGQQGRGFKAEYRQTCENVVIVNQTYGILESIGYPNPYSENQHCNWTIRATTGNTVNYTFLAFDLEHHINCSTDYLELYDGPRQMGRYCGVDLPPPGSTTSSKLQVLLLTDGVGRREKGFQMQWFVYGCGGELSGATGSFSSPGFPNRYPPNKECIWYIRTDPGSSIQLTIHDFDVEYHSRCNFDVLEIYGGPDFHSPRIAQLCTQRSPENPMQVSSTGNELAIRFKTDLSINGRGFNASWQAVTGGCGGIFQAPSGEIHSPNYPSPYRSNTDCSWVIRVDRNHRVLLNFTDFDLEPQDSCIMAYDGLSSTMSRLARTCGREQLANPIVSSGNSLFLRFQSGPSRQNRGFRAQFRQACGGHILTSSFDTVSSPRFPANYPNNQNCSWIIQAQPPLNHITLSFTHFELERSTTCARDFVEILDGGHEDAPLRGRYCGTDMPHPITSFSSALTLRFVSDSSISAGGFHTTVTASVSACGGTFYMAEGIFNSPGYPDIYPPNVECVWNIVSSPGNRLQLSFISFQLEDSQDCSRDFVEIREGNATGHLVGRYCGNSFPLNYSSIVGHTLWVRFISDGSGSGTGFQATFMKIFGNDNIVGTHGKVASPFWPENYPHNSNYQWTVNVNASHVVHGRILEMDIEEIQNCYYDKLRIYDGPSIHARLIGAYCGTQTESFSSTGNSLTFHFYSDSSISGKGFLLEWFAVDAPDGVLPTIAPGACGGFLRTGDAPVFLFSPGWPDSYSNRVDCTWLIQAPDSTVELNILSLDIESHRTCAYDSLVIRDGDNNLAQQLAVLCGREIPGPIRSTGEYMFIRFTSDSSVTRAGFNASFHKSCGGYLHADRGIITSPKYPETYPSNLNCSWHVLVQSGLTIAVHFEQPFQIPNGDSSCNQGDYLVLRNGPDICSPPLGPPGGNGHFCGSHASSTLFTSDNQMFVQFISDHSNEGQGFKIKYEAKSLACGGNVYIHDADSAGYVTSPNHPHNYPPHADCIWILAAPPETRIQLQFEDRFDIEVTPNCTSNYLELRDGVDSDAPILSKFCGTSLPSSQWSSGEVMYLRFRSDNSPTHVGFKAKYSIAQCGGRVPGQSGVVESIGHPTLPYRDNLFCEWHLQGLSGHYLTISFEDFNLQNSSGCEKDFVEIWDNHTSGNILGRYCGNTIPDSIDTSSNTAVVRFVTDGSVTASGFRLRFESSMEECGGDLQGSIGTFTSPNYPNPNPHGRICEWRITAPEGRRITLMFNNLRLATHPSCNNEHVIVFNGIRSNSPQLEKLCSSVNVSNEIKSSGNTMKVIFFTDGSRPYGGFTASYTSSEDAVCGGSLPNTPEGNFTSPGYDGVRNYSRNLNCEWTLSNPNQGNSSISIHFEDFYLESHQDCQFDVLEFRVGDADGPLMWRLCGPSKPTLPLVIPYSQVWIHFVTNERVEHIGFHAKYSFTDCGGIQIGDSGVITSPNYPNAYDSLTHCSSLLEAPQGHTITLTFSDFDIEPHTTCAWDSVTVRNGGSPESPIIGQYCGNSNPRTIQSGSNQLVVTFNSDHSLQGGGFYATWNTQTLGCGGIFHSDNGTIRSPHWPQNFPENSRCSWTAITHKSKHLEISFDNNFLIPSGDGQCQNSFVKVWAGTEEVDKALLATGCGNVAPGPVITPSNTFTAVFQSQEAPAQGFSASFVSRCGSNFTGPSGYIISPNYPKQYDNNMNCTYVIEANPLSVVLLTFVSFHLEARSAVTGSCVNDGVHIIRGYSVMSTPFATVCGDEMPAPLTIAGPVLLNFYSNEQITDFGFKFSYRIISCGGVFNFSSGIITSPAYSYADYPNDMHCLYTITVSDDKVIELKFSDFDVVPSTSCSHDYLAIYDGANTSDPLLGKFCGSKRPPNVKSSNNSMLLVFKTDSFQTAKGWKMSFRQTLGPQQGCGGYLTGSNNTFASPDSDSNGMYDKNLNCVWIIIAPVNKVIHLTFNTFALEAASTRQRCLYDYVKLYDGDSENANLAGTFCGSTVPAPFISSGNFLTVQFISDLTLEREGFNATYTIMDMPCGGTYNATWTPQNISSPNSSDPDVPFSICTWVIDSPPHQQVKITVWALQLTSQDCTQNYLQLQDSPQGHGNSRFQFCGRNASAVPVFYSSMSTAMVIFKSGVVNRNSRMSFTYQIADCNRDYHKAFGNLRSPGWPDNYDNDKDCTVTLTAPQNHTISLFFHSLGIENSVECRNDFLEVRNGSNSNSPLLGKYCGTLLPNPVFSQNNELYLRFKSDSVTSDRGYEIIWTSSPSGCGGTLYGDRGSFTSPGYPGTYPNNTYCEWVLVAPAGRLVTINFYFISIDDPGDCVQNYLTLYDGPNASSPSSGPYCGGDTSIAPFVASSNQVFIKFHADYARRPSAFRLTWDS

SEQ ID NO: 3773 - protein, 170 aa, Homo sapiens
MMNMSLPFLWSLLTLLIFAEVNGEAGELELQRQKRSINLQQPRMATERGNLVFLTGSAQNIEFRTGSLGKIKLNDEDLSECLHQIQKNKEDIIELKGSAIGLPQNISSQIYQLNSKLVDLERKFQGLQQTVDKKVCSSNPCQNGGTCLNLHDSFFCICPPQWKVSHLLFG

SEQ ID NO: 3774 - protein, 105 aa, Homo sapiens
NSKLVDLERKFQGLQQTVDKKVCSSNPCQNGGTCLNLHDSFFCICPPQWKGPLCSADVNECEIYSGTPLSCQNGGTCVNTMGSYRNPCSNIPKEPEEGSRDWHRE

SEQ ID NO: 3775 - protein, 88 aa, Homo sapiens
STGNELAIRFKTDLSINGRGFNASWQAVTGGCGGIFQAPSGEIHSPNYPSPYRSNTDCSWVIRVDRNHRVLLNFTDFDLEPQDSCIMV

SEQ ID NO: 3776 - protein, 198 aa, Homo sapiens
MIGSGLAGSGGAGGPSSTVTWCALFSNHVAATQASLLLSFVWMPALLPVASRLLLLPRVLLTMASGSPPTQPSPASDSGSGYVPGSVSAAFVTCPNEKVAKEIARAVVEKRLAACVNLIPQITSIYEWKGKIEEDSEVLMMIKTQSSLVPALTDFVRSVHPYEVAEVIALPVEQGNFPYLQWVRQVTESVSDSITVLP

SEQ ID NO: 3777 - protein, 135 aa, Homo sapiens
MPALLPVASRLLLLPRVLLTMASGSPPTQPSPASDSGSGYVPGSVSAAFVTCPNEKVAKEIARAVVEKRLAACVNLIPQITSIYEWKGKIEEDSEVLMMIKTQSSLVPALTDFVRSVHPYEVAESCHDEPCSCSS

SEQ ID NO: 3778 - protein, 156 aa, Homo sapiens
MPALLPVASRLLLLPRVLLTMASGSPPTQPSPASDSGSGYVPGSVSAAFVTCPNEKVAKEIARAVVEKRLAACVNLIPQITSIYEWKGKIEEDSEVLMMIKTQSSLVPALTDFVRSVHPYEVAEVIALPVEQGNFPYLQWVRQVTESVSDSITVLP

SEQ ID NO: 3779 - protein, 156 aa, Homo sapiens; identical to SEQ ID NO: 3778

SEQ ID NO: 3780 - protein, 156 aa, Homo sapiens; identical to SEQ ID NO: 3778

SEQ ID NO: 3781 - protein, 156 aa, Homo sapiens; identical to SEQ ID NO: 3778

SEQ ID NO: 3782 - protein, 155 aa, Homo sapiens
MSGGRAPAVLLGGVASLLLSFVWMPALLPVASRLLLLPRVLLTMASGSPPTQPSPASDSGSGYVPGSVSAAFVTCPNEKVAKEIARAVVEKRLAACVNLIPQITSIYEWKGKIEEDSEVLMFCAPLRSGRGNCIACGTGELSVPAVGAPGHRVSF

SEQ ID NO: 3783 - protein, 179 aa, Homo sapiens
MSGGRAPAVLLGGVASLLLSFVWMPALLPVASRLLLLPRVLLTMASGSPPTQPSPASDSGSGYVPGSVSAAFVTCPNEKVAKEIARAVVEKRLAACVNLIPQITSIYEWKGKIEEDSEVLMMIKTQSSLVPALTDFVRSVHPYEVAEVIALPVEQGNFPYLQWVRQVTESVSDSITVLP

SEQ ID NO: 3784 - protein, 42 aa, Homo sapiens
MSGGRAPAVLLGGVVSDRPRPAPSGPRSLDRYPHPKSQRLAP

SEQ ID NO: 3785 - protein, 111 aa, Homo sapiens
  SITE 1: note = misc_feature - Xaa can be any naturally occurring amino acid
XSSTVTWCALFSNHVAATQASLLLSFVWMPALLPVASRLLLLPRVLLTMASGSPPTQPSPASDSGSGYVPGSVSAAFVTCPNEKVAKEIARAVVEKRLAACVNLIPQITSM

SEQ ID NO: 3786 - protein, 55 aa, Homo sapiens
MAPISLSWLLRLATFCHLTVLLAAWRRDSTGCSVPTRRSNGSRTRCSIWTARLLP

SEQ ID NO: 3787 - protein, 397 aa, Homo sapiens
MAPISLSWLLRLATFCHLTVLLAGQHHGVTKCNITCSKMTSKIPVALLIHYQQNQASCGKRAIILETRQHRLFCADPKEQWVKDAMQHLDRQAAALTRNGGTFEKQIGEVKPRTTPAAGGMDESVVLEPEATGESSSLEPTPSSQEAQRALGTSPELPTGVTGSSGTRLPPTPKAQDGGPVGTELFRVPPVSTAATWQSSAPHQPGPSLWAEAKTSEAPSTQDPSTQASTASSPAPEENAPSEGQRVWGQGQSPRPENSLEREEMGPVPAHTDAFQDWGPGSMAHVSVVPVSSEGTPSREPVASGSWTPKAEEPIHATMDPQRLGVLITPVPDAQAATRRQAVGLLAFLGLLFCLGVAMFTYQSLQGCPRKMAGEMAEGLRYIPRSCGSNSYVLVPV

SEQ ID NO: 3788 - protein, 403 aa, Homo sapiens
MAPISLSWLLRLATFCHLTVLLAGTSLNSGQHHGVTKCNITCSKMTSKIPVALLIHYQQNQASCGKRAIILETRQHRLFCADPKEQWVKDAMQHLDRQAAALTRNGGTFEKQIGEVKPRTTPAAGGMDESVVLEPEATGESSSLEPTPSSQEAQRALGTSPELPTGVTGSSGTRLPPTPKAQDGGPVGTELFRVPPVSTAATWQSSAPHQPGPSLWAEAKTSEAPSTQDPSTQASTASSPAPEENAPSEGQRVWGQGQSPRPENSLEREEMGPVPAHTDAFQDWGPGSMAHVSVVPVSSEGTPSREPVASGSWTPKAEEPIHATMDPQRLGVLITPVPDAQAATRRQAVGLLAFLGLLFCLGVAMFTYQSLQGCPRKMAGEMAEGLRYIPRSCGSNSYVLVPV

SEQ ID NO: 3789 - protein, 359 aa, Homo sapiens
MTSKIPVALLIHYQQNQASCGKRAIILETRQHRLFCADPKEQWVKDAMQHLDRQAAALTRNGGTFEKQIGEVKPRTTPAAGGMDESVVLEPEATGESSSLEPTPSSQEAQRALGTSPELPTGVTGSSGTRLPPTPKAQDGGPVGTELFRVPPVSTAATWQSSAPHQPGPSLWAEAKTSEAPSTQDPSTQASTASSPAPEENAPSEGQRVWGQGQSPRPENSLEREEMGPVPAHTDAFQDWGPGSMAHVSVVPVSSEGTPSREPVASGSWTPKAEEPIHATMDPQRLGVLITPVPDAQAATRRQAVGLLAFLGLLFCLGVAMFTYQSLQGCPRKMAGEMAEGLRYIPRSCGSNSYVLVPV

SEQ ID NO: 3790 - protein, 89 aa, Homo sapiens
MALLLCFVLLCGVVDFARSLSITTPEEMIEKAKGETAYLPCKFTLSPEDQGPLDIEWLISPADNQKVDQVGRCATSKEPYVHCQKLHRQ

SEQ ID NO: 3791 - protein, 200 aa, Homo sapiens
MALLLCFVLLCGVVDFARSLSITTPEEMIEKAKGETAYLPCKFTLSPEDQGPLDIEWLISPADNQKVDQVIILYSGDKIYDDYYPDLKGRVHFTSNDLKSGDASINVTNLQLSDIGTYQCKVKKAPGVANKKIHLVVLGKMCHLQRAVRPLPEATSAVIIHPWGPCLLPTWKDIPRLSITKYQVKTLNALLRVRLSHLLR

SEQ ID NO: 3792 - protein, 365 aa, Homo sapiens
MALLLCFVLLCGVVDFARSLSITTPEEMIEKAKGETAYLPCKFTLSPEDQGPLDIEWLISPADNQKVDQVIILYSGDKIYDDYYPDLKGRVHFTSNDLKSGDASINVTNLQLSDIGTYQCKVKKAPGVANKKIHLVVLVKPSGARCYVDGSEEIGSDFKIKCEPKEGSLPLQYEWQKLSDSQKMPTSWLAEMTSSVISVKNASSEYSGTYSCTVRNRVGSDQCLLRLNVVPPSNKAGLIAGAIIGTLLALALIGLIIFCCRKKRREEKYEKEVHHDIREDVPPPKSRTSTARSYIGSNHSSLGSMSPSNMEGYSKTQYNQVPSEDFERTPQSPTLPPAKVAAPNLSRMGAIPVMIPAQSKDGSIV

SEQ ID NO: 3793 - protein, 352 aa, Homo sapiens
MALLLCFVLLCGVVDFARSLSITTPEEMIEKAKGETAYLPCKFTLSPEDQGPLDIEWLISPADNQKVDQVIILYSGDKIYDDYYPDLKGRVHFTSNDLKSGDASINVTNLQLSDIGTYQCKVKKAPGVANKKIHLVVLVKPSGARCYVDGSEEIGSDFKIKCEPKEGSLPLQYEWQKLSDSQKMPTSWLAEMTSSVISVKNASSEYSGTYSCTVRNRVGSDQCLLRLNVVPPSNKAGLIAGAIIGTLLALALIGLIIFCCRKKRREEKYEKEVHHDIREDVPPPKSRTSTARSYIGSNHSSLGSMSPSNMEGYSKTQYNQVPSEDFERTPQSPTLPPAKFKYPYKTDGITVV

SEQ ID NO: 3794 - protein, 252 aa, Homo sapiens
MALLLCFVLLCGVVDFARSLSITTPEEMIEKAKGETAYLPCKFTLSPEDQGPLDIEWLISPADNQKVDQVIILYSGDKIYDDYYPDLKGRVHFTSNDLKSGDASINVTNLQLSDIGTYQCKVKKAPGVANKKIHLVVLVKPSGARCYVDGSEEIGSDFKIKCEPKEGSLPLQYEWQKLSDSQKMPTSWLAGKMCHLQRAVRPLPEATSAVIIHPWGPCLLPTWKDIPRLSITKYQVKTLNALLRVRLSHLLR

SEQ ID NO: 3795 - protein, 107 aa, Homo sapiens
MARAALSAAPSNPRLLRVALLLLLLVAAGRRAAGASVATELRCQCLQTLQGIHPKNIQSVNVKSPGPHCAQTEVIATLKNGRKACLNPASPIVKKIIEKMLNSDKSN

SEQ ID NO: 3796 - protein, 98 aa, Homo sapiens
MNQTAILICCLIFLTLSGIQGVPLSRTVRCTCISISNQPVNPRSLEKLEIIPASQFCPRVEIIATMKKKGEKRCLNPESKAIKNLLKAVSKERSKRSP

SEQ ID NO: 3797 - protein, 94 aa, Homo sapiens
MSVKGMAIALAVILCATVVQGFPMFKRGRCLCIGPGVKAVKVADIEKASIMYPSNNCDKIEVIITLKENKGQRCLNPKSKQARLIIKKVERKNF

SEQ ID NO: 3798 - protein, 94 aa, Homo sapiens; identical to SEQ ID NO: 3797

SEQ ID NO: 3799 - protein, 89 aa, Homo sapiens
MNAKVVVVLVLVLTALCLSDGKPVSLSYRCPCRFFESHVARANVKHLKILNTPNCALQIVARLKNNNRQVCIDPKLKWIQEYLEKALNK

SEQ ID NO: 3800 - protein, 119 aa, Homo sapiens
MNAKVVVVLVLVLTALCLSDGKPVSLSYRCPCRFFESHVARANVKHLKILNTPNCALQIVARLKNNNRQVCIDPKLKWIQEYLEKALNKGRREEKVGKKEKIGKKKRQKKRKAAQKRKN

SEQ ID NO: 3801 - protein, 93 aa, Homo sapiens
MNAKVVVVLVLVLTALCLSDGKPVSLSYRCPCRFFESHVARANVKHLKILNTPNCALQIVARLKNNNRQVCIDPKLKWIQEYLEKALNKRFKM

SEQ ID NO: 3802 - protein, 140 aa, Homo sapiens
MNAKVVVVLVLVLTALCLSDGKPVSLSYRCPCRFFESHVARANVKHLKILNTPNCALQIVARLKNNNRQVCIDPKLKWIQEYLEKALNNLISAAPAGKRVIAGARALHPSPPRACPTARALCEIRLWPPPEWSWPSPGDV

SEQ ID NO: 3803 - protein, 103 aa, Homo sapiens
MNAKVVVVLVLVLTALCLSDGKPVSLSYRCPCRFFESHYCTCLIRVSFHGATPLTQGSWVLYSLSCAGGETGLREPGPMVSPRVESHQEGRLGVPGPVNLGKA

SEQ ID NO: 3804 - protein, 103 aa, Homo sapiens; identical to SEQ ID NO: 3803

SEQ ID NO: 3805 - protein, 109 aa, Homo sapiens
MKFISTSLLLMLLVSSLSPVQGVLEVYYTSLRCRCVQESSVFIPRRFIDRIQILPRGNGCPRKEIIVWKKNKSIVCVDPQAEWIQRMMEVLRKRSSSTLPVPVFKRKIP

SEQ ID NO: 3806 - protein, 99 aa, Homo sapiens
MRLLAAALLLLLLALYTARVDGSKCKCSRKGPKIRYSDVKKLEMKPKYPHCEEKMVIITTKSVSRYRGQEHCLHPKLQSTKRFIKWYNAWNEKRRVYEE

SEQ ID NO: 3807 - protein, 111 aa, Homo sapiens
MSLLPRRAPPVSMRLLAAALLLLLLALYTARVDGSKCKCSRKGPKIRYSDVKKLEMKPKYPHCEEKMVIITTKSVSRYRGQEHCLHPKLQSTKRFIKWYNAWNEKRRVYEE

SEQ ID NO: 3808 - protein, 62 aa, Homo sapiens
MKVLISSLLLLLPLMLMSMVSSSLNPGVARGHRDRGQASRRWLQEGGQECECKAMLLFQIGS

SEQ ID NO: 3809 - protein, 119 aa, Homo sapiens
MKVLISSLLLLLPLMLMSMVSSSLNPGVARGHRDRGQASRRWLQEGGQECECKDWFLRAPRRKFMTVSGLPKKQCPCDHFKGNVKKTRHQRHHRKPNKHSRACQQFLKQCQLRSFALPL

SEQ ID NO: 3810 - protein, 107 aa, Homo sapiens
MARATLSAAPSNPRLLRVALLLLLLVAASRRAAGAPLATELRCQCLQTLQGIHLKNIQSVKVKSPGPHCAQTEVIATLKNGQKACLNPASPMVKKIIEKMLKNGKSN

SEQ ID NO: 3811 - protein, 107 aa, Homo sapiens
MAHATLSAAPSNPRLLRVALLLLLLVAASRRAAGASVVTELRCQCLQTLQGIHLKNIQSVNVRSPGPHCAQTEVIATLKNGKKACLNPASPMVQKIIEKILNKGSTN

SEQ ID NO: 3812 - protein, 114 aa, Homo sapiens
MSLLSSRAARVPGPSSSLCALLVLLLLLTQPGPIASAGPAAAVLRELRCVCLQTTQGVHPKMISNLQVFAIGPQCSKVEVVASLKNGKEICLDPEAPFLKKVIQKILDGGNKEN

SEQ ID NO: 3813 - protein, 113 aa, Homo sapiens
MSLPSSRAARVPGPSGSLCALLALLLLLTPPGPLASAGPVSAVLTELRCTCLRVTLRVNPKTIGKLQVFPAGPQCSKVEVVASLKNGKQVCLDPEAPFLKKVIQKILDRYLSL

SEQ ID NO: 3814 - protein, 114 aa, Homo sapiens
MSLPSSRAARVPGPSGSLCALLALLLLLTPPGPLASAGPVSAVLTELRCTCLRVTLRVNPKTIGKLQVFPAGPQCSKVEVVASLKNGKQVCLDPEAPFLKKVIQKILDSGNKKN

SEQ ID NO: 3815 - protein, 95 aa, Homo sapiens
MTSKLAVALLAAFLISAALCEGAVLPRSAKELRCQCIKTYSKPFHPKFIKELRVIESGPHCANTEIIVKLSDGRELCLDPKENWVQRVVEKFLKR

SEQ ID NO: 3816 - protein, 99 aa, Homo sapiens
MTSKLAVALLAAFLISAALCEGAVLPRSAKELRCQCIKTYSKPFHPKFIKELRVIESGPHCANTEIIVKLSDGRELCLDPKENWVQRVVEKFLKRAENS

SEQ ID NO: 3817 - protein, 125 aa, Homo sapiens
MKKSGVLFLLGIILLVLIGVQGTPVVRKGRCSCISTNQGTIHLQSLKDLKQFAPSPSCEKIEIIATLKNGVQTCLNPDSADVKELIKKWEKQVSQKKKQKNGKKHQKKKVLKVRKSQRSRQKKTT

SEQ ID NO: 3818 - protein, 182 aa, Homo sapiens
MEPQLGPEAAALRPGWLALLLWVSALSCSFSLPASSLSSLVPQVRTSYNFGRTFLGLDKCNACIGTSICKKFFKEEIRSDNWLASHLGLPPDSLLSYPANYSDDSKIWRPVEIFRLVSKYQNEISDRRICASASAPKTCSIERVLRKTERFQKWLQAKRLTPDLVQDCHQGQRELKFLCMLR

SEQ ID NO: 3819 - protein, 433 aa, Homo sapiens
MEPQLGPEAAALRPGWLALLLWVSALSCSFSLPASSLSSLVPQVRTSYNFGRTFLGLDKCNACIGTSICKKFFKEEIRSDNWLASHLGLPPDSLLSYPANYSDDSKIWRPVEIFRLVSKYQNEISDRRICASASAPKTCSIERVLRKTERFQKWLQAKRLTPDLVQGLASPLLRCPSQRLLDRVVRRYAEVADAGSIFMDHFTDRDKLRLLYTLAVNSHPILLQIFPGAEGWPLPKYLGSCGRFLVSTSTRPLQEFYDAPPDQAADLAYQLLGVLESLRSNDLNYFFYFTHIDAGMFGVFNNGHLFIRDASAVGVIDKQEGSQEANRAGENKDIFSCLVSGCQAQLPSCESISEKQSLVLVCQKLLPRLLQGRFPSPVQDDIDSILVQCGDSIRPDPEVLGAASQLKDILRPLRTCDSRFAYRYPDCKYNDKF

SEQ ID NO: 3820 - protein, 264 aa, Homo sapiens
MLRCGGRGLLLGLAVAAAAVMAARLMGWWGPRAGFRLFIPEELSRYRGGPGDPGLYLALLGRVYDVSSGRRHYEPGSHYSGFAGRDASRAFVTGDCSEAGLVDDVSDLSAAEMLTLHNWLSFYEKNYVCVGRVTGRFYGEDGLPTPALTQVEAAITRGLEANKLQLQEKQTFPPCNAEWSSARGSRLWCSQKSGGVSRDWIGVPRKLYKPGAKEPRCVCVRTTGPPSGQMPDNPPHRNRGDLDHPNLAEYTGCPPLAITCSFPL

SEQ ID NO: 3821 - protein, 106 aa, Homo sapiens
MLTLHNWLSFYEKNYVCVGRVTGRFYGEDGLPTPALTQVEAAITRGLEANKLQLQEKQTFPPCNAEWSSARGSRLWCSQKRGFNSSLALASGSLKHACHRLILQFL

SEQ ID NO: 3822 - protein, 152 aa, Homo sapiens
MLTLHNWLSFYEKNYVCVGRVTGRFYGEDGLPTPALTQVEAAITRGLEANKLQLQEKQTFPPCNAEWSSARGSRLWCSQKSGGVSRDWIGVPRKLYKPGAKEPRCVCVRTTGPPSGQMPDNPPHRNRGDLDHPNLAEYTGCPPLAITCSFPL

SEQ ID NO: 3823 - protein, 152 aa, Homo sapiens; identical to SEQ ID NO: 3822

SEQ ID NO: 3824 - protein, 42 aa, Homo sapiens
MAPKPGAEWSTALSHLVLGVVSLHAAVSTAEASRGAAAGFLL

SEQ ID NO: 3825 - protein, 362 aa, Homo sapiens
MAPKPGAEWSTALSHLVLGVVSLHAAVSTAEASRGAAAGFLLQVLAATTTLAPGLSTHEDCLAGAWVATVIGLPLLAFDFHWCTNGHLMCAGCFIHLLADARLKEEQATCPNCRCEISKSLCCRNLAVEKAVSELPSECGFCLRQFPRSLLERHQKEECQDRVTQCKYKRIGCPWHGPFHELTVHEAACAHPTKTGSELMEILDGMDQSHRKEMQLYNSIFSLLSFEKIGYTEVQFRPYRTDDFITRLYYETPRFTVLNQTWVLKARVNDSERNPNLSCKRTLSFQLLLKSKVTAPLECSFLLLKGPYDDVRISPVIYHFVFTNESNETDYVPLPIIDSVECNKLLAAKNINLRLFLFQIQK

SEQ ID NO: 3826 - protein, 144 aa, Homo sapiens
MAPKPGAEWSTALSHLVLGVVSLHAAVSTAEASRGAAAGFLLQVLAATTTLAPGLSTHEDCLAGAWVATVIGLPLLAFDFHWVNGDRSSANLLLGGGMVLAVAGGHLGPEGRSVAGQAMLLVVAVTILIVAVFTANTYGMWGGA

SEQ ID NO: 3827 - protein, 192 aa, Homo sapiens
MAPKPGAEWSTALSHLVLGVVSLHAAVSTAEASRGAAAGFLLQVLAATTTLAPGLSTHEDCLAGAWVATVIGLPLLAFDFHWVNGDRSSANLLLGGGMVLAVAGGHLGPEGRSVAGQAMLLVVAVTILIVAVFTANTYGMWGGAMLGVAGLLSRLEEDRLLLLPKEDVCRWALAVGSWAYCRALHTQRLQWE

SEQ ID NO: 3828 - protein, 192 aa, Homo sapiens; identical to SEQ ID NO: 3827

SEQ ID NO: 3829 - protein, 192 aa, Homo sapiens; identical to SEQ ID NO: 3827

SEQ ID NO: 3830 - protein, 246 aa, Homo sapiens
MAPKPGAEWSTALSHLVLGVVSLHAAVSTAECTNGHLMCAGCFIHLLADARLKEEQATCPNCRCEISKSLCCRNLAVEKAVSELPSECGFCLRQFPRSLLERHQKEECQDRVTQCKYKRIGCPWHGPFHELTVHEAACAHPTKTGSELMEILDGMDQSHRKEMQLYNSIFSLLSFEKIGYTEVQFRPYRTDDFITRLYYETPRFTVLNQTWVLKARVNDSERNPNLSCKRTLSFQLLLKSKVTAPL

SEQ ID NO: 3831 - protein, 404 aa, Homo sapiens
MSGAEEAGGGGPAAGPAGSVPAGVGVGVGAGPGAAAGQAAAAALGEAAGPGLPDEAGLAGARQLQLQEAAGDPDAPPKKRLRAAEAAEAAAAAAAAGSGKLEERLYSVLCCTVCLDLPKASVYQCTNGHLMCAGCFIHLLADARLKEEQATCPNCRCEISKSLCCRNLAVEKAVSELPSECGFCLRQFPRSLLERHQKEECQDRVTQCKYKRIGCPWHGPFHELTVHEAACAHPTKTGSELMEILDGMDQSHRKEMQLYNSIFSLLSFEKIGYTEVQFRPYRTDDFITRLYYETPRFTVLNQTWVLKARVNDSERNPNLSCKRTLSFQLLLKSKVTAPLECSFLLLKGPYDDVRISPVIYHFVFTNESNETDYVPLPIIDSVECNKLLAAKNINLRLFLFQIQK

SEQ ID NO: 3832 - protein, 479 aa, Homo sapiens
MWELVALLLLTLAYLFWPKRRCPGAKYPKSLLSLPLVGSLPFLPRHGHMHNNFFKLQKKYGPIYSVRMGTKTTVIVGHHQLAKEVLIKKGKDFSGRPQMATLDIASNNRKGIAFADSGAHWQLHRRLAMATFALFKDGDQKLEKIICQEISTLCDMLATHNGQSIDISFPVFVAVTNVISLICFNTSYKNGDPELNVIQNYNEGIIDNLSKDSLVDLVPWLKEKFRSDSITNMLDTLMQAKMNSDNGNAGPDQDSELLSDNHILTTIGDIFGAGVETTTSVVKWTLAFLLHNPQVKKKLYEEIDQNVGFSRTPTISDRNRLLLLEATIREVLRLRPVAPMLIPHKANVDSSIGEFAVDKGTEVIINLWALHHNEKEWHQPDQFMPERFLNPAGTQLISPSVSYLPFGAGPRSCIGEILARQELFLIMAWLLQRFDLEVPDDGQLPSLEGIPKVVFLIDSFKVKIKVRQAWREAQAEGST

SEQ ID NO: 3833 - protein, 508 aa, Homo sapiens
MWELVALLLLTLAYLFWPKRRCPGAKYPKSLLSLPLVGSLPFLPRHGHMHNNFFKLQKKYGPIYSVRMGTKTTVIVGHHQLAKEVLIKKGKDFSGRPQMATLDIASNNRKGIAFADSGAHWQLHRRLAMATFALFKDGDQKLEKIICQEISTLCDMLATHNGQSIDISFPVFVAVTNVISLICFNTSYKNGDPELNVIQNYNEGIIDNLSKDSLVDLVPWLKIFPNKTLEKLKSHVKIRNDLLNKILENYKEKFRSDSITNMLDTLMQAKMNSDNGNAGPDQDSELLSDNHILTTIGDIFGAGVETTTSVVKWTLAFLLHNPQVKKKLYEEIDQNVGFSRTPTISDRNRLLLLEATIREVLRLRPVAPMLIPHKANVDSSIGEFAVDKGTEVIINLWALHHNEKEWHQPDQFMPERFLNPAGTQLISPSVSYLPFGAGPRSCIGEILARQELFLIMAWLLQRFDLEVPDDGQLPSLEGIPKVVFLIDSFKVKIKVRQAWREAQAEGST

SEQ ID NO: 3834 - protein, 509 aa, Homo sapiens
MWELVALLLLTLAYLFWPKRRCPGAKYPKSLLSLPLVGSLPFLPRHGHMHNNFFKLQKKYGPIYSVRMGTKTTVIVGHHQLAKEVLIKKGKDFSGRPQMATLDIASNNRKGIAFADSGAHWQLHRRLAMATFALFKDGDQKLEKIICQEISTLCDMLATHNGQSIDISFPVFVAVTNVISLICFNTSYKNGDPELNVIQNYNEGIIDNLSKDSLVDLVPWLKIFPNKTLEKLKSHVKIRNDLLNKILENYKEKFRSDSITNMLDTLMQAKMNSDNGNAGPDQDSELLSDNHILTTIGDIFGAGVETTTSVVKWTLAFLLHNPQVKKKLYEEIDQNVGFSRTPTISDRNRLLLLEATIREVLRLRPVAPMLIPHKANVDSSSIGEFAVDKGTEVIINLWALHHNEKEWHQPDQFMPERFLNPAGTQLISPSVSYLPFGAGPRSCIGEILARQELFLIMAWLLQRFDLEVPDDGQLPSLEGIPKVVFLIDSFKVKIKVRQAWREAQAEGST

SEQ ID NO: 3835 - protein, 407 aa, Homo sapiens
MWELVALLLLTLAYLFWPKRRCPGAKYPKSLLSLPLVGSLPFLPRHGHMHNNFFKLQKKYGPIYSVRMGTKTTVIVGHHQLAKEVLIKKGKDFSGRPQMATLDIASNNRKGIAFADSGAHWQLHRRLAMATFALFKDGDQKLEKIICQEISTLCDMLATHNGQSIDISFPVFVAVTNVISLICFNTSYKNGDPELNVIQNYNEGIIDNLSKDSLVDLVPWLKVKKKLYEEIDQNVGFSRTPTISDRNRLLLLEATIREVLRLRPVAPMLIPHKANVDSSIGEFAVDKGTEVIINLWALHHNEKEWHQPDQFMPERFLNPAGTQLISPSVSYLPFGAGPRSCIGEILARQELFLIMAWLLQRFDLEVPDDGQLPSLEGIPKVVFLIDSFKVKIKVRQAWREAQAEGST

SEQ ID NO: 3836 - protein, 356 aa, Homo sapiens
MWELVALLLLTLAYLFWPKRRCPGAKYPKSLLSLPLVGSLPFLPRHGHMHNNFFKLQKKYGPIYSVRMGTKTTVIVGHHQLAKEVLIKKGKDFSGRPQMEKFRSDSITNMLDTLMQAKMNSDNGNAGPDQDSELLSDNHILTTIGDIFGAGVETTTSVVKWTLAFLLHNPQVKKKLYEEIDQNVGFSRTPTISDRNRLLLLEATIREVLRLRPVAPMLIPHKANVDSSIGEFAVDKGTEVIINLWALHHNEKEWHQPDQFMPERFLNPAGTQLISPSVSYLPFGAGPRSCIGEILARQELFLIMAWLLQRFDLEVPDDGQLPSLEGIPKVVFLIDSFKVKIKVRQAWREAQAEGST

SEQ ID NO: 3837 - protein, 192 aa, Homo sapiens
MIFSLASCIITAKLCTWAICFLTTSEEVQKKLYEEINQVFGNGPVTPEKIEQLRYCQHVLCETVRTAKLTPVSAQLQDIEGKIDRFIIPRETLVLYALGVVLQDPNTWPSPHKFDPDRFDDELVMKTFSSLGFSGTQECPELRFAYMVTTVLLSVLVKRLHLLSVEGQVIETKYELVTSSREEAWITVSKRY

SEQ ID NO: 3838 - protein, 258 aa, Homo sapiens
MLDFAIFAVTFLLALVGAVLYLYPASRQAAGIPGITPTEEKDGNLPDIVNSGSLHEFLVNLHERYGPVVSFWFGRRLVVSLGTVDVLKQHINPNKTSDPFETMLKSLLRYQSGGGSVSENHMRKKLYENGVTDSLKSNFALLLKLSEELLDKWLSYPETQHVPLSQHMLGFAMKSVTQMVMGSTFEDDQEVIRFQKNHGTILEDSMIFSLASCIITAKLCTWAICFLTTSEEVQKKLYEEINQVFGNGPVTPEKIEQL

SEQ ID NO: 3839 - protein, 470 aa, Homo sapiens
MLDFAIFAVTFLLALVGAVLYLYPASRQAAGIPGITPTEEKDGNLPDIVNSGSLHEFLVNLHERYGPVVSFWFGRRLVVSLGTVDVLKQHINPNKTSDPFETMLKSLLRYQSGGGSVSENHMRKKLYENGVTDSLKSNFALLLKLSEELLDKWLSYPETQHVPLSQHMLGFAMKSVTQMVMGSTFEDDQEVIRFQKNHGTLCIFTYFQVWSEIGKGFLDGSLDKNMTRKKQYEDALMQLESVLRNIIKERKGRNFSQHIFIDSLVQGNLNDQQILEDSMIFSLASCIITAKLCTWAICFLTTSEEVQKKLYEEINQVFGNGPVTPEKIEQLRYCQHVLCETVRTAKLTPVSAQLQDIEGKIDRFIIPRETLVLYALGVVLQDPNTWPSPHKFDPDRFDDELVMKTFSSLGFSGTQECPELRFAYMVTTVLLSVLVKRLHLLSVEGQVIETKYELVTSSREEAWITVSKRY

SEQ ID NO: 3840 - protein, 208 aa, Homo sapiens
MLDFAIFAVTFLLALVGAVLYLYPASRQAAGIPGITPTEEKDGNLPDIVNSGSLHEFLVNLHERYGPVVSFWFGRRLVVSLGTVDVLKQHINPNKTSDPFETMLKSLLRYQSGGGSVSENHMRKKLYENGVTDSLKSNFALLLKLSEELLDKWLSYPETQHVPLSQHMLGFAMKSVTQMVMGSTFEDDQEVIRFQKNHGTPSCNWSLF

SEQ ID NO: 3841 - protein, 462 aa, Homo sapiens
MLDFAIFAVTFLLALVGAVLYLYPASRQAAGIPGITPTEEKDGNLPDIVNSGSLHEFLVNLHERYGPVVSFWFGRRLVVSLGTVDVLKQHINPNKTSDPFETMLKSLLRYQSGGGSVSENHMRKKLYENGVTDSLKSNFALLLKLSEELLDKWLSYPETQHVPLSQHMLGFAMKSVTQMVMGSTFEDDQEVIRFQKNHGTVWSEIGKGFLDGSLDKNMTRKKQYEDALMQLESVLRNIIKERKGRNFSQHIFIDSLVQGNLNDQQILEDSMIFSLASCIITAKLCTWAICFLTTSEEVQKKLYEEINQVFGNGPVTPEKIEQLRYCQHVLCETVRTAKLTPVSAQLQDIEGKIDRFIIPRETLVLYALGVVLQDPNTWPSPHKFDPDRFDDELVMKTFSSLGFSGTQECPELRFAYMVTTVLLSVLVKRLHLLSVEGQVIETKYELVTSSREEAWITVSKRY

SEQ ID NO: 3842 - protein, 44 aa, Homo sapiens
MLDFAIFAVTFLLALVGAVLYLYPASRQAAGIPGITPTEENGPF

SEQ ID NO: 3843 - protein, 44 aa, Homo sapiens; identical to SEQ ID NO: 3842

SEQ ID NO: 3844 - protein, 78 aa, Homo sapiens
MLLLGLLLLLPLLAGARLLWNWWKLRSLHLPPLAPGFLHLLQPDLPIYLLGLTQKFGPIYRLHLGLQAPTSSCRQAGV

SEQ ID NO: 3845 - protein, 465 aa, Homo sapiens
MLLLGLLLLLPLLAGARLLWNWWKLRSLHLPPLAPGFLHLLQPDLPIYLLGLTQKFGPIYRLHLGLQDKLVSRNYPDLSLGDYSLLWKAHKKLTRSALLLGIRDSMEPVVEQLTQEFCERMRAQPGTPVAIEEEFSLLTCSIICYLTFGDKIKDDNLMPAYYKCIQEVLKTWSHWSIQIVDVIPFLRFFPNPGLRRLKQAIEKRDHIVEMQLRQHKESLVAGQWRDMMDYMLQGVAQPSMEEGSGQLLEGHVHMAAVDLLIGGTETTANTLSWAVVFLLHHPEIQQRLQEELDHELGPGASSSRVPYKDRARLPLLNATIAEVLRLRPVVPLALPHRTTRPSSISGYDIPEGTVIIPNLQGAHLDETVWERPHEFWPDRFLEPGKNSRALAFGCGARVCLGEPLARLELFVVLTRLLQAFTLLPSGDALPSLQPLPHCSVILKMQPFQVRLQPRGMGAHSPGQSQ

SEQ ID NO: 3846 - protein, 186 aa, Homo sapiens
MLLLGLLLLLPLLAGARLLWNWWKLRSLHLPPLAPGFLHLLQPDLPIYLLGLTQKFGPIYRLHLGLQDVVVLNSKRTIEEAMVKKWADFAGRPEPLTFPTLQPPPPPADKLVSRNYPDLSLGDYSLLWKAHKKLTRSALLLGIRDSMEPVVEQLTQEFCERMRAQPGTPVAIEEEFSLLTCSIICY

SEQ ID NO: 3847 - protein, 108 aa, Homo sapiens
MLLLGLLLLLPLLAGARLLWNWWKLRSLHLPPLAPGFLHLLQPDLPIYLLGLTQKFGPIYRLHLGLQDVVVLNSKRTIEEAMVKKWADFAGRPEPLTSPTSSCRQAGV

SEQ ID NO: 3848 - protein, 495 aa, Homo sapiens
MLLLGLLLLLPLLAGARLLWNWWKLRSLHLPPLAPGFLHLLQPDLPIYLLGLTQKFGPIYRLHLGLQDVVVLNSKRTIEEAMVKKWADFAGRPEPLTYKLVSRNYPDLSLGDYSLLWKAHKKLTRSALLLGIRDSMEPVVEQLTQEFCERMRAQPGTPVAIEEEFSLLTCSIICYLTFGDKIKDDNLMPAYYKCIQEVLKTWSHWSIQIVDVIPFLRFFPNPGLRRLKQAIEKRDHIVEMQLRQHKESLVAGQWRDMMDYMLQGVAQPSMEEGSGQLLEGHVHMAAVDLLIGGTETTANTLSWAVVFLLHHPEIQQRLQEELDHELGPGASSSRVPYKDRARLPLLNATIAEVLRLRPVVPLALPHRTTRPSSISGYDIPEGTVIIPNLQGAHLDETVWERPHEFWPDRFLEPGKNSRALAFGCGARVCLGEPLARLELFVVLTRLLQAFTLLPSGDALPSLQPLPHCSVILKMQPFQVRLQPRGMGAHSPGQSQ

SEQ ID NO: 3849 - protein, 495 aa, Homo sapiens; identical to SEQ ID NO: 3848

SEQ ID NO: 3850 - protein, 495 aa, Homo sapiens; identical to SEQ ID NO: 3848

SEQ ID NO: 3851 - protein, 190 aa, Homo sapiens
MLLLGLLLLLPLLAGARLLWNWWKLRSLHLPPLAPGFLHLLQPDLPIYLLGLTQKFGPIYRLHLGLQDVVVLNSKRTIEEAMVKKWADFAGRPEPLTYKLVSRNYPDLSLGDYSLLWKAHKKLTRSALLLGIRDSMEPVVEQLTQEFCERMRAQPGTPVAIEEEFSLLTCSIICYLTFGDKIKEVLKTWS

SEQ ID NO: 3852 - protein, 321 aa, Homo sapiens
MAIRVLLGFSIPEEDLGHLFEVYQQFVDNVFSLPVDLPFSGYRRGIQARQILQKGLEKAIREKLQCTQGKDYLDALDLLIESSKEHGKEMTMQELKDGTLELIFAAYATTASASTSLIMQLLKHPTVLEKLRDELRAHGILHSGGCPCEGTLRLDTLSGLRYLDCVIKEVMRLFTPISGGYRTVLQTFELDGFQIPKGWSVMYSIRDTHDTAPVFKDVNVFDPDRFSQARSEDKDGRFHYLPFGGGVRTCLGKHLAKLFLKVLAVELASTSRFELATRTFPRITLVPVLHPVDGLSVKFFGLDSNQNEILPETEAMLSATV

SEQ ID NO: 3853 - protein, 172 aa, Homo sapiens
MKNKTCVLVCVSVFGGERGQVTVPRVGVRRPSLAGPLQKCTLRETRVWLPQGSGFQSSRREKYGNVFKTHLLGRPLIRVTGAENVRKILMGEHHLVSTEWPRSTRMLLGPNTVSNSIGDIHRNKRKVFSKIFSHEALESYLPKIQLVIQDTLRAWSSHPEAINVYQEAQKLT

SEQ ID NO: 3854 - protein, 512 aa, Homo sapiens
MLFEGLDLVSALATLAACLVSVTLLLAVSQQLWQLRWAATRDKSCKLPIPKGSMGFPLIGETGHWLLQGSGFQSSRREKYGNVFKTHLLGRPLIRVTGAENVRKILMGEHHLVSTEWPRSTRMLLGPNTVSNSIGDIHRNKRKVFSKIFSHEALESYLPKIQLVIQDTLRAWSSHPEAINVYQEAQKLTFRMAIRVLLGFSIPEEDLGHLFEVYQQFVDNVFSLPVDLPFSGYRRGIQARQILQKGLEKAIREKLQCTQGKDYLDALDLLIESSKEHGKEMTMQELKDGTLELIFAAYATTASASTSLIMQLLKHPTVLEKLRDELRAHGILHSGGCPCEGTLRLDTLSGLRYLDCVIKEVMRLFTPISGGYRTVLQTFELDGFQIPKGWSVMYSIRDTHDTAPVFKDVNVFDPDRFSQARSEDKDGRFHYLPFGGGVRTCLGKHLAKLFLKVLAVELASTSRFELATRTFPRITLVPVLHPVDGLSVKFFGLDSNQNEILPETEAMLSATV

SEQ ID NO: 3855 - protein, 182 aa, Homo sapiens
MLFEGLDLVSALATLAACLVSVTLLLAVSQQLWQLRWAATRDKSCKLPIPKGSMGFPLIGETGHWLLQVFSKIFSHEALESYLPKIQLVIQDTLRAWSSHPEAINVYQEAQKLTFRMAIRVLLGFSIPEEDLGHLFEVYQQFVDNVFSLPVDLPFSGYRRGIQARQILQKGLEKAIREKLQC

SEQ ID NO: 3856 - protein, 437 aa, Homo sapiens
MLFEGLDLVSALATLAACLVSVTLLLAVSQQLWQLRWAATRDKSCKLPIPKGSMGFPLIGETGHWLLQVFSKIFSHEALESYLPKIQLVIQDTLRAWSSHPEAINVYQEAQKLTFRMAIRVLLGFSIPEEDLGHLFEVYQQFVDNVFSLPVDLPFSGYRRGIQARQILQKGLEKAIREKLQCTQGKDYLDALDLLIESSKEHGKEMTMQELKDGTLELIFAAYATTASASTSLIMQLLKHPTVLEKLRDELRAHGILHSGGCPCEGTLRLDTLSGLRYLDCVIKEVMRLFTPISGGYRTVLQTFELDGFQIPKGWSVMYSIRDTHDTAPVFKDVNVFDPDRFSQARSEDKDGRFHYLPFGGGVRTCLGKHLAKLFLKVLAVELASTSRFELATRTFPRITLVPVLHPVDGLSVKFFGLDSNQNEILPETEAMLSATV

SEQ ID NO: 3857 - protein, 494 aa, Homo sapiens
MLASGMLLVALLVCLTVMVLMSVWQQRKSKGKLPPGPTPLPFIGNYLQLNTEQMYNSLMKISERYGPVFTIHLGPRRVVVLCGHDAVREALVDQAEEFSGRGEQATFDWVFKGYGVVFSNGERAKQLRRFSIATLRDFGVGKRGIEERIQEEAGFLIDALRGTGGANIDPTFFLSRTVSNVISSIVFGDRFDYKDKEFLSLLRMMLGIFQFTSTSTGQLYEMFSSVMKHLPGPQQQAFQLLQGLEDFIAKKVEHNQRTLDPNSPRDFIDSFLIRMQEEEKNPNTEFYLKNLVMTTLNLFIGGTETVSTTLRYGFLLLMKHPEVEAKVHEEIDRVIGKNRQPKFEDRAKMPYMEAVIHEIQRFGDVIPMSLARRVKKDTKFRDFFLPKGTEVYPMLGSVLRDPSFFSNPQDFNPQHFLNEKGQFKKSDAFVPFSIGKRNCFGEGLARMELFLFFTTVMQNFRLKSSQSPKDIDVSPKHVGFATIPRNYTMSFLPR

SEQ ID NO: 3858 - protein, 65 aa, Homo sapiens
MLASGMLLVALLVCLTVMVLMSVWQQRKSKGKLPPGPTPLPFIGNYLQLNTEQMYNSLMKVSQDQ

SEQ ID NO: 3859 - protein, 80 aa, Homo sapiens
MLASGLLLVALLACLTVMVLMSVWQQRKSRGKLPPGPTPLPFIGNYLQLNTEHICDSIMKAWRSATGSAPSSSCALPSPP

SEQ ID NO: 3860 - protein, 494 aa, Homo sapiens
MLASGLLLVALLACLTVMVLMSVWQQRKSRGKLPPGPTPLPFIGNYLQLNTEHICDSIMKFSECYGPVFTIHLGPRRVVVLCGHDAVREALVDQAEEFSGRGEQATFDWVFKGYGVAFSNGERAKQLLRFAIATLRDFGVGKRGIEERIQEESGFLIEAIRSTHGANIDPTFFLSRTVSNVISSIVFGDRFDYEDKEFLSLLSMMLGIFQFTSTSTGQLYEMFSSVMKHLPGPQQQAFKLLQGLEDFIAKKVEHNQRTLDPNSPQDFIDSFLIHMQEEEKNPNTEFYLKNLMMSTLNLFIAGTETVSTTLRYGFLLLMKHPEVEAKVHEEIDRVIGKNRQPKFEDRTKMPYMEAVIHEIQRFGDVIPMSLARRVKKDTKFRDFFLPKGTEVFPMLGSVLRDPSFFSNPQDFNPQHFLDDKGQFKKSDAFVPFSIGKRNCFGEGLARMELFLFFTTVMQNFRLKSSQSPKDIDVSPKHVVFATIPRNYTMSFLPR

SEQ ID NO: 3861 - protein, 443 aa, Homo sapiens
MLASGLLLVALLACLTVMVLMSVWQQRKSRGKLPPGPTPLPFIGNYLQLNTEHICDSIMKVSQGVAFSNGERAKQLLRFAIATLRDFGVGKRGIEERIQEESGFLIEAIRSTHGANIDPTFFLSRTVSNVISSIVFGDRFDYEDKEFLSLLSMMLGIFQFTSTSTGQLYEMFSSVMKHLPGPQQQAFKLLQGLEDFIAKKVEHNQRTLDPNSPQDFIDSFLIHMQEEEKNPNTEFYLKNLMMSTLNLFIAGTETVSTTLRYGFLLLMKHPEVEAKVHEEIDRVIGKNRQPKFEDRTKMPYMEAVIHEIQRFGDVIPMSLARRVKKDTKFRDFFLPKGTEVFPMLGSVLRDPSFFSNPQDFNPQHFLDDKGQFKKSDAFVPFSIGKRNCFGEGLARMELFLFFTTVMQNFRLKSSQSPKDIDVSPKHVVFATIPRNYTMSFLPR

SEQ ID NO: 3862 - protein, 491 aa, Homo sapiens
MELSVLLFLALLTGLLLLLVQRHPNTHDRLPPGPRPLPLLGNLLQMDRRGLLKSFLRFREKYGDVFTVHLGPRPVVMLCGVEAIREALVDKAEAFSGRGKIAMVDPFFRGYGVIFANGNRWKVLRRFSVTTMRDFGMGKRSVEERIQEEAQCLIEELRKSKGALMDPTFLFQSITANIICSIVFGKRFHYQDQEFLKMLNLFYQTFSLISSVFGQLFELFSGFLKYFPGAHRQVYKNLQEINAYIGHSVEKHRETLDPSAPKDLIDTYLLHMEKEKSNAHSEFSHQNLNLNTLSLFFAGTETTSTTLRYGFLLMLKYPHVAERVYREIEQVIGPHRPPELHDRAKMPYTEAVIYEIQRFSDLLPMGVPHIVTQHTSFRGYIIPKDTEVFLILSTALHDPHYFEKPDAFNPDHFLDANGALKKTEAFIPFSLGKRICLGEGIARAELFLFFTTILQNFSMASPVAPEDIDLTPQECGVGKIPPTYQIRFLPR

SEQ ID NO: 3863 - protein, 491 aa, Homo sapiens; identical to SEQ ID NO: 3862

SEQ ID NO: 3864 - protein, 255 aa, Homo sapiens
MLCGVEAIREALVDKAEAFSGRGKIAMVDPFFRGYGVIFANGNRWKVLRRFSVTTMRDFGMGKRSVEERIQEEAQCLIEELRKSKERVYREIEQVIGPHRPPELHDRAKMPYTEAVIYEIQRFSDLLPMGVPHIVTQHTSFRGYIIPKDTEVFLILSTALHDPHYFEKPDAFNPDHFLDANGALKKTEAFIPFSLGKRICLGEGIARAELFLFFTTILQNFSMASPVAPEDIDLTPQECGVGKIPPTYQIRFLPR

SEQ ID NO: 3865 - protein, 194 aa, Homo sapiens
  SITE 1: note = misc_feature - Xaa can be any naturally occurring amino acid
XPRPLPLLGNLLQMDRRGLLKSFLRFREKYGDVFTVHLGPRPVVMLCGVEAIREALVDKAEAFSGRGKIAMVDPFFRGYGVIFANGNRWKVLRRFSVTTMRDFGMGKRSVEERIQEEAQCLIEELRKSKGALMDPTFLFQSITANIICSIVFGKRFHYQDQEFLKMLNLFYQTFSLISSVFGQTESRCFIPAGV

SEQ ID NO: 3866 - protein, 431 aa, Homo sapiens
MDPAVALVLCLSCLFLLSLWRQSSGRGRLPSGPTPLPIIGNILQLDVKDMSKSLTNFSKVYGPVFTVYFGLKPIVVLHGYEAVKEALIDHGEEFSGRGSFPVAEKVNKGLGILFSNGKRWKEIRRFCLMTLRNFGMGKRSIEDRVQEEARCLVEELRKTNASPCDPTFILGCAPCNVICSVIFHDRFDYKDQRFLNLMEKFNENLRILSSPWIQEKHNQQSEFTVESLIATVTDMFGAGTETTSTTLRYGLLLLLKYPEVTAKVQEEIECVVGRNRSPCMQDRSHMPYTDAVVHEIQRYIDLLPTNLPHAVTCDVKFKNYLIPKGTTIITSLTSVLHNDKEFPNPEMFDPGHFLDKSGNFKKSDYFMPFSAGKRMCMGEGLARMELFLFLTTILQNFNLKSQVDPKDIDITPIANAFGRVPPLYQLCFIPV

SEQ ID NO: 3867 - protein, 490 aa, Homo sapiens
MDPAVALVLCLSCLFLLSLWRQSSGRGRLPSGPTPLPIIGNILQLDVKDMSKSLTNFSKVYGPVFTVYFGLKPIVVLHGYEAVKEALIDHGEEFSGRGSFPVAEKVNKGLGILFSNGKRWKEIRRFCLMTLRNFGMGKRSIEDRVQEEARCLVEELRKTNASPCDPTFILGCAPCNVICSVIFHDRFDYKDQRFLNLMEKFNENLRILSSPWIQVCNNFPALIDYLPGSHNKIAENFAYIKSYVLERIKEHQESLDMNSARDFIDCFLIKMEQEKHNQQSEFTVESLIATVTDMFGAGTETTSTTLRYGLLLLLKYPEVTAKVQEEIECVVGRNRSPCMQDRSHMPYTDAVVHEIQRYIDLLPTNLPHAVTCDVKFKNYLIPKGTTIITSLTSVLHNDKEFPNPEMFDPGHFLDKSGNFKKSDYFMPFSAGKRMCMGEGLARMELFLFLTTILQNFNLKSQVDPKDIDITPIANAFGRVPPLYQLCFIPV

SEQ ID NO: 3868 - protein, 490 aa, Homo sapiens
MDPFVVLVLCLSCLLLLSIWRQSSGRGKLPPGPTPLPVIGNILQIDIKDVSKSLTNLSKIYGPVFTLYFGLERMVVLHGYEVVKEALIDLGEEFSGRGHFPLAERANRGFGIVFSNGKRWKEIRRFSLMTLRNFGMGKRSIEDRVQEEARCLVEELRKTKASPCDPTFILGCAPCNVICSIIFQKRFDYKDQQFLNLMEKLNENIRIVSTPWIQICNNFPTIIDYFPGTHNKLLKNLAFMESDILEKVKEHQESMDINNPRDFIDCFLIKMEKEKQNQQSEFTIENLVITAADLLGAGTETTSTTLRYALLLLLKHPEVTAKVQEEIERVIGRNRSPCMQDRGHMPYTDAVVHEVQRYIDLIPTSLPHAVTCDVKFRNYLIPKGTTILTSLTSVLHDNKEFPNPEMFDPRHFLDEGGNFKKSNYFMPFSAGKRICVGEGLARMELFLFLTFILQNFNLKSLIDPKDLDTTPVVNGFASVPPFYQLCFIPV

SEQ ID NO: 3869 - protein, 162 aa, Homo sapiens
MDPFVVLVLCLSCLLLLSIWRQSSGRGKLPPGPTPLPVIGNILQIDIKDVSKSLTNLSKIYGPVFTLYFGLERMVVLHGYEVVKEALIDLGEEFSGRGHFPLAERANRGFGIVFSNGKRWKEIRRFSLMTLRNFGMGKRSIEDRVQEEARCLVEELRKTKGG

SEQ ID NO: 3870 - protein, 307 aa, Homo sapiens
MAAKCCSTFFLGCEFSQFLPLFLLGIISSNGKRWKEIRRFSLTTLRNFGMGKRSIEDRVQEEAHCLVEELRKTKASPCDPTFILGCAPCNVICSVVFQKRFDYKDQNFLTLMKRFNENFRILNSPWIQVCNNFPLLIDCFPGTHNKVLKNVALTRSYIREKVKEHQASLDVNNPRDFIDCFLIKMEQEKDNQKSEFNIENLVGTVADLFVAGTETTSTTLRYGLLLLLKHPEVTAKVQEEIDHVIGRHRSPCMQDRSHMPYTDAVVHEIQRYSDLVPTGVPHAVTTDTKFRNYLIPKSFDNKIMLAA

SEQ ID NO: 3871 - protein, 490 aa, Homo sapiens
MEPFVVLVLCLSFMLLFSLWRQSCRRRKLPPGPTPLPIIGNMLQIDVKDICKSFTNFSKVYGPVFTVYFGMNPIVVFHGYEAVKEALIDNGEEFSGRGNSPISQRITKGLGIISSNGKRWKEIRRFSLTTLRNFGMGKRSIEDRVQEEAHCLVEELRKTKASPCDPTFILGCAPCNVICSVVFQKRFDYKDQNFLTLMKRFNENFRILNSPWIQVCNNFPLLIDCFPGTHNKVLKNVALTRSYIREKVKEHQASLDVNNPRDFIDCFLIKMEQEKDNQKSEFNIENLVGTVADLFVAGTETTSTTLRYGLLLLLKHPEVTAKVQEEIDHVIGRHRSPCMQDRSHMPYTDAVVHEIQRYSDLVPTGVPHAVTTDTKFRNYLIPKGTTIMALLTSVLHDDKEFPNPNIFDPGHFLDKNGNFKKSDYFMPFSAGKRICAGEGLARMELFLFLTTILQNFNLKSVDDLKNLNTTAVTKGIVSLPPSYQICFIPV

SEQ ID NO: 3872 - protein, 393 aa, Homo sapiens
MEPFVVLVLCLSFMLLFSLWRQSCRRRKLPPGPTPLPIIGNMLQIDVKDICKSFTNFSKVYGPVFTVYFGMNPIVVFHGYEAVKEALIDNGEEFSGRGNSPISQRITKGLGIISSNGKRWKEIRRFSLTTLRNFGMGKRSIEDRVQEEAHCLVEELRKTKASPCDPTFILGCAPCNVICSVVFQKRFDYKDQNFLTLMKRFNENFRILNSPWIQVCNNFPLLIDCFPGTHNKVLKNVALTRSYIREKVKEHQASLDVNNPRDFIDCFLIKMEQEKDNQKSEFNIENLVGTVADLFVAGTETTSTTLRYGLLLLLKHPEVTAKVQEEIDHVIGRHRSPCMQDRSHMPYTDAVVHEIQRYSDLVPTGVPHAVTTDTKFRNYLIPKSFDNKIMLAA

SEQ ID NO: 3873 - protein, 99 aa, Homo sapiens
MEPFVVLVLCLSFMLLFSLWRQSCRRRKLPPGPTPLPIIGNMLQIDVKDICKSFTNVSLPYVPPANCKGNHFQQWKEMEGDPAFLPHNLAEFWDGEEEH

SEQ ID NO: 3874 - protein, 83 aa, Homo sapiens
MEPFVVLVLCLSFMLLFSLWRQSCRRRKLPPGPTPLPIIGNMLQIDVKDICKSFTNVSLPYVPPANCKGSQKSMVLCSPCILA

SEQ ID NO: 3875 - protein, 388 aa, Homo sapiens
MFLQPIAKGIISSNGKRWKEIRRFSLTTLRNFGMGKRSIEDRVQEEAHCLVEELRKTKASPCDPTFILGCAPCNVICSVVFQKRFDYKDQNFLTLMKRFNENFRILNSPWIQVCNNFPLLIDCFPGTHNKVLKNVALTRSYIREKVKEHQASLDVNNPRDFIDCFLIKMEQEKDNQKSEFNIENLVGTVADLFVAGTETTSTTLRYGLLLLLKHPEVTAKVQEEIDHVIGRHRSPCMQDRSHMPYTDAVVHEIQRYSDLVPTGVPHAVTTDTKFRNYLIPKGTTIMALLTSVLHDDKEFPNPNIFDPGHFLDKNGNFKKSDYFMPFSAGKRICAGEGLARMELFLFLTTILQNFNLKSVDDLKNLNTTAVTKGIVSLPPSYQICFIPV

SEQ ID NO: 3876 - protein, 420 aa, Homo sapiens
MNPIVVFHGYEAVKEALIDNGEEFSGRGNSPISQRITKGLGIISSNGKRWKEIRRFSLTTLRNFGMGKRSIEDRVQEEAHCLVEELRKTKASPCDPTFILGCAPCNVICSVVFQKRFDYKDQNFLTLMKRFNENFRILNSPWIQVCNNFPLLIDCFPGTHNKVLKNVALTRSYIREKVKEHQASLDVNNPRDFIDCFLIKMEQEKDNQKSEFNIENLVGTVADLFVAGTETTSTTLRYGLLLLLKHPEVTAKVQEEIDHVIGRHRSPCMQDRSHMPYTDAVVHEIQRYSDLVPTGVPHAVTTDTKFRNYLIPKGTTIMALLTSVLHDDKEFPNPNIFDPGHFLDKNGNFKKSDYFMPFSAGKRICAGEGLARMELFLFLTTILQNFNLKSVDDLKNLNTTAVTKGIVSLPPSYQICFIPV

SEQ ID NO: 3877 - protein, 420 aa, Homo sapiens; identical to SEQ ID NO: 3876

SEQ ID NO: 3878 - protein, 490 aa, Homo sapiens [sequence omitted]

SEQ ID NO: 3879 - protein, 282 aa, Homo sapiens
MDSLVVLVLCLSCLLLLSLWRQSSGRGKLPPGPTPLPVIGNILQIGIKDISKSLTNLSKVYGPVFTLYFGLKPIVVLHGYEAVKEALIDLGEEFSGRGIFPLAERANRGFGIVFSNGKKWKEIRRFSLMTLRNFGMGKRSIEDRVQEEARCLVEELRKTKASPCDPTFILGCAPCNVICSIIFHKRFDYKDQQFLNLMEKLNENIKILSSPWIQICNNFSPIIDYFPGTHNKLLKNVAFMKSYILEKVKEHQESMDMNNPQDFIDCFLMKMEKLKSRKRLNV

SEQ ID NO: 3880 - protein, 162 aa, Homo sapiens
MDSLVVLVLCLSCLLLLSLWRQSSGRGKLPPGPTPLPVIGNILQIGIKDISKSLTNLSKVYGPVFTLYFGLKPIVVLHGYEAVKEALIDLGEEFSGRGIFPLAERANRGFGIVFSNGKKWKEIRRFSLMTLRNFGMGKRSIEDRVQEEARCLVEELRKTKGG

SEQ ID NO: 3881 - protein, 86 aa, Homo sapiens
MSALGVTVALLVWAAFLLLVSMWRQVHSSWNLPPGPFPLPIIGNLFQLELKNIPKSFTRLAQRFGPVFTLYVGSQRMVVMHGYKAV

SEQ ID NO: 3882 - protein, 493 aa, Homo sapiens
MSALGVTVALLVWAAFLLLVSMWRQVHSSWNLPPGPFPLPIIGNLFQLELKNIPKSFTRLAQRFGPVFTLYVGSQRMVVMHGYKAVKEALLDYKDEFSGRGDLPAFHAHRDRGIIFNNGPTWKDIRRFSLTTLRNYGMGKQGNESRIQREAHFLLEALRKTQGQPFDPTFLIGCAPCNVIADILFRKHFDYNDEKFLRLMYLFNENFHLLSTPWLQLYNNFPSFLHYLPGSHRKVIKNVAEVKEYVSERVKEHHQSLDPNCPRDLTDCLLVEMEKEKHSAERLYTMDGITVTVADLFFAGTETTSTTLRYGLLILMKYPEIEEKLHEEIDRVIGPSRIPAIKDRQEMPYMDAVVHEIQRFITLVPSNLPHEATRDTIFRGYLIPKGTVVVPTLDSVLYDNQEFPDPEKFKPEHFLNENGKFKYSDYFKPFSTGKRVCAGEGLARMELFLLLCAILQHFNLKPLVDPKDIDLSPIHIGFGCIPPRYKLCVIPRS

SEQ ID NO: 3883 - protein, 493 aa, Homo sapiens; identical to SEQ ID NO: 3882

SEQ ID NO: 3884 - protein, 356 aa, Homo sapiens
RPFPASHHREPLPVGIEEYSQVLHPGIIFNNGPTWKDIRRFSLTTLRNYGMGKQGNESRIQREAHFLLEALRKTQGQPFDPTFLIGCAPCNVIADILFRKHFDYNDEKFLRLMYLFNENFHLLSTPWLQLYNNFPSFLHYLPGSHRKVIKNVAEVKEYVSERVKEHHQSLDPNCPRDLTDCLLVEMEKEKHSAERLYTMDGITVTVADLFFAGTETTSTTLRYGLLILMKYPEIEEKLHEEIDRVIGPSRIPAIKDRQEMPYMDAVVHEIQRFITLVPSNLPHEATRDTIFRGYLIPKGTVVVPTLDSVLYDNQEFPDPEKFKPEHFLNENGKFKYSDYFKPFSTGKRVCAGEGLA

SEQ ID NO: 3885 - protein, 306 aa, Homo sapiens
RPFPASHHREPLPVGIEEYSQVLHPGQPFDPTFLIGCAPCNVIADILFRKHFDYNDEKFLRLMYLFNENFHLLSTPWLQLYNNFPSFLHYLPGSHRKVIKNVAEVKEYVSERVKEHHQSLDPNCPRDLTDCLLVEMEKEKHSAERLYTMDGITVTVADLFFAGTETTSTTLRYGLLILMKYPEIEEKLHEEIDRVIGPSRIPAIKDRQEMPYMDAVVHEIQRFITLVPSNLPHEATRDTIFRGYLIPKGTVVVPTLDSVLYDNQEFPDPEKFKPEHFLNENGKFKYSDYFKPFSTGKRVCAGEGLA

SEQ ID NO: 3886 - protein, 43 aa, Homo sapiens
  SITE 1: note = misc_feature - Xaa can be any naturally occurring amino acid
XGPFPLPIIGNLFQLELKNIPKSFTRESFLIMDLPGRTSGGFP

SEQ ID NO: 3887 - protein, 172 aa, Homo sapiens
ARVQEEIDLVVGRARLPALKDRAAMPYTDAVIHEVQRFADIIPMNLPHRVTRDTAFRGFLIPKGTDVITLLNTVHYDPSQFLTPQEFNPEHFLDANQSFKKSPAFMPFSAGEGRNQSLSGPISTYIPHPNSTCQILSLLPSTHSQLWMHRDIHSSSQLCSYRQVVTKILVKQ

SEQ ID NO: 3888 - protein, 491 aa, Homo sapiens
MDSISTAILLLLLALVCLLLTLSSRDKGKLPPGPRPLSILGNLLLLCSQDMLTSLTKLSKEYGSMYTVHLGPRRVVVLSGYQAVKEALVDQGEEFSGRGDYPAFFNFTKGNGIAFSSGDRWKVLRQFSIQILRNFGMGKRSIEERILEEGSFLLAELRKTEGEPFDPTFVLSRSVSNIICSVLFGSRFDYDDERLLTIIRLINDNFQIMSSPWGELYDIFPSLLDWVPGPHQRIFQNFKCLRDLIAHSVHDHQASLDPRSPRDFIQCFLTKMAEEKEDPLSHFHMDTLLMTTHNLLFGGTKTVSTTLHHAFLALMKYPKVQARVQEEIDLVVGRARLPALKDRAAMPYTDAVIHEVQRFADIIPMNLPHRVTRDTAFRGFLIPKGTDVITLLNTVHYDPSQFLTPQEFNPEHFLDANQSFKKSPAFMPFSAGRRLCLGESLARMELFLYLTAILQSFSLQPLGAPEDIDLTPLSSGLGNLPRPFQLCLRPR

SEQ ID NO: 3889 - protein, 320 aa, Homo sapiens
MDSISTAILLLLLALVCLLLTLSSRDKGKLPPGPRPLSILGNLLLLCSQDMLTSLTKLSKEYGSMYTVHLGPRRVVVLSGYQAVKEALVDQGEEFSGRGDYPAFFNFTKGNGIAFSSGDRWKVLRQFSIQILRNFGMGKRSIEERILEEGSFLLAELRKTEGEPFDPTFVLSRSVSNIICSVLFGSRFDYDDERLLTIIRLINDNFQIMSSPWGELYDIFPSLLDWVPGPHQRIFQNFKCLRDLIAHSVHDHQASLDPRSPRDFIQCFLTKMAEEKEDPLSHFHMDTLLMTTHNLLFGGTKTPACRRRSTSWWDARGCRR

SEQ ID NO: 3890 - protein, 81 aa, Homo sapiens
  SITE 1: note = misc_feature - Xaa can be any naturally occurring amino acid
XPHRVTRDTAFRGFLIPKGTDVITLLNTVHYDPSQFLTPQEFNPEHFLDANQSFKKSPAFMPFSAALDAQRHSFLLSTLLL

SEQ ID NO: 3891 - protein, 502 aa, Homo sapiens
MLAAMGSLAAALWAVVHPRTLLLGTVAFLLAADFLKRRRPKNYPPGPWRLPFLGNFFLVDFEQSHLEVQLFVKKYGNLFSLELGDISAVLITGLPLIKEALIHMDQNFGNRPVTPMREHIFKKNGLIMSSGQAWKEQRRFTLTALRNFGLGKKSLEERIQEEAQHLTEAIKEENGQPFDPHFKINNAVSNIICSITFGERFEYQDSWFQQLLKLLDEVTYLEASKTCQLYNVFPWIMKFLPGPHQTLFSNWKKLKLFVSHMIDKHRKDWNPAETRDFIDAYLKEMSKHTGNPTSSFHEENLICSTLDLFFAGTETTSTTLRWALLYMALYPEIQEKVQAEIDRVIGQGQQPSTAARESMPYTNAVIHEVQRMGNIIPLNVPREVTVDTTLAGYHLPKGTMILTNLTALHRDPTEWATPDTFNPDHFLENGQFKKREAFMPFSIGKRACLGEQLARTELFIFFTSLMQKFTFRPPNNEKLSLKFRMGITISPVSHRLCAVPQV

SEQ ID NO: 3892 - protein, 268 aa, Homo sapiens
MPCSSKRNFCRQTMPSFIHEDDKNGRLIEKASVNRKPQLPQHFVDAYLDEMDQGKNDPSSTFSKENLIFSVGELIIAGTETTTNVLRWAILFMALYPNIQGQVQKEIDLIMGPNGKPSWDDKCKMPYTEAVLHEVLRFCNIVPLGIFHATSEDAVVRGYSIPKGTTVITNLYSVHFDEKYWRDPEVFHPERFLDSSGYFAKKEALVPFSLGRRHCLGEHLARMEMFLFFTALLQRFHLHFPHELVPDLKPRLGMTLQPQPYLICAERR

SEQ ID NO: 3893 - protein, 37 aa, Homo sapiens
MPCSSKRNFCRQTMPSFIHEDDKNGRLTQFQIWPRMG

SEQ ID NO: 3894 - protein, 37 aa, Homo sapiens; identical to SEQ ID NO: 3893

SEQ ID NO: 3895 - protein, 37 aa, Homo sapiens; identical to SEQ ID NO: 3893

SEQ ID NO: 3896 - protein, 501 aa, Homo sapiens
MWKLWRAEEGAAALGGALFLLLFALGVRQLLKQRRPMGFPPGPPGLPFIGNIYSLAASSELPHVYMRKQSQVYGEIFSLDLGGISTVVLNGYDVVKECLVHQSEIFADRPCLPLFMKMTKMGGLLNSRYGRGWVDHRRLAVNSFRYFGYGQKSFESKILEETKFFNDAIETYKGRPFDFKQLITNAVSNITNLIIFGERFTYEDTDFQHMIELFSENVELAASASVFLYNAFPWIGILPFGKHQQLFRNAAVVYDFLSRLIEKASVNRKPQLPQHFVDAYLDEMDQGKNDPSSTFSKENLIFSVGELIIAGTETTTNVLRWAILFMALYPNIQGQVQKEIDLIMGPNGKPSWDDKCKMPYTEAVLHEVLRFCNIVPLGIFHATSEDAVVRGYSIPKGTTVITNLYSVHFDEKYWRDPEVFHPERFLDSSGYFAKKEALVPFSLGRRHCLGEHLARMEMFLFFTALLQRFHLHFPHELVPDLKPRLGMTLQPQPYLICAERR

SEQ ID NO: 3897 - protein, 32 aa, Homo sapiens
  SITE 1: note = misc_feature - Xaa can be any naturally occurring amino acid
XQSEIFADRPCLPLFMKMTKMGVLERPRSVPS

SEQ ID NO: 3898 - protein, 73 aa, Homo sapiens
AVCWDDDGQHHGRLYPPAPDEIPSCPKARRSSPSLAPSCMTPTSSSTQKSSTQTVSWMQMDGSGSMRRSCPSP

SEQ ID NO: 3899 - protein, 175 aa, Homo sapiens
MEATGTWALLLALALLLLLTLALSGTRARGHLPPGPTPLPLLGNLLQLRPGALYSGLMREEQNPGTEFTNKNMLMTVIYLLFAGTMTVSTTVGYTLLLLMKYPHVQKWVREELNRELGAGQAPSLGDRTRLPYTDAVLHEAQRLLALVPMGIPRTLMRTTRFRGYTLPQGTEVFP

SEQ ID NO: 3900 - protein, 165 aa, Homo sapiens
MEATGTWALLLALALLLLLTLALSGTRARGHLPPGPTPLPLLGNLLQLRPGALYSGLMRLSKKYGPVFTIYLGPWRPVVVLVGQEAVREALGGQAEEFSGRGTVAMLEGTFDGHGGTKPRHRIHQQEHADDSHLFAVCWDDDGQHHGRLYPPAPDEIPSCPKVGT

SEQ ID NO: 3901 - protein, 187 aa, Homo sapiens
MEATGTWALLLALALLLLLTLALSGTRARGHLPPGPTPLPLLGNLLQLRPGALYSGLMRLSKKYGPVFTIYLGPWRPVVVLVGQEAVREALGGQAEEFSGRGTVAMLEGTFDGHGVFFSNGERWRQLRKFTMLALRDLGMGKREGEELIQAEARCLVETFQGTEGGTKPRHRIHQQEHADDSHLFAV

SEQ ID NO: 3902 - protein, 504 aa, Homo sapiens
MEATGTWALLLALALLLLLTLALSGTRARGHLPPGPTPLPLLGNLLQLRPGALYSGLMRLSKKYGPVFTIYLGPWRPVVVLVGQEAVREALGGQAEEFSGRGTVAMLEGTFDGHGVFFSNGERWRQLRKFTMLALRDLGMGKREGEELIQAEARCLVETFQGTEGRPFDPSLLLAQATSNVVCSLLFGLRFSYEDKEFQAVVRAAGGTLLGVSSQGGQTYEMFSWFLRPLPGPHKQLLHHVSTLAAFTVRQVQQHQGNLDASGPARDLVDAFLLKMAQEEQNPGTEFTNKNMLMTVIYLLFAGTMTVSTTVGYTLLLLMKYPHVQKWVREELNRELGAGQAPSLGDRTRLPYTDAVLHEAQRLLALVPMGIPRTLMRTTRFRGYTLPQGTEVFPLLGSILHDPNIFKHPEEFNPDRFLDADGRFRKHEAFLPFSLGKRVCLGEGLAKAELFLFFTTILQAFSLESPCPPDTLSLKPTVSGLFNIPPAFQLQVRPTDLHSTTQTR

SEQ ID NO: 3903 - protein, 60 aa, Homo sapiens
MLEGTFDGHGGTKPRHRIHQQEHADDSHLFAVCWDDDGQHHGRLYPPAPDEIPSCPKVGT

SEQ ID NO: 3904 - protein, 288 aa, Homo sapiens
LQLHRPVLRKIEEVRAILRTLLEARRPHVCPGDPVCSYVDALIQQGQGDDPEGLFAEANAVACTLDMVMAGTETTSATLQWAALLMGRHPDVQGRVQEELDRVLGPGRTPRLEDQQALPYTSAVLHEVQRFITLLPHVPRCTAADTQLGGFLLPKGTPVIPLLTSVLLDETQWQTPGQFNPGHFLDANGHFVKREAFLPFSAGSEGGCGGCSCAPLGRSPPLPSRSRPGAAHSVPGHPPQAAASVLGSAWPGPSSSCCLPASCRGTACCPRLASVRPPWTPRPPGLLP

SEQ ID NO: 3905 - protein, 490 aa, Homo sapiens
MALLLLLFLGLLGLWGLLCACAQDPSPAARWPPGPRPLPLVGNLHLLRLSQQDRSLMELSERYGPVFTVHLGRQKTVVLTGFEAVKEALAGPGQELADRPPIAIFQLIQRGGGIFFSSGARWRAARQFTVRALHSLGVGREPVADKILQELKCLSGQLDGYRGRPFPLALLGWAPSNITFALLFGRRFDYRDPVFVSLLGLIDEVMVLLGSPGLQLFNVYPWLGALLQLHRPVLRKIEEVRAILRTLLEARRPHVCPGDPVCSYVDALIQQGQGDDPEGLFAEANAVACTLDMVMAGTETTSATLQWAALLMGRHPDVQGRVQEELDRVLGPGRTPRLEDQQALPYTSAVLHEVQRFITLLPHVPRCTAADTQLGGFLLPKGTPVIPLLTSVLLDETQWQTPGQFNPGHFLDANGHFVKREAFLPFSAGRRVCVGERLARTELFLLFAGLLQRYRLLPPPGVSPASLDTTPARAFTMRPRAQALCAVPRP

SEQ ID NO: 3906 - protein, 408 aa, Homo sapiens
MELSERYGPVFTVHLGRQKTVVLTGFEAVKEALAGPGQELADRPPIAIFQLIQRGGGIFFSSGARWRAARQFTVRALHSLGVGREPVADKILQELKCLSGQLDGYRGRPFPLALLGWAPSNITFALLFGRRFDYRDPVFVSLLGLIDEVMVLLGSPGLQLFNVYPWLGALLQLHRPVLRKIEEVRAILRTLLEARRPHVCPGDPVCSYVDALIQQGQGDDPEGLFAEANAVACTLDMVMAGTETTSATLQWAALLMGRHPDVQGRVQEELDRVLGPGRTPRLEDQQALPYTSAVLHEVQRFITLLPHVPRCTAADTQLGGFLLPKGTPVIPLLTSVLLDETQWQTPGQFNPGHFLDANGHFVKREAFLPFSAGQQPSGPGWGGTSRAPGVGRPQLRLPPLHPPPDLRF

SEQ ID NO: 3907 - protein, 96 aa, Homo sapiens
MSPGLLLLGSAVLLAFGLCCTFVHRARSRYEHIPGPPRPSFLLGHLPCFWKKDEVGGRVLQDVFLDWAKKYGPVVRVNVFHKTSVIVTSPESVKFH

SEQ ID NO: 3908 - protein, 500 aa, Homo sapiens
MSPGLLLLGSAVLLAFGLCCTFVHRARSRYEHIPGPPRPSFLLGHLPCFWKKDEVGGRVLQDVFLDWAKKYGPVVRVNVFHKTSVIVTSPESVKKFLMSTKYNKDSKMYRALQTVFGERLFGQGLVSECNYERWHKQRRVIDLAFSRSSLVSLMETFNEKAEQLVEILEAKADGQTPVSMQDMLTYTAMDILAKAAFGMETSMLLGAQKPLSQAVKLMLEGITASRNTLAKFLPGKRKQLREVRESIRFLRQVGRDWVQRRREALKRGEEVPADILTQILKAEEGAQDDEGLLDNFVTFFIAGHETSANHLAFTVMELSRQPEIVARLQAEVDEVIGSKRYLDFEDLGRLQYLSQVLKESLRLYPPAWGTFRLLEEETLIDGVRVPGNTPLLFSTYVMGRMDTYFEDPLTFNPDRFGPGAPKPRFTYFPFSLGHRSCIGQQFAQMEVKVVMAKLLQRLEFRLVPGQRFGLQEQATLKPLDPVLCTLRPRGWQPAPPPPPC

SEQ ID NO: 3909 - protein, 403 aa, Homo sapiens
MSTKYNKDSKMYRALQTVFGERLFGQGLVSECNYERWHKQRRVIDLAFSRSSLVSLMETFNEKAEQLVEILEAKADGQTPVSMQDMLTYTAMDILAKAAFGMETSMLLGAQKPLSQAVKLMLEGITASRNTLAKFLPGKRKQLREVRESIRFLRQVGRDWVQRRREALKRGEEVPADILTQILKAEEGAQDDEGLLDNFVTFFIAGHETSANHLAFTVMELSRQPEIVARLQAEVDEVIGSKRYLDFEDLGRLQYLSQVLKESLRLYPPAWGTFRLLEEETLIDGVRVPGNTPLLFSTYVMGRMDTYFEDPLTFNPDRFGPGAPKPRFTYFPFSLGHRSCIGQQFAQMEVKVVMAKLLQRLEFRLVPGQRFGLQEQATLKPLDPVLCTLRPRGWQPAPPPPPC

SEQ ID NO: 3910 - protein, 164 aa, Homo sapiens
RFLRQVGRDWVQRRREALKRGEEVPADILTQILKAEEGAQDDEGLLDNFVTFFIAGHETSANHLAFTVMELSRQPEIVARLQAEVDEVIGSKRYLDFEDLGRLQYLSQVLKESLRLYPPAWGTFRLLEEETLIDGVRVPGNTPLLEQCASQLLGHLPRSERAGL

SEQ ID NO: 3911 - protein, 51 aa, Homo sapiens
  SITE 1: note = misc_feature - Xaa can be any naturally occurring amino acid
XPAREEEAAPGGPGEHSLPAPGGQGLGPAPPGSPEEGRGGSCRHPHTDSES

SEQ ID NO: 3912 - protein, 199 aa, Homo sapiens
MFEGHDTTASGLSWVLYHLAKHPEYQEQCRQEVQELLKDREPIEIEWDDLAQLPFLTMCIKESLRLHPPVPVISRCCTQDFVLPDGRVIPKGIVCLINIIGIHYNPTVWPDPEVYDPFRFDQENIKERSPLAFIPFSAGPRNCIGQAFAMAEMKVVLALTLLHFRILPTHTEPRRKPELILRAEGGLWLRVEPLGANSQ

SEQ ID NO: 3913 - protein, 524 aa, Homo sapiens
MPQLSLSWLGLGPVAASPWLLLLLVGGSWLLARVLAWTYTFYDNCRRLQCFPQPPKQNWFWGHQGLVTPTEEGMKTLTQLVTTYPQGFKLWLGPTFPLLILCHPDIIRPITSASAAVAPKDMIFYGFLKPWLGDGLLLSGGDKWSRHRRMLTPAFHFNILKPYMKIFNKSVNIMHDKWQRLASEGSARLDMFEHISLMTLDSLQKCVFSFESNCQEKPSEYIAAILELSAFVEKRNQQILLHTDFLYYLTPDGQRFRRACHLVHDFTDAVIQERRCTLPTQGIDDFLKNKAKSKTLDFIDVLLLSKDEDGKELSDEDIRAEADTFMFEGHDTTASGLSWVLYHLAKHPEYQEQCRQEVQELLKDREPIEIEWDDLAQLPFLTMCIKESLRLHPPVPVISRCCTQDFVLPDGRVIPKGIVCLINIIGIHYNPTVWPDPEVYDPFRFDQENIKERSPLAFIPFSAGPRNCIGQAFAMAEMKVVLALTLLHFRILPTHTEPRRKPELILRAEGGLWLRVEPLGANSQ

SEQ ID NO: 3914 - protein, 454 aa, Homo sapiens
MPQLSLSWLGLGPVAASPWLLLLLVGGSWLLARVLAWTYTFYDNCRRLQCFPQPPKQNWFWGHQGLVTPTEEGMKTLTQLVTTYPQGFKLWLGPTFPLLILCHPDIIRPITSASAAVAPKDMIFYGFLKPWLGDGLLLSGGDKWSRHRRMLTPAFHFNILKPYMKIFNKSVNIMHDKWQRLASEGSARLDMFEHISLMTLDSLQKCVFSFESNCQEKPSEYIAAILELSAFVEKRNQQILLHTDFLYYLTPDGQRFRRACHLVHDFTDAVIQERRCTLPTQGIDDFLKNKAKSKTLDFIDVLLLSKDEDGKELSDEDIRAEADTFMFEGHDTTASGLSWVLYHLAKHPEYQEQCRQEVQELLKDREPIEIEWDDLAQLPFLTMCIKESLRLHPPVPVISRCCTQDFVLPDGRVIPKGLRPLPFRPREHQGEVTSGFYSLLGRAQKLHRAGVRHG

SEQ ID NO: 3915 - protein, 524 aa, Homo sapiens; identical to SEQ ID NO: 3913

SEQ ID NO: 3916 - protein, 454 aa, Homo sapiens; identical to SEQ ID NO: 3914

SEQ ID NO: 3917 - protein, 520 aa, Homo sapiens
MSQLSLSWLGLWPVAASPWLLLLLVGASWLLAHVLAWTYAFYDNCRRLRCFPQPPRRNWFWGHQGMIHSSEEGLLYTQSLACTFGDMGCWWVGPWQAVIHIFLPTCIKPVLFAPAAIAPKDKFFYSFLEPWLGDGLLLSAGDKWSRHRRMLTPAFHFNILKPYMKIFNESVNIMHAKWQLLASEGSACLDMFEHISLMTLDSLQKCVFSFDSHCQEKPSEYIAAILELSALVSKRHHEILLHIDFLYYLTPDGQRFRRACRLVHDFTDAVIQERRRTLPSQGVDDFLQAKAKSKTLDFIDVLLLSKDEDGKKLSDEDIRAEADTFMFEGHDTTASGLSWVLYHLAKHPEYQERCRQEVQELLKDREPKEIEWDDLAHLPFLTMCMKESLRLHPPVPVISRHVTQDIVLPDGRVIPKGIICLISVFGTHHNPAVWPDPEVYDPFRFDPENIKERSPLAFIPFSAGPRNCIGQTFAMAEMKVVLALTLLRFRVLPDHTEPRRKPELVLRAEGGLWLRVEPLS

SEQ ID NO: 3918 - protein, 89 aa, Homo sapiens
MSQLSLSWLGLWPVAASPWLLLLLVGASWLLAHVLAWTYAFYDNCRRLRCFPQPPRRNWFWGHQGMLPLHQRTSSSTASWSPGWGMGSC

SEQ ID NO: 3919 - protein, 154 aa, Homo sapiens
MSQLSLSWLGLWPVAASPWLLLLLVGASWLLAHVLAWTYAFYDNCRRLRCFPQPPRRNWFWGHQGMVNPTEEGMRVLTQLVATYPQGFKVWMGPISPLLSLCHPDIIRSVINASAAIAPKDKFFYSFLEPWLGDGLLLSAGDKWSRHRRMLTPA

SEQ ID NO: 3920 - protein, 520 aa, Homo sapiens
MSQLSLSWLGLWPVAASPWLLLLLVGASWLLAHVLAWTYAFYDNCRRLRCFPQPPRRNWFWGHQGMVNPTEEGMRVLTQLVATYPQGFKVWMGPISPLLSLCHPDIIRSVINASAAIAPKDKFFYSFLEPWLGDGLLLSAGDKWSRHRRMLTPAFHFNILKPYMKIFNESVNIMHAKWQLLASEGSACLDMFEHISLMTLDSLQKCVFSFDSHCQEKPSEYIAAILELSALVSKRHHEILLHIDFLYYLTPDGQRFRRACRLVHDFTDAVIQERRRTLPSQGVDDFLQAKAKSKTLDFIDVLLLSKDEDGKKLSDEDIRAEADTFMFEGHDTTASGLSWVLYHLAKHPEYQERCRQEVQELLKDREPKEIEWDDLAHLPFLTMCMKESLRLHPPVPVISRHVTQDIVLPDGRVIPKGIICLISVFGTHHNPAVWPDPEVYDPFRFDPENIKERSPLAFIPFSAGPRNCIGQTFAMAEMKVVLALTLLRFRVLPDHTEPRRKPELVLRAEGGLWLRVEPLS

SEQ ID NO: 3921 - protein, 74 aa, Homo sapiens
  SITE 1: note = misc_feature - Xaa can be any naturally occurring amino acid
XWVLYHLAKHPEYQERCRQEVQELLKDREPKEIEWSTTPFALTQRTSRRGHLWLLFPSRQGPGTASGRRSRWRR

SEQ ID NO: 3922 - protein, 381 aa, Homo sapiens [sequence omitted]

SEQ ID NO: 3923 - protein, 136 aa, Homo sapiens
MRTPGPLPVLLLLLAGAPAARPTPPTCYSRMRALSQEITRDFNLLQVSEPSEPCVRYLPRLYLDIHNYCVLDKLRDFVASPPCWKVAQVDSLKDKARKLYTIMNSFCRRDLVFLLDDCNALEYPIPVTTVLPDRQR

SEQ ID NO: 3924 - protein, 76 aa, Homo sapiens
  SITE 1: note = misc_feature - Xaa can be any naturally occurring amino acid
XPGPLPVLLLLLAGAPAARPTPPTCYSRMRALSQEITRDFNLLQVSEPSDLVFLLDDCNALEYPIPVTTVLPDRQR

SEQ ID NO: 3925 - protein, 92 aa, Homo sapiens
  SITE 1: note = misc_feature - Xaa can be any naturally occurring amino acid
XTPGPLPVLLLLLAGAPAARPTPPTCYSRMRALSQEITRDFNLLQVSEPSEPCVRYLPRLYLDIHDLVFLLDDCNALEYPIPVTTVLPDRQR

SEQ ID NO: 3926 - protein, 78 aa, Homo sapiens
GNTGMVGGSVPVFDEIILSTARMNRVLSFHSVSESPFYVLIETSGSNAGHDAEKLGHFLEHALGSGLVTDGTMATDQR

SEQ ID NO: 3927 - protein, 243 aa, Homo sapiens
MLPRRPLAWPAWLLRGAPGAAGSWGRPVGPLARRGCCSAPGTPEVPLTRERYPVRRLPFSTVSKQDLAAFERIVPGGVVTDPEALQAPNVDWLRTLRGCSKVLLRPRTSEEVSHILRHCHERNLAVNPQGGNTGMVGGSVPVFDEIILSTARMNRVLSFHSVSGGLRPGGAEPVCGGTGLHHAAGLRSQGQLPHRGKRGNQRWRPAVSSIWLTAWDCPGPGSGAGRRHCPGLPDLPEEGQHGL

SEQ ID NO: 3928 - protein, 521 aa, Homo sapiens
MLPRRPLAWPAWLLRGAPGAAGSWGRPVGPLARRGCCSAPGTPEVPLTRERYPVRRLPFSTVSKQDLAAFERIVPGGVVTDPEALQAPNVDWLRTLRGCSKVLLRPRTSEEVSHILRHCHERNLAVNPQGGNTGMVGGSVPVFDEIILSTARMNRVLSFHSVSGILVCQAGCVLEELSRYVEERDFIMPLDLGAKGSCHIGGNVATNAGGLRFLRYGSLHGTVLGLEVVLADGTVLDCLTSLRKDNTGYDLKQLFIGSEGTLGIITTVSILCPPKPRAVNVAFLGCPGFAEVLQTFSTCKGMLGEILSAFEFMDAVCMQLVGRHLHLASPVQESPFYVLIETSGSNAGHDAEKLGHFLEHALGSGLVTDGTMATDQRKVKMLWALRERITEALSRDGYVYKYDLSLPVERLYDIVTDLRARLGPHAKHVVGYGHLGDGNLHLNVTAEAFSPSLLAALEPHVYEWTAGQQGSVSAEHGVGFRKRDVLGYSKPPGALQLMQQLKALLDPKGILNPYKTLPSQA

SEQ ID NO: 3929 - protein, 320 aa, Homo sapiens
MLPRRPLAWPAWLLRGAPGAAGSWGRPVGPLARRGCCSAPGTPEVPLTRERYPVRRLPFSTVSKQDLAAFERIVPGGVVTDPEALQAPNVDWLRTLRGCSKVLLRPRTSEEVSHILRHCHERNLAVNPQGGNTGMVGGSVPVFDEIILSTARMNRVLSFHSVSGILVCQAGCVLEELSRYVEERDFIMPLDLGAKGSCHIGGNVATNAGGLRFLRYGSLHGTVLGLEVVLADGTVLDCLTSLRKDNTGYDLKQLFIGSEGTLGIITTVSILCPPKPRAVNVAFLDAVGPEGKDHRGAEPGWLRVQVRPLPPCGAALRHRD

SEQ ID NO: 3930 - protein, 387 aa, Homo sapiens
MVGGSVPVFDEIILSTARMNRVLSFHSVSGILVCQAGCVLEELSRYVEERDFIMPLDLGAKGSCHIGGNVATNAGGLRFLRYGSLHGTVLGLEVVLADGTVLDCLTSLRKDNTGYDLKQLFIGSEGTLGIITTVSILCPPKPRAVNVAFLGCPGFAEVLQTFSTCKGMLGEILSAFEFMDAVCMQLVGRHLHLASPVQESPFYVLIETSGSNAGHDAEKLGHFLEHALGSGLVTDGTMATDQRKVKMLWALRERITEALSRDGYVYKYDLSLPVERLYDIVTDLRARLGPHAKHVVGYGHLGDGNLHLNVTAEAFSPSLLAALEPHVYEWTAGQQGSVSAEHGVGFRKRDVLGYSKPPGALQLMQQLKALLDPKGILNPYKTLPSQA

SEQ ID NO: 3931 - protein, 90 aa, Homo sapiens [sequence omitted]

SEQ ID NO: 3932 - protein, 152 aa, Homo sapiens
  SITE 1: note = misc_feature - Xaa can be any naturally occurring amino acid
XHSVSGILVCQAGCVLEELSRYVEERDFIMPLDLGAKGSCHIGGNVATNAGGLRFLRYGSLHGTVLGLEVVLADGTVLDCLTSLRKDNTGYDLKQLFIGSEGTLGIITTVSILCPPKPRAVNVAFLGFLCSALIPLQLQSPVCRPPVVLGAR

SEQ ID NO: 3933 - protein, 318 aa, Homo sapiens
  SITE 1: note = misc_feature - Xaa can be any naturally occurring amino acid
XSHANHRPICLSPRIWPGSASATSTVCSSSESFLPRGPPAVSLLLHGPPTVSFPPPWPTHHVLPSPVAHPPCPCLPPDMPLELPGPCCCPHCLCDSAPPSLPCPTLVQGASRPILILRAFPGPCHSVPCHDLKLQVGASPFRHGCPPSVRCPSRLIAGVPGCSVLSWSLGHSLSGIDSRMLWALRERITEALSRDGYVYKYDLSLPVERLYDIVTDLRARLGPHAKHVVGYGHLGDGNLHLNVTAEAFSPSLLAALEPHVYEWTAGQQGSVSAEHGVGFRKRDVLGYSKPPGALQLMQQLKALLDPKGILNPYKTLPS

SEQ ID NO: 3934 - protein, 189 aa, Homo sapiens
  SITE 1: note = misc_feature - Xaa can be any naturally occurring amino acid
XSVFCSDPTPTAVTCVPPACGPGSPRPARLPHPALRTPGCPGFAEVLQTFSTCKGMLGEILSAFEFMDAVCMQLVGRHLHLASPVQESPFYVLIETSGSNAGHDAEKLGHFLEHALGSGLVTDGTMATDQRKVKMLWALRERITEALSRDGYVYKYDLSLPVERLYDIVTDLRARLGPHAKHVVGYGHL

SEQ ID NO: 3935 - protein, 9 aa, Homo sapiens
MRMSVGLSL

SEQ ID NO: 3936 - protein, 15 aa, Homo sapiens
MRMSVGLSLLLPLSG

SEQ ID NO: 3937 - protein, 41 aa, Homo sapiens
MRMSVGLSLLLPLSGRTFLLLLSVVMAQSHWPSEPSEAVRD

SEQ ID NO: 3938 - protein, 52 aa, Homo sapiens
MRMSVGLSLLLPLSGRTFLLLLSVVMAQSHWPSEPSEAVRDWENQLEASMHS

SEQ ID NO: 3939 - protein, 86 aa, Homo sapiens
MRMSVGLSLLLPLSGRTFLLLLSVVMAQSHWPSEPSEAVRDWENQLEASMHSVLSDLHEAVPTVVGIPDGTAVVGRSFRVTIPTDL

SEQ ID NO: 3940 - protein, 88 aa, Homo sapiens
MRMSVGLSLLLPLSGRTFLLLLSVVMAQSHWPSEPSEAVRDWENQLEASMHSVLSDLHEAVPTVVGIPDGTAVVGRSFRVTIPTDLIA

SEQ ID NO: 3941 - protein, 96 aa, Homo sapiens
MRMSVGLSLLLPLSGRTFLLLLSVVMAQSHWPSEPSEAVRDWENQLEASMHSVLSDLHEAVPTVVGIPDGTAVVGRSFRVTIPTDLIASSGDIIKV

SEQ ID NO: 3942 - protein, 106 aa, Homo sapiens
MRMSVGLSLLLPLSGRTFLLLLSVVMAQSHWPSEPSEAVRDWENQLEASMHSVLSDLHEAVPTVVGIPDGTAVVGRSFRVTIPTDLIASSGDIIKVSAAGKEALPS

SEQ ID NO: 3943 - protein, 117 aa, Homo sapiens
MRMSVGLSLLLPLSGRTFLLLLSVVMAQSHWPSEPSEAVRDWENQLEASMHSVLSDLHEAVPTVVGIPDGTAVVGRSFRVTIPTDLIASSGDIIKVSAAGKEALPSWLHWDSQSHTL

SEQ ID NO: 3944 - protein, 895 aa, Homo sapiens
MRMSVGLSLLLPLSGRTFLLLLSVVMAQSHWPSEPSEAVRDWENQLEASMHSVLSDLHEAVPTVVGIPDGTAVVGRSFRVTIPTDLIASSGDIIKVSAAGKEALPSWLHWDSQSHTLEGLPLDTDKGVHYISVSATRLGANGSHIPQTSSVFSIEVYPEDHSELQSVRTASPDPGEVVSSACAADEPVTVLTVILDADLTKMTPKQRIDLLHRMRSFSEVELHNMKLVPVVNNRLFDMSAFMAGPGNAKKVVENGALLSWKLGCSLNQNSVPDIHGVEAPAREGAMSAQLGYPVVGWHIANKKPPLPKRVRRQIHATPTPVTAIGPPTTAIQEPPSRIVPTPTSPAIAPPTETMAPPVRDPVPGKPTVTIRTRGAIIQTPTLGPIQPTRVSEAGTTVPGQIRPTMTIPGYVEPTAVATPPTTTTKKPRVSTPKPATPSTDSTTTTTRRPTKKPRTPRPVPRVTTKVSITRLETASPPTRIRTTTSGVPRGGEPNQRPELKNHIDRVDAWVGTYFEVKIPSDTFYDHEDTTTDKLKLTLKLREQQLVGEKSWVQFNSNSQLMYGLPDSSHVGKHEYFMHATDKGGLSAVDAFEIHVHRRPQGDRAPARFKAKFVGDPALVLNDIHKKIALVKKLAFAFGDRNCSTITLQNITRGSIVVEWTNNTLPLEPCPKEQIAGLSRRIAEDDGKPRPAFSNALEPDFKATSITVTGSGSCRHLQFIPVVPPRRVPSEAPPTEVPDRDPEKSSEDDVYLHTVIPAVVVAAILLIAGIIAMICYRKKRKGKLTLEDQATFIKKGVPIIFADELDDSKPPPSSSMPLILQEEKAPLPPPEYPNQSVPETTPLNQDTMGEYTPLRDEDPNAPPYQPPPPFTAPMEGKGSRPKNMTPYRSPPPYVPP

SEQ ID NO: 3945 - protein, 895 aa, Homo sapiens; identical to SEQ ID NO: 3944

SEQ ID NO: 3946 - protein, 895 aa, Homo sapiens; identical to SEQ ID NO: 3944

SEQ ID NO: 3947 - protein, 895 aa, Homo sapiens; identical to SEQ ID NO: 3944

SEQ ID NO: 3948 - protein, 895 aa, Homo sapiens; identical to SEQ ID NO: 3944

SEQ ID NO: 3949 - protein, 895 aa, Homo sapiens; identical to SEQ ID NO: 3944

SEQ ID NO: 3950 - protein, 189 aa, Homo sapiens
MLLGQLSTLLCLLSGALPTGSGRPEPQSPRPQSWAAANQTWALGPGALPPLVPASALGSWKAFLGLQKARQLGMGRLQRGQDEVAAVTLPLNPQEVIQGMCKAVPFVQVFSRPGCSAIRLRNHLCFGHCSSLYIPGSDPTPLVLCNSCMPARKRWAPVVLWCLTGSSASRRRVKISTMLIEGCHCSPKA

SEQ ID NO: 3951 - protein, 163 aa, Homo sapiens
MPLTRQQGRLLVTLSPVRTDRQADRRTDKQMLLGQLSTLLCLLSGALPTGSGRPEPQSPRPQSWAAANQTWALGPGALPPLVPASALGSWKAFLGLQKARQLGMGRLQRGQDEVAAVTLPLNPQEVIQGMCKAVPFVQTRESRYVAQASLELLASSNPPTSAS

SEQ ID NO: 3952 - protein, 167 aa, Homo sapiens
MFPDYGYGWFHTSLILEGKNYLQWLTERLTERGVKFFQRKVESFEEVAREGADVIVNCTGVWAGALQRDPLLQPGRGQIMKVDAPWMKHFILTHDPERGIYNSPYIIPGTQTVTLGGIFQLGNWSELNNIQDHNTIWEGCCRLEPTLKNARIIGERTGFRPVRPQIR

SEQ ID NO: 3953 - protein, 197 aa, Homo sapiens
MRVVVIGAGVIGLSTALCIHERYHSVLQPLDIKVYADRFTPLTTTDVAAGLWQPYLSDPNNPQEADWSQQTFDYLLSHVHSPNAENLGLFLISGYNLFHEAIPDPSWKDTVLGFRKLTPRELDMFPDYGYGWFHTSLILEGKNYLQWLTERLTERGVKFFQRKVESFEEVAREGADVIVNCTGVWAGALQRDPLLQP

SEQ ID NO: 3954 - protein, 347 aa, Homo sapiens
MRVVVIGAGVIGLSTALCIHERYHSVLQPLDIKVYADRFTPLTTTDVAAGLWQPYLSDPNNPQEADWSQQTFDYLLSHVHSPNAENLGLFLISGYNLFHEAIPDPSWKDTVLGFRKLTPRELDMFPDYGYGWFHTSLILEGKNYLQWLTERLTERGVKFFQRKVESFEEVAREGADVIVNCTGVWAGALQRDPLLQPGRGQIMKVDAPWMKHFILTHDPERGIYNSPYIIPGTQTVTLGGIFQLGNWSELNNIQDHNTIWEGCCRLEPTLKNARIIGERTGFRPVRPQIRLEREQLRTGPSNTEVIHNYGHGGYGLTIHWGCALEAAKLFGRILEEKKLSRMPPSHL

SEQ ID NO: 3955 - protein, 123 aa, Homo sapiens
MRVVVIGAGVIGLSTALCIHERYHSVLQPLDIKVYADRFTPLTTTDVAAGLWQPYLSDPNNPQEADWSQQTFDYLLSHVHSPNAENLGLFLISGYNLFHEAIPLWLVPHKPNSGGKELSTVAD

SEQ ID NO: 3956 - protein, 281 aa, Homo sapiens
MRVVVIGAGVIGLSTALCIHERYHSVLQPLDIKVYADRFTPLTTTDVAAGLWQPYLSDPNNPQEADWSQQTFDYLLSHVHSPNAENLGLFLISGYNLFHEAIPVAREGADVIVNCTGVWAGALQRDPLLQPGRGQIMKVDAPWMKHFILTHDPERGIYNSPYIIPGTQTVTLGGIFQLGNWSELNNIQDHNTIWEGCCRLEPTLKNARIIGERTGFRPVRPQIRLEREQLRTGPSNTEVIHNYGHGGYGLTIHWGCALEAAKLFGRILEEKKLSRMPPSHL

SEQ ID NO: 3957 - protein, 78 aa, Homo sapiens
MRVVVIGAGVIGLSTALCIHERYHSVLQPLDIKVYADRFTPLTTTDVAAGLWQPYLSDPNNPQEATLPGRTQFWDFGS

SEQ ID NO: 3958 - protein, 73 aa, Homo sapiens
MNSKGQYPTQPTYPVQPPGNPVYPQTLHLPQAPPYTDAPPAYSEGLPQSPPCQPHFLEPLCIFPWPSLWLLGL

SEQ ID NO: 3959 - protein, 207 aa, Homo sapiens
MNSKGQYPTQPTYPVQPPGNPVYPQTLHLPQAPPYTDAPPAYSELYRPSFVHPGAATVPTMSAAFPGASLYLPMAQSVAVGPLGSTIPMAYYPVGPIYPPASTSWMPSQCCSACSHAGSQRPRNSAEGELLHGWFRWWLHHLVRNQGHLCAGKDITYLQHFSQCNCFSHINLKLQFRHMLLGCLSGAQTFRHFSNLIRNHVMVAVPP

SEQ ID NO: 3960 - protein, 168 aa, Homo sapiens
MNSKGQYPTQPTYPVQPPGNPVYPQTLHLPQAPPYTDAPPAYSELYRPSFVHPGAATVPTMSAAFPGASLYLPMAQSVAVGPLGSTIPMAYYPVGPIYPPGSTVLVEGGYDAGARFGAGATAGNIPPPPPGCPPNAAQLAVMQGANVLVTQRKGNFFMGGSDGGYTIW

SEQ ID NO: 3961 - protein, 134 aa, Homo sapiens
MNSKGQYPTQPTYPVQPPGNPVYPQTLHLPQAPPYTDAPPAYSELYRPSFVHPGAATVPTMSAAFPGASLYLPMAQSVAVGPLGSTIPMAYYPVGPIYPPGSTVLVEGGYDAGARFGAGATAGNIPVCVLKLGR

SEQ ID NO: 3962 - protein, 153 aa, Homo sapiens
MNSKGQYPTQPTYPVQPPGNPVYPQTLHLPQAPPYTDAPPAYSELYRPSFVHPGAATVPTMSAAFPGASLYLPMAQSVAVGPLGSTIPMAYYPVGPIYPPGSTVLVEGGYDAGARFGAGATAGNIPVKEDQDHDREQGEEDNGDNNLERRGKM

SEQ ID NO: 3963 - protein, 146 aa, Homo sapiens
MNSKGQYPTQPTYPVQPPGNPVYPQTLHLPQAPPYTDAPPAYSELYRPSFVHPGAATVPTMSAAIPMAYYPVGPIYPPGSTVLVEGGYDAGARFGAGATAGNIPPPPPGCPPNAAQLAVMQGANVLVTQRKGNFFMGGSDGGYTIW

SEQ ID NO: 3964 - protein, 86 aa, Homo sapiens
MNSKGQYPTQPTYPVQPPGNPVYPQTLHLPQAPPYTDAPPAYSEPPPPGCPPNAAQLAVMQGANVLVTQRKGNFFMGGSDGGYTIW

SEQ ID NO: 3965 - protein, 136 aa, Homo sapiens
MNSKGQYPTQPTYPVQPPGNPVYPQTLHLPQAPPYTDAPPAYSESVAVGPLGSTIPMAYYPVGPIYPPGSTVLVEGGYDAGARFGAGATAGNIPPPPPGCPPNAAQLAVMQGANVLVTQRKGNFFMGGSDGGYTIW

SEQ ID NO: 3966 - protein, 108 aa, Homo sapiens
MSAAFPGASLYLPMAQSVAVGPLGSTIPMAYYPVGPIYPPGSTVLVEGGYDAGARFGAGATAGNIPPPPPGCPPNAAQLAVMQGANVLVTQRKGNFFMGGSDGGYTIW

SEQ ID NO: 3967 - protein, 617 aa, Homo sapiens
MPALSRWASLPGPSMREAAFMYSTAVAIFLVILVAALQGSAPRESPLPYHIPLDPEGSLELSWNVSYTQEAIHFQLLVRRLKAGVLFGMSDRGELENADLVVLWTDGDTAYFADAWSDQKGQIHLDPQQDYQLLQVQRTPEGLTLLFKRPFGTCDPKDYLIEDGTVHLVYGILEEPFRSLEAINGSGLQMGLQRVQLLKPNIPEPELPSDACTMEVQAPNIQIPSQETTYWCYIKELPKGFSRHHIIKYEPIVTKGNEALVHHMEVFQCAPEMDSVPHFSGPCDSKMKPDRLNYCRHVLAAWALGAKAFYYPEEAGLAFGGPGSSRYLRLEVHYHNPLVIEGRNDSSGIRLYYTAKLRRFNAGIMELGLVYTPVMAIPPRETAFILTGYCTDKCTQLALPPSGIHIFASQLHTHLTGRKVVTVLVRDGREWEIVNQDNHYSPHFQEIRMLKKVVSVHPGDVLITSCTYNTEDRELATVGGFGILEEMCVNYVHYYPQTQLELCKSAVDAGFLQKYFHLINRFNNEDVCTCPQASVSQQFTSVPWNSFNRDVLKALYSFAPISMHCNKSSAVRFQGEWNLQPLPKVISTLEEPTPQCPTSQGRSPAGPTVVSIGGGKG

SEQ ID NO: 3968 - protein, 244 aa, Homo sapiens
MREAAFMYSTAVAIFLVILVAALQGSAPRESPLPYHIPLDPEGSLELSWNVSYTQEAIHFQLLVRRLKAGVLFGMSDRGELENADLVVLWTDGDTAYFADGTVHLVYGILEEPFRSLEAINGSGLQMGLQRVQLLKPNIPEPELPSDACTMEVQAPNIQIPSQETTYWCYIKELPKGFSRHHIIKYEPIVTKGNEALVHHMEVFQCAPEMDSVPHFSGPCDSKMKPDRLNYCRHVLAAWALGAK

SEQ ID NO: 3969 - protein, 27 aa, Homo sapiens
MAANLSRNGPALQEAYVRVVTEKSPTD

SEQ ID NO: 3970 - protein, 50 aa, Homo sapiens
MAANLSRNGPALQEAYVRVVTEKSPTDWALFTYEGNSNDIRCCSCCRGPM

SEQ ID NO: 3971 - protein, 87 aa, Homo sapiens
MAANLSRNGPALQEAYVRVVTEKSPTDWALFTYEGNSNDIRVAGTGDRRGRERCAEGSLCQPRQHHGQLPEGGPCDHQRTGRGGCGA

SEQ ID NO: 3972 - protein, 406 aa, Homo sapiens
MAANLSRNGPALQEAYVRVVTEKSPTDWALFTYEGNSNDIRVAGTGEGGLEEMVEELNSGKVMYAFCRVKDPNSGLPKFVLINWGAHVTINARAEEDVEPECIMEKVAKASGANYSFHKESGRFQDVGPQAPVGSVYQKTNAVSEIKRVGKDSFWAKAEKEEENRRLEEKRRAEEAQRQLEQERRERELREAARREQRYQEQGGEASPQSRTWEQQQEVVSRNRNEQESAVHPREIFKQKERAMSTTSISSPQPGKLRSPFLQKQLTQPETHFGREPAAAISRPRADLPAEEPAPSTPPCLVQAEEEAVYEEPPEQETFYEQPPLVQQQGAGSEHIDHHIQGQGLSGQGLCARALYDYQAADDTEISFDPENLITGIEVIDEGWWRGYGPDGHFGMFPANYVELIE

SEQ ID NO: 3973 - protein, 430 aa, Homo sapiens
MAANLSRNGPALQEAYVRVVTEKSPTDWALFTYEGNSNDIRVAGTGEGGLEEMVEELNSGKVMYAFCRVKDPNSGLPKFVLINWTGEGVNDVRKGACASHVSTMASFLKGAHVTINARAEEDVEPECIMEKVAKASGANYSFHKESGRFQDVGPQAPVGSVYQKTNAVSEIKRVGKDSFWAKAEKEEENRRLEEKRRAEEAQRQLEQERRERELREAARREQRYQEQGGEASPQRTWEQQQEVVSRNRNEQESAVHPREIFKQKERAMSTTSISSPQPGKLRSPFLQKQLTQPETHFGREPAAAISRPRADLPAEEPAPSTPPCLVQAEEEAVYEEPPEQETFYEQPPLVQQQGAGSEHIDHHIQGQGLSGQGLCARALYDYQAADDTEISFDPENLITGIEVIDEGWWRGYGPDGHFGMFPANYVELIE

SEQ ID NO: 3974 - protein, 431 aa, Homo sapiens
MAANLSRNGPALQEAYVRVVTEKSPTDWALFTYEGNSNDIRVAGTGEGGLEEMVEELNSGKVMYAFCRVKDPNSGLPKFVLINWTGEGVNDVRKGACASHVSTMASFLKGAHVTINARAEEDVEPECIMEKVAKASGANYSFHKESGRFQDVGPQAPVGSVYQKTNAVSEIKRVGKDSFWAKAEKEEENRRLEEKRRAEEAQRQLEQERRERELREAARREQRYQEQGGEASPQSRTWEQQQEVVSRNRNEQESAVHPREIFKQKERAMSTTSISSPQPGKLRSPFLQKQLTQPETHFGREPAAAISRPRADLPAEEPAPSTPPCLVQAEEEAVYEEPPEQETFYEQPPLVQQQGAGSEHIDHHIQGQGLSGQGLCARALYDYQAADDTEISFDPENLITGIEVIDEGWWRGYGPDGHFGMFPANYVELIE

SEQ ID NO: 3975 - protein, 439 aa, Homo sapiens
MAANLSRNGPALQEAYVRVVTEKSPTDWALFTYEGNSNDIRVAGTGEGGLEEMVEELNSGKVMYAFCRVKDPNSGLPKFVLINWTGEGVNDVRKGACASHVSTMASFLKGAHVTINARAEEDVEPECIMEKVAKASGANYSFHKESGRFQDVGPQAPVGSVYQKTNAVSEIKRVGKDSFWAKAEKEEENRRLEEKRRAEEAQRQLEQERRERELREAARREQRYQEQGGEASPQSRTWEQQQEVVSRNRNEQGSTCASLQESAVHPREIFKQKERAMSTTSISSPQPGKLRSPFLQKQLTQPETHFGREPAAAISRPRADLPAEEPAPSTPPCLVQAEEEAVYEEPPEQETFYEQPPLVQQQGAGSEHIDHHIQGQGLSGQGLCARALYDYQAADDTEISFDPENLITGIEVIDEGWWRGYGPDGHFGMFPANYVELIE

SEQ ID NO: 3976 - protein, 382 aa, Homo sapiens
MAANLSRNGPALQEAYVRVVTEKSPTDWALFTYEGNSNDIRVAGTGEGGLEEMVEELNSGKVMYAFCRVKDPNSGLPKFVLINWTGEGVNDVRKGACASHVSTMASFLKGSVYQKTNAVSEIKRVGKDSFWAKAEKEEENRRLEEKRRAEEAQRQLEQERRERELREAARREQRYQEQGGEASPQSRTWEQQQEVVSRNRNEQESAVHPREIFKQKERAMSTTSISSPQPGKLRSPFLQKQLTQPETHFGREPAAAISRPRADLPAEEPAPSTPPCLVQAEEEAVYEEPPEQETFYEQPPLVQQQGAGSEHIDHHIQGQGLSGQGLCARALYDYQAADDTEISFDPENLITGIEVIDEGWWRGYGPDGHFGMFPANYVELIE

SEQ ID NO: 3977 - protein, 128 aa, Homo sapiens
MAANLSRNGPALQEAYVRVVTEKSPTDWALFTYEGNSNDIRVAGTGEGGLEEMVEELNSGKVMYAFCRVKDPNSGLPKFVLINWTGEGVNDVRKGACASHVSTMASFLKVRPGGPCDHQRTGRGGCGA

SEQ ID NO: 3978 - protein, 62 aa, Homo sapiens
MAANLSRNGPALQEAYVRVVTEKSPTDWALFTYEGNSNDIRVAGTGGGPCDHQRTGRGGCGA

SEQ ID NO: 3979 - protein, 31 aa, Homo sapiens
MAANLSRNGPALQEAYVRVVTEKSPTDWGPM

SEQ ID NO: 3980 - protein, 40 aa, Homo sapiens
MAANLSRNGPALQEAYVRVVTEKSPTDWWAARRARGSLYL

SEQ ID NO: 3981 - protein, 48 aa, Homo sapiens
MAANLSRNGPALQEAYVRVVTEKSPTDWWAARRARVGPGAASGGSLYL

SEQ ID NO: 3982 - protein, 48 aa, Homo sapiens; identical to SEQ ID NO: 3981

SEQ ID NO: 3983 - protein, 327 aa, Homo sapiens
MASFLKGAHVTINARAEEDVEPECIMEKVAKASGANYSFHKESGRFQDVGPQAPVGSVYQKTNAVSEIKRVGKDSFWAKAEKEEENRRLEEKRRAEEAQRQLEQERRERELREAARREQRYQEQGGEASPQRTWEQQQEVVSRNRNEQESAVHPREIFKQKERAMSTTSISSPQPGKLRSPFLQKQLTQPETHFGREPAAAISRPRADLPAEEPAPSTPPCLVQAEEEAVYEEPPEQETFYEQPPLVQQQGAGSEHIDHHIQGQGLSGQGLCARALYDYQAADDTEISFDPENLITGIEVIDEGWWRGYGPDGHFGMFPANYVELIE

SEQ ID NO: 3984 - protein, 336 aa, Homo sapiens
MKATAMTSAWLAQGGAHVTINARAEEDVEPECIMEKVAKASGANYSFHKESGRFQDVGPQAPVGSVYQKTNAVSEIKRVGKDSFWAKAEKEEENRRLEEKRRAEEAQRQLEQERRERELREAARREQRYQEQGGEASPQSRTWEQQQEVVSRNRNEQESAVHPREIFKQKERAMSTTSISSPQPGKLRSPFLQKQLTQPETHFGREPAAAISRPRADLPAEEPAPSTPPCLVQAEEEAVYEEPPEQETFYEQPPLVQQQGAGSEHIDHHIQGQGLSGQGLCARALYDYQAADDTEISFDPENLITGIEVIDEGWWRGYGPDGHFGMFPANYVELIE

SEQ ID NO: 3985 - protein, 359 aa, Homo sapiens
  SITE 1: note = misc_feature - Xaa can be any naturally occurring amino acid
XATAMTSAWLAQGTGEGVNDVRKGACASHVSTMASFLKGAHVTINARAEEDVEPECIMEKVAKASGANYSFHKESGRFQDVGPQAPVGSVYQKTNAVSEIKRVGKDSFWAKAEKEEENRRLEEKRRAEEAQRQLEQERRERELREAARREQRYQEQGGEASPQRTWEQQQEVVSRNRNEQESAVHPREIFKQKERAMSTTSISSPQPGKLRSPFLQKQLTQPETHFGREPAAAISRPRADLPAEEPAPSTPPCLVQAEEEAVYEEPPEQETFYEQPPLVQQQGAGSEHIDHHIQGQGLSGQGLCARALYDYQAADDTEISFDPENLITGIEVIDEGWWRGYGPDGHFGMFPANYVELIE

SEQ ID NO: 3986 - protein, 138 aa, Homo sapiens
  SITE 1: note = misc_feature - Xaa can be any naturally occurring amino acid
XKQKERAMSTTSISSPQPDLPAEEPAPSTPPCLVQAEEEAVYEEPPEQETFYEQPPLVQQQGAGSEHIDHHIQGQGLSGQGLCARALYDYQAADDTEISFDPENLITGIEVIDEGWWRGYGPDGHFGMFPANYVELIE

SEQ ID NO: 3987 - protein, 77 aa, Homo sapiens
MRFMTLLFLTALAGALVCAYDPEAASAPGSGNHKQMDCLQLQKPPSETAKFLSSSTNLPRREKLVPSAKPPHTRGLV

SEQ ID NO: 3988 - protein, 110 aa, Homo sapiens
MRFMTLLFLTALAGALVCAYDPEAASAPGSGNPCHEASAAQKENAGEDPGLARQAPKPRKQRSSLLEKGLDGAKKAVGGLGKLGKDAVEDLESVGKGAVHDVKDVLDSVL

SEQ ID NO: 3989 - protein, 121 aa, Homo sapiens
MRFMTLLFLTALAGALVCAYDPEAASAPGSGNPCHEASAAQKENAGEDPGLARQAPKPRKQRSSLLEKGLDGAKKAVGGLGKLGKDAVEDLESVGKGGEERLVFGAPVNLTSIPLTSVSRP

SEQ ID NO: 3990 - protein, 100 aa, Homo sapiens
MKATIILLLLAQVSWAGPFQQRGLFDFMLEDEASGIGPEVPDDRDFEPSLGPVCPFRCQCHLRVVQCSDLEKFGLEIPRALHLEDKSPERLKLSGWAKGE

SEQ ID NO: 3991 - protein, 98 aa, Homo sapiens
MKATIILLLLAQVSWAGPFQQRGLFDFMLEDEASGIGPEVPDDRDFEPSLGPVCPFRCQCHLRVVQCSDLEKKYCNNLSSYNLYTTNCLILCRLFTHH

SEQ ID NO: 3992 - protein, 98 aa, Homo sapiens; identical to SEQ ID NO: 3991

SEQ ID NO: 3993 - protein, 250 aa, Homo sapiens
MKATIILLLLAQVSWAGPFQQRGLFDFMLEDEASGIGPEVPDDRDFEPSLGPVCPFRCQCHLRVVQCSDLELGTNPLKSSGIENGAFQGMKKLSYIRIADTNITSIPQGLPPSLTELHLDGNKISRVDAASLKGLNNLAKLGLSFNSISAVDNGSLANTPHLRELHLDNNKLTRVPGGLAEHKYIQVVYLHNNNISVVGSSDFCPPGHNTKKASYSGVSLFSNPVQYWEIQPSTFRCVYVRSAIQLGNYK

SEQ ID NO: 3994 - protein, 75 aa, Homo sapiens
MKATIILLLLAQVSWAGPFQQRGLFDFMLEDEASGIGPEVPDDRDFEPSLGPVCPFRCQCHLRVVQCSDLGCLPS

SEQ ID NO: 3995 - protein, 119 aa, Homo sapiens
MKATIILLLLAQVSWAGPFQQRGLFDFMLEDEASGIGPEVPDDRDFEPSLGPVCPFRCQCHLRVVQCSDLGLDKVPKDLPPDTTLLDLQNNKITEIKDGDFKNLKNLHALILVNNKISK

SEQ ID NO: 3996 - protein, 174 aa, Homo sapiens
MKATIILLLLAQVSWAGPFQQRGLFDFMLEDEASGIGPEVPDDRDFEPSLGPVCPFRCQCHLRVVQCSDLGLDKVPKDLPPDTTLLDLQNNKITEIKDGDFKNLKNLHALILVNNKISKVSPGAFTPLVKLERLYLSKNQLKELPEKMPKTLQELRAHENEITKVRKVTFNGLN

SEQ ID NO: 3997 - protein, 178 aa, Homo sapiens
MKATIILLLLAQVSWAGPFQQRGLFDFMLEDEASGIGPEVPDDRDFEPSLGPVCPFRCQCHLRVVQCSDLGLDKVPKDLPPDTTLLDLQNNKITEIKDGDFKNLKNLHALILVNNKISKVSPGAFTPLVKLERLYLSKNQLKELPEKMPKTLQELRAHENEITKVRKVTFNGLNQMIV

SEQ ID NO: 3998 - protein, 179 aa, Homo sapiens
MKATIILLLLAQVSWAGPFQQRGLFDFMLEDEASGIGPEVPDDRDFEPSLGPVCPFRCQCHLRVVQCSDLGLDKVPKDLPPDTTLLDLQNNKITEIKDGDFKNLKNLHALILVNNKISKVSPGAFTPLVKLERLYLSKNQLKELPEKMPKTLQELRAHENEITKVRKVTFNGLNQMIVI

SEQ ID NO: 3999 - protein, 359 aa, Homo sapiens
MKATIILLLLAQVSWAGPFQQRGLFDFMLEDEASGIGPEVPDDRDFEPSLGPVCPFRCQCHLRVVQCSDLGLDKVPKDLPPDTTLLDLQNNKITEIKDGDFKNLKNLHALILVNNKISKVSPGAFTPLVKLERLYLSKNQLKELPEKMPKTLQELRAHENEITKVRKVTFNGLNQMIVIELGTNPLKSSGIENGAFQGMKKLSYIRIADTNITSIPQGLPPSLTELHLDGNKISRVDAASLKGLNNLAKLGLSFNSISAVDNGSLANTPHLRELHLDNNKLTRVPGGLAEHKYIQVVYLHNNNISVVGSSDFCPPGHNTKKASYSGVSLFSNPVQYWEIQPSTFRCVYVRSAIQLGNYK

SEQ ID NO: 4000 - protein, 359 aa, Homo sapiens; identical to SEQ ID NO: 3999

SEQ ID NO: 4001 - protein, 359 aa, Homo sapiens; identical to SEQ ID NO: 3999

SEQ ID NO: 4002 - protein, 172 aa, Homo sapiens
MKATIILLLLAQVSWAGPFQQRGLFDFMLEDEASGIGPEVPDDRDFEPSLGPVCPFRCQCHLRVVQCSDLGLDKVPKDLPPDTTLLDLQNNKITEIKDGDFKNLKNLHVVYLHNNNISVVGSSDFCPPGHNTKKASYSGVSLFSNPVQYWEIQPSTFRCVYVRSAIQLGNYK

SEQ ID NO: 4003 - protein, 177 aa, Homo sapiens
MKATIILLLLAQVSWAGPFQQRGLFDFMLEDEASGIGPEVPDDRDFEPSLGPVCPFRCQCHLRVVQCSDLGLPPSLTELHLDGNKISRVDAASLKGLNNLAKLGLSFNSISAVDNGSLANTPHLRELHLDNNKLTRVPGGLAEHKYIQVVYLHNNNISVVGSSDFCPPGHNTKKASY

SEQ ID NO: 4004 - protein, 212 aa, Homo sapiens
MKATIILLLLAQVSWAGPFQQRGLFDFMLEDEASGIGPEVPDDRDFEPSLGPVCPFRCQCHLRVVQCSDLGLPPSLTELHLDGNKISRVDAASLKGLNNLAKLGLSFNSISAVDNGSLANTPHLRELHLDNNKLTRVPGGLAEHKYIQVVYLHNNNISVVGSSDFCPPGHNTKKASYSGVSLFSNPVQYWEIQPSTFRCVYVRSAIQLGNYK

SEQ ID NO: 4005 - protein, 212 aa, Homo sapiens; identical to SEQ ID NO: 4004

SEQ ID NO: 4006 - protein, 88 aa, Homo sapiens
MKATIILLLLAQVSWAGPFQQRGLFDFMLEDEASGIGPEVPDDRDFEPSLGPVCPFRCQCHLRVVQCSDLVETGFHRVSQDGLDLLIS

SEQ ID NO: 4007 - protein, 52 aa, Homo sapiens
  SITE 1: note = misc_feature - Xaa can be any naturally occurring amino acid
XDFCPPGHNTKKASYSGVSLFSNPVQYWEIQPSTFRCVYVRSAIQLGNYKKK

SEQ ID NO: 4008 - protein, 95 aa, Homo sapiens
  SITE 1: note = misc_feature - Xaa can be any naturally occurring amino acid
XKISRVDAASLKGLNNLAKLGLSFNSISAVDNGSLANTPHLRELHLDNNKLTRVPGGLAEHKYIQVMQSHCLCEEYPKSKTPTLLMGCWEAGSSS

SEQ ID NO: 4009 - protein, 66 aa, Homo sapiens
MNRRRKFLLASVLALQNSSFIYPSCQKCFSRIILVSKRILKTNLDKVQMPVTSYSNALTTKEKPKH

SEQ ID NO: 4010 - protein, 75 aa, Homo sapiens
MNRRRKFLLASVLALQNSSFIYPSCQKCFSRIILVSKRSNCPKCGSTGESGNANYRYKLSLKVAESNKLFVITVF

SEQ ID NO: 4011 - protein, 76 aa, Homo sapiens
MNRRRKFLLASVLALQNSSFIYPSCQKCFSRIILVSKRSNCPKCGSTGESGNANYRYKLSLKVAESNKLFVITVFG

SEQ ID NO: 4012 - protein, 120 aa, Homo sapiens
MNRRRKFLLASVLALQNSSFIYPSCQKCFSRIILVSKRSNCPKCGSTGESGNANYRYKLSLKVAESNKLFVITVFGSCLDTFFGLTATGLHRILKTNLDKVQMPVTSYSNALTTKEKPKH

SEQ ID NO: 4013 - protein, 120 aa, Homo sapiens; identical to SEQ ID NO: 4012

SEQ ID NO: 4014 - protein, 123 aa, Homo sapiens
MNRRRKFLLASVLALQNSSFIYPSCQKCFSRIILVSKRSNCPKCGSTGESGNANYRYKLSLKVAESNKLFVITVFGSCLDTFFGLTATGLHRYIQDPNKIPETLDNDTTQNLLTKAVETCFVG

SEQ ID NO: 4015 - protein, 178 aa, Homo sapiens
MNRRRKFLLASVLALQNSSFIYPSCQKCFSRIILVSKRSNCPKCGSTGESGNANYRYKLSLKVAESNKLFVITVFGSCLDTFFGLTATGLHRYIQDPNKIPETLDNDTTQNLLTKAVETCFVGQSFIFGVTNFENQPGQGSDASNFLQQCSDHKRKAKALVACQIVLPDPATQDAKTK

SEQ ID NO: 4016 - protein, 998 aa, Homo sapiens
MNRRRKFLLASVLALQNSSFIYPSCQKCFSRIILVSKRSNCPKCGSTGESGNANYRYKLSLKVAESNKLFVITVFGSCLDTFFGLTATGLHRYIQDPNKIPETLDNDTTQNLLTKAVETCFVGQSFIFGVTNFENQPGQGSDASNFLQQCSDHKRKAKALVACQIVLPDPGIAGFTVIDYFHQLLQTFNFRKLQCDSQAPNNHLLALDHSNSDLSSIYTSDSTSDFFKSCSKDTFSKFWQPSLEFTCIVSQLTDNDDFSASEQSKAFGTLQQNRKSISIAEATGSSSCHDPIQDSWSLVSYMDKKSTAEKLGKELGLQAKELSAVHSSHHEIGVNDSNLFSLEMREPLESSNTKSFHSAVEIKNRSQHELPCFQHHGIDTPTSLQKRSACCPPSLLRLEETASSSQDGDPQIWDDLPFSESLNKFLAVLESEIAVTQADVSSRKHHVDNDIDKFHADHSRLSVTPQRTTGALHTPPIALRSSQVIVKANCSKDDFLFNCKGNLSPSVEKESQPDNKVEAVSVNHNGRDMSEYFLPNPYLSALSSSSKDLETIVTLKKTIRISPHRESDHSSLNNKYLNGCGEISVSEMNEKLTTLCYRKYNDVSDLCKLENKQYCRWSKNQDDSFTICRKLTYPLETLCNSPNRSTNTLKEMPWGHINNNVTQSYSIGYEGSYDASADLFDDIAKEMDIATEITKKSQDILLKWGTSLAESHPSESDFSLRSLSEDFIQPSQKLSLQSLSDSRHSRTCSPTPHFQSDSEYNFENSQDFVPCSQSTPISGFHQTRIHGINRAFKKPVFYSDLDGNYEKIRIFPENDKQQASPSCPKNIKTPSQKIRSPIVSGVSQPDVFNHYPFAECHETDSDEWVPPTTQKIFPSDMLGFQGIGLGKCLAAYHFPDQQELPRKKLKHIRQGTNKGLIKKKLKNMLAAVVTKKKTHKYNCKSSGWISKCPDIQVLAAPQLHPILGPDSCSEVKCCLPFSEKGPPSVCETRSAWSPELFS

SEQ ID NO: 4017 - protein, 998 aa, Homo sapiens; identical to SEQ ID NO: 4016

SEQ ID NO: 4018 - protein, 225 aa, Homo sapiens
MYQMSTLKSNKVIFQLKKNNFHQFRFFKRFIWSFALVAQAEVPWCNLGSLQPPHPRPRCEHMNRRRKFLLASVLALQNSSFIYPSCQKCFSRIILVSKRSNCPKCGSTGESGNANYRYKLSLKVAESNKLFVITVFGSCLDTFFGLTATGLHRYIQDPNKIPETLDNDTTQNLLTKAVETCFVGQSFIFGVTNFENQPGQGSDASNFLQQCSDHKRKAKALVACQ

SEQ ID NO: 4019 - protein, 439 aa, Homo sapiens
MEPSTAARAWALFWLLLPLLGAVCASGPRTLVLLDNLNVRETHSLFFRSLKDRGFELTFKTADDPSLSLIKYGEFLYDNLIIFSPSVEDFGGNINVETISAFIDGGGSVLVAASSDIGDPLRELGSECGIEFDEEKTAVIDHHNYDISDLGQHTLIVADTENLLKAPTIVGKSSLNPILFRGVGMVADPDNPLVLDILTGSSTSYSFFPDKPITQYPHAVGKNTLLIAGLQARNNARVIFSGSLDFFSDSFFNSAVQKAAPGSQRYSQTGNYELAVALSRWVFKEEGVLRVGPVSHHRVGETAPPNAYTVTDLVEYSIVIQQLSNGKWVPFDGDDIQLEFVRIDPFVRTFLKKKGGKYSVQFKLPDVYGVFQFKVDYNRLGYTHLYSSTQVSVRPLQHTQYERFIPSAYPYYASAFSMMLGLFIFSIVFLHMKEKEKSD

SEQ ID NO: 4020 - protein, 155 aa, Homo sapiens [sequence omitted]

SEQ ID NO: 4021 - protein, 456 aa, Homo sapiens
MGYFRCARAGSFGRRRKMEPSTAARAWALFWLLLPLLGAVCASGPRTLVLLDNLNVRETHSLFFRSLKDRGFELTFKTADDPSLSLIKYGEFLYDNLIIFSPSVEDFGGNINVETISAFIDGGGSVLVAASSDIGDPLRELGSECGIEFDEEKTAVIDHHNYDISDLGQHTLIVADTENLLKAPTIVGKSSLNPILFRGVGMVADPDNPLVLDILTGSSTSYSFFPDKPITQYPHAVGKNTLLIAGLQARNNARVIFSGSLDFFSDSFFNSAVQKAAPGSQRYSQTGNYELAVALSRWVFKEEGVLRVGPVSHHRVGETAPPNAYTVTDLVEYSIVIQQLSNGKWVPFDGDDIQLEFVRIDPFVRTFLKKKGGKYSVQFKLPDVYGVFQFKVDYNRLGYTHLYSSTQVSVRPLQHTQYERFIPSAYPYYASAFSMMLGLFIFSIVFLHMKEKEKSD

SEQ ID NO: 4022 - protein, 456 aa, Homo sapiens; identical to SEQ ID NO: 4021

SEQ ID NO: 4023 - protein, 41 aa, Homo sapiens
MGPEALSSLLLLLLVASGDADMKGHFDPAKCRYALGMQDRT

SEQ ID NO: 4024 - protein, 51 aa, Homo sapiens
MGPEALSSLLLLLLVASGDADMKGHFDPAKCRYALGMQDRTIPDSDISASS

SEQ ID NO: 4025 - protein, 51 aa, Homo sapiens; identical to SEQ ID NO: 4024

SEQ ID NO: 4026 - protein, 55 aa, Homo sapiens
MGPEALSSLLLLLLVASGDADMKGHFDPAKCRYALGMQDRTIPDSDISASSSWSD

SEQ ID NO: 4027 - protein, 58 aa, Homo sapiens
MGPEALSSLLLLLLVASGDADMKGHFDPAKCRYALGMQDRTIPDSDISASSSWSDSTA

SEQ ID NO: 4028 - protein, 70 aa, Homo sapiens
MGPEALSSLLLLLLVASGDADMKGHFDPAKCRYALGMQDRTIPDSDISASSSWSDSTAARHSRLESSDGD

SEQ ID NO: 4029 - protein, 73 aa, Homo sapiens
MGPEALSSLLLLLLVASGDADMKGHFDPAKCRYALGMQDRTIPDSDISASSSWSDSTAARHSRLESSDGDGAW

SEQ ID NO: 4030 - protein, 78 aa, Homo sapiens
MGPEALSSLLLLLLVASGDADMKGHFDPAKCRYALGMQDRTIPDSDISASSSWSDSTAARHSRLESSDGDGAWCPAGS

SEQ ID NO: 4031 - protein, 85 aa, Homo sapiens
MGPEALSSLLLLLLVASGDADMKGHFDPAKCRYALGMQDRTIPDSDISASSSWSDSTAARHSRLESSDGDGAWCPAGSVFPKEEE

SEQ ID NO: 4032 - protein, 101 aa, Homo sapiens
MGPEALSSLLLLLLVASGDADMKGHFDPAKCRYALGMQDRTIPDSDISASSSWSDSTAARHSRLESSDGDGAWCPAGSVFPKEEEYLQVDLQRLHLVALVG

SEQ ID NO: 4033 - protein, 112 aa, Homo sapiens
MGPEALSSLLLLLLVASGDADMKGHFDPAKCRYALGMQDRTIPDSDISASSSWSDSTAARHSRLESSDGDGAWCPAGSVFPKEEEYLQVDLQRLHLVALVGTQGRHAGGLGK

SEQ ID NO: 4034 - protein, 115 aa, Homo sapiens
MGPEALSSLLLLLLVASGDADMKGHFDPAKCRYALGMQDRTIPDSDISASSSWSDSTAARHSRLESSDGDGAWCPAGSVFPKEEEYLQVDLQRLHLVALVGTQGRHAGGLGKEFS

SEQ ID NO: 4035 - protein, 122 aa, Homo sapiens
MGPEALSSLLLLLLVASGDADMKGHFDPAKCRYALGMQDRTIPDSDISASSSWSDSTAARHSRLESSDGDGAWCPAGSVFPKEEEYLQVDLQRLHLVALVGTQGRHAGGLGKEFSRSYRLRY

SEQ ID NO: 4036 - protein, 127 aa, Homo sapiens
MGPEALSSLLLLLLVASGDADMKGHFDPAKCRYALGMQDRTIPDSDISASSSWSDSTAARHSRLESSDGDGAWCPAGSVFPKEEEYLQVDLQRLHLVALVGTQGRHAGGLGKEFSRSYRLRYSRDGR

SEQ ID NO: 4037 - protein, 132 aa, Homo sapiens
MGPEALSSLLLLLLVASGDADMKGHFDPAKCRYALGMQDRTIPDSDISASSSWSDSTAARHSRLESSDGDGAWCPAGSVFPKEEEYLQVDLQRLHLVALVGTQGRHAGGLGKEFSRSYRLRYSRDGRRWMGW

SEQ ID NO: 4038 - protein, 138 aa, Homo sapiens
MGPEALSSLLLLLLVASGDADMKGHFDPAKCRYALGMQDRTIPDSDISASSSWSDSTAARHSRLESSDGDGAWCPAGSVFPKEEEYLQVDLQRLHLVALVGTQGRHAGGLGKEFSRSYRLRYSRDGRRWMGWKDRWGQ

SEQ ID NO: 4039 - protein, 138 aa, Homo sapiens; identical to SEQ ID NO: 4038

SEQ ID NO: 4040 - protein, 143 aa, Homo sapiens
MGPEALSSLLLLLLVASGDADMKGHFDPAKCRYALGMQDRTIPDSDISASSSWSDSTAARHSRLESSDGDGAWCPAGSVFPKEEEYLQVDLQRLHLVALVGTQGRHAGGLGKEFSRSYRLRYSRDGRRWMGWKDRWGQEVISG

SEQ ID NO: 4041 - protein, 147 aa, Homo sapiens
MGPEALSSLLLLLLVASGDADMKGHFDPAKCRYALGMQDRTIPDSDISASSSWSDSTAARHSRLESSDGDGAWCPAGSVFPKEEEYLQVDLQRLHLVALVGTQGRHAGGLGKEFSRSYRLRYSRDGRRWMGWKDRWGQEVISGNEDP

SEQ ID NO: 4042 - protein, 153 aa, Homo sapiens
MGPEALSSLLLLLLVASGDADMKGHFDPAKCRYALGMQDRTIPDSDISASSSWSDSTAARHSRLESSDGDGAWCPAGSVFPKEEEYLQVDLQRLHLVALVGTQGRHAGGLGKEFSRSYRLRYSRDGRRWMGWKDRWGQEVISGNEDPEGVVLK

SEQ ID NO: 4043 - protein, 160 aa, Homo sapiens
MGPEALSSLLLLLLVASGDADMKGHFDPAKCRYALGMQDRTIPDSDISASSSWSDSTAARHSRLESSDGDGAWCPAGSVFPKEEEYLQVDLQRLHLVALVGTQGRHAGGLGKEFSRSYRLRYSRDGRRWMGWKDRWGQEVISGNEDPEGVVLKDLGPPMV

SEQ ID NO: 4044 - protein, 170 aa, Homo sapiens
MGPEALSSLLLLLLVASGDADMKGHFDPAKCRYALGMQDRTIPDSDISASSSWSDSTAARHSRLESSDGDGAWCPAGSVFPKEEEYLQVDLQRLHLVALVGTQGRHAGGLGKEFSRSYRLRYSRDGRRWMGWKDRWGQEVISGNEDPEGVVLKDLGPPMVARLVRFYPRA

SEQ ID NO: 4045 - protein, 243 aa, Homo sapiens
MGPEALSSLLLLLLVASGDADMKGHFDPAKCRYALGMQDRTIPDSDISASSSWSDSTAARHSRLESSDGDGAWCPAGSVFPKEEEYLQVDLQRLHLVALVGTQGRHAGGLGKEFSRSYRLRYSRDGRRWMGWKDRWGQEVISGNEDPEGVVLKDLGPPMVARLVRFYPRADRVMSVCLRVELYGCLWRDCSMGVWASWQMVWWGWMTLGRVRSCGSGQAMTMWDGATTASPVAMWRWSLSLTG

SEQ ID NO: 4046 - protein, 243 aa, Homo sapiens; identical to SEQ ID NO: 4045

SEQ ID NO: 4047 - protein, 209 aa, Homo sapiens
MGPEALSSLLLLLLVASGDADMKGHFDPAKCRYALGMQDRTIPDSDISASSSWSDSTAARHSRLESSDGDGAWCPAGSVFPKEEEYLQVDLQRLHLVALVGTQGRHAGGLGKEFSRSYRLRYSRDGRRWMGWKDRWGQEVISGNEDPEGVVLKDLGPPMVARLVRFYPRADRVMSVCLRVELYGCLWRDGLLSYTAPVGQTMYLSEAVY

SEQ ID NO: 4048 - protein, 913 aa, Homo sapiens
MGPEALSSLLLLLLVASGDADMKGHFDPAKCRYALGMQDRTIPDSDISASSSWSDSTAARHSRLESSDGDGAWCPAGSVFPKEEEYLQVDLQRLHLVALVGTQGRHAGGLGKEFSRSYRLRYSRDGRRWMGWKDRWGQEVISGNEDPEGVVLKDLGPPMVARLVRFYPRADRVMSVCLRVELYGCLWRDGLLSYTAPVGQTMYLSEAVYLNDSTYDGHTVGGLQYGGLGQLADGVVGLDDFRKSQELRVWPGYDYVGWSNHSFSSGYVEMEFEFDRLRAFQAMQVHCNNMHTLGARLPGGVECRFRRGPAMAWEGEPMRHNLGGNLGDPRARAVSVPLGGRVARFLQCRFLFAGPWLLFSEISFISDVVNNSSPALGGTFPPAPWWPPGPPPTNFSSLELEPRGQQPVAKAEGSPTAILIGCLVAIILLLLLIIALMLWRLHWRRLLSKAERRVLEEELTVHLSVPGDTILINNRPGPREPPPYQEPRPRGNPPHSAPCVPNGSALLLSNPAYRLLLATYARPPRGPGPPTPAWAKPTNTQAYSGDYMEPEKPGAPLLPPPPQNSVPHYAEADIVTLQGVTGGNTYAVPALPPGAVGDGPPRVDFPRSRLRFKEKLGEGQFGEVHLCEVDSPQDLVSLDFPLNVRKGHPLLVAVKILRPDATKNARNDFLKEVKIMSRLKDPNIIRLLGVCVQDDPLCMITDYMENGDLNQFLSAHQLEDKAAEGAPGDGQAAQGPTISYPMLLHVAAQIASGMRYLATLNFVHRDLATRNCLVGENFTIKIADFGMSRNLYAGDYYRVQGRAVLPIRWMAWECILMGKFTTASDVWAFGVTLWEVLMLCRAQPFGQLTDEQVIENAGEFFRDQGRQVYLSRPPACPQGLYELMLRCWSRESEQRPPFSQLHRFLAEDALNTV

SEQ ID NO: 4049 - protein, 876 aa, Homo sapiens
MGPEALSSLLLLLLVASGDADMKGHFDPAKCRYALGMQDRTIPDSDISASSSWSDSTAARHSRLESSDGDGAWCPAGSVFPKEEEYLQVDLQRLHLVALVGTQGRHAGGLGKEFSRSYRLRYSRDGRRWMGWKDRWGQEVISGNEDPEGVVLKDLGPPMVARLVRFYPRADRVMSVCLRVELYGCLWRDGLLSYTAPVGQTMYLSEAVYLNDSTYDGHTVGGLQYGGLGQLADGVVGLDDFRKSQELRVWPGYDYVGWSNHSFSSGYVEMEFEFDRLRAFQAMQVHCNNMHTLGARLPGGVECRFRRGPAMAWEGEPMRHNLGGNLGDPRARAVSVPLGGRVARFLQCRFLFAGPWLLFSEISFISDVVNNSSPALGGTFPPAPWWPPGPPPTNFSSLELEPRGQQPVAKAEGSPTAILIGCLVAIILLLLLIIALMLWRLHWRRLLSKAERRVLEEELTVHLSVPGDTILINNRPGPREPPPYQEPRPRGNPPHSAPCVPNGSAYSGDYMEPEKPGAPLLPPPPQNSVPHYAEADIVTLQGVTGGNTYAVPALPPGAVGDGPPRVDFPRSRLRFKEKLGEGQFGEVHLCEVDSPQDLVSLDFPLNVRKGHPLLVAVKILRPDATKNARNDFLKEVKIMSRLKDPNIIRLLGVCVQDDPLCMITDYMENGDLNQFLSAHQLEDKAAEGAPGDGQAAQGPTISYPMLLHVAAQIASGMRYLATLNFVHRDLATRNCLVGENFTIKIADFGMSRNLYAGDYYRVQGRAVLPIRWMAWECILMGKFTTASDVWAFGVTLWEVLMLCRAQPFGQLTDEQVIENAGEFFRDQGRQVYLSRPPACPQGLYELMLRCWSRESEQRPPFSQLHRFLAEDALNTV

SEQ ID NO: 4050 - protein, 876 aa, Homo sapiens; identical to SEQ ID NO: 4049

SEQ ID NO: 4051 - protein, 913 aa, Homo sapiens; identical to SEQ ID NO: 4048

SEQ ID NO: 4052 - protein, 267 aa, Homo sapiens
MGPEALSSLLLLLLVASGDADMKGHFDPAKCRYALGMQDRTIPDSDISASSSWSDSTAARHSRLESSDGDGAWCPAGSVFPKEEEYLQVDLQRLHLVALVGTQGRHAGGLGKEFSRSYRLRYSRDGRRWMGWKDRWGQEVISGNEDPEGVVLKDLGPPMVARLVRFYPRADRVMSVCLRVELYGCLWRDGLLSYTAPVGQTMYLSEAVYLNDSTYDGHTVGGLQYGGLGQLADGVVGLDDFRKSQELRVWPGYDYVGWSNHSFSSGY

SEQ ID NO: 4053 - protein, 876 aa, Homo sapiens; identical to SEQ ID NO: 4049

SEQ ID NO: 4054 - protein, 767 aa, Homo sapiens
MGPEALSSLLLLLLVASGDADMKGHFDPAKCRYALGMQDRTIPDSDISASSSWSDSTAARHSRLESSDGDGAWCPAGSVFPKEEEYLQVDLQRLHLVALVGTQGRHAGGLGKEFSRSYRLRYSRDGRRWMGWKDRWGQEVISGNEDPEGVVLKDLGPPMVARLVRFYPRADRVMSVCLRVELYGCLWRDGLLSYTAPVGQTMYLSEAVYLNDSTYDGHTVGGLQYGGLGQLADGVVGLDDFRKSQELRVWPGYDYVGWSNHSFSSGYVEMEFEFDRLRAFQAMQVHCNNMHTLGARLPGGVECRFRRGPAMAWEGEPMRHNLGGNLGDPRARAVSVPLGGRVARFLQCRFLFAGPWLLFSEISFISDVVNNSSPALGGTFPPAPWWPPGPPPTNFSSLELEPRGQQPVAKAEGSPTAILIGCLVAIILLLLLIIALMLWRLHWRRLLSKVLESHPRTRSPGLVGIRPTPLPVSPMALVHLCEVDSPQDLVSLDFPLNVRKGHPLLVAVKILRPDATKNARNDFLKEVKIMSRLKDPNIIRLLGVCVQDDPLCMITDYMENGDLNQFLSAHQLEDKAAEGAPGDGQAAQGPTISYPMLLHVAAQIASGMRYLATLNFVHRDLATRNCLVGENFTIKIADFGMSRNLYAGDYYRVQGRAVLPIRWMAWECILMGKFTTASDVWAFGVTLWEVLMLCRAQPFGQLTDEQVIENAGEFFRDQGRQVYLSRPPACPQGLYELMLRCWSRESEQRPPFSQLHRFLAEDALNTV

SEQ ID NO: 4055 - protein, 876 aa, Homo sapiens; identical to SEQ ID NO: 4049

SEQ ID NO: 4056 - protein, 876 aa, Homo sapiens; identical to SEQ ID NO: 4049

SEQ ID NO: 4057 - protein, 919 aa, Homo sapiens
MGPEALSSLLLLLLVASGDADMKGHFDPAKCRYALGMQDRTIPDSDISASSSWSDSTAARHSRLESSDGDGAWCPAGSVFPKEEEYLQVDLQRLHLVALVGTQGRHAGGLGKEFSRSYRLRYSRDGRRWMGWKDRWGQEVISGNEDPEGVVLKDLGPPMVARLVRFYPRADRVMSVCLRVELYGCLWRDGLLSYTAPVGQTMYLSEAVYLNDSTYDGHTVGGLQYGGLGQLADGVVGLDDFRKSQELRVWPGYDYVGWSNHSFSSGYVEMEFEFDRLRAFQAMQVHCNNMHTLGARLPGGVECRFRRGPAMAWEGEPMRHNLGGNLGDPRARAVSVPLGGRVARFLQCRFLFAGPWLLFSEISFISDVVNNSSPALGGTFPPAPWWPPGPPPTNFSSLELEPRGQQPVAKAEGSPTAILIGCLVAIILLLLLIIALMLWRLHWRRLLSKAERRVLEEELTVHLSVPGDTILINNRPGPREPPPYQEPRPRGNPPHSAPCVPNGSALLLSNPAYRLLLATYARPPRGPGPPTPAWAKPTNTQAYSGDYMEPEKPGAPLLPPPPQNSVPHYAEADIVTLQGVTGGNTYAVPALPPGAVGDGPPRVDFPRSRLRFKEKLGEGQFGEVHLCEVDSPQDLVSLDFPLNVRKGHPLLVAVKILRPDATKNASFSLFSRNDFLKEVKIMSRLKDPNIIRLLGVCVQDDPLCMITDYMENGDLNQFLSAHQLEDKAAEGAPGDGQAAQGPTISYPMLLHVAAQIASGMRYLATLNFVHRDLATRNCLVGENFTIKIADFGMSRNLYAGDYYRVQGRAVLPIRWMAWECILMGKFTTASDVWAFGVTLWEVLMLCRAQPFGQLTDEQVIENAGEFFRDQGRQVYLSRPPACPQGLYELMLRCWSRESEQRPPFSQLHRFLAEDALNTV

SEQ ID NO: 4058 - protein, 286 aa, Homo sapiens
MGPEALSSLLLLLLVASGDADMKGHFDPAKCRYALGMQDRTIPDSDISASSSWSDSTAARHSRLESSDGDGAWCPAGSVFPKEEEYLQVDLQRLHLVALVGTQGRHAGGLGKEFSRSYRLRYSRDGRRWMGWKDRWGQEVISGNEDPEGVVLKDLGPPMVARLVRFYPRADRVMSVCLRVELYGCLWRDGLLSYTAPVGQTMYLSEAVYLNDSTYDGHTVGGLQYGGLGQLADGVVGLDDFRKSQELRVWPGYDYVGWSNHSFSSGYVEMEFEFDRLRAFQAMQVH

SEQ ID NO: 4059 - protein, 913 aa, Homo sapiens; identical to SEQ ID NO: 4048

SEQ ID NO: 4060 - protein, 35 aa, Homo sapiens
MGPEALSSLLLLLLVASGDADMKGHFDPGPDHPRQ

SEQ ID NO: 4061 - protein, 35 aa, Homo sapiens; identical to SEQ ID NO: 4060

SEQ ID NO: 4062 - protein, 196 aa, Homo sapiens
MPHLASLFTASSRCCPHPLRPEGSGAMGPEALSSLLLLLLVASGDADMKGHFDPAKCRYALGMQDRTIPDSDISASSSWSDSTAARHSRLESSDGDGAWCPAGSVFPKEEEYLQVDLQRLHLVALVGTQGRHAGGLGKEFSRSYRLRYSRDGRRWMGWKDRWGQEVISGNEDPEGVVLKDLGPPMVARLVRFYPRA

SEQ ID NO: 4063 - protein, 894 aa, Homo sapiens
MSLPRCCPHPLRPEGSGAMGPEALSSLLLLLLVASGDADMKGHFDPAKCRYALGMQDRTIPDSDISASSSWSDSTAARHSRLESSDGDGAWCPAGSVFPKEEEYLQVDLQRLHLVALVGTQGRHAGGLGKEFSRSYRLRYSRDGRRWMGWKDRWGQEVISGNEDPEGVVLKDLGPPMVARLVRFYPRADRVMSVCLRVELYGCLWRDGLLSYTAPVGQTMYLSEAVYLNDSTYDGHTVGGLQYGGLGQLADGVVGLDDFRKSQELRVWPGYDYVGWSNHSFSSGYVEMEFEFDRLRAFQAMQVHCNNMHTLGARLPGGVECRFRRGPAMAWEGEPMRHNLGGNLGDPRARAVSVPLGGRVARFLQCRFLFAGPWLLFSEISFISDVVNNSSPALGGTFPPAPWWPPGPPPTNFSSLELEPRGQQPVAKAEGSPTAILIGCLVAIILLLLLIIALMLWRLHWRRLLSKAERRVLEEELTVHLSVPGDTILINNRPGPREPPPYQEPRPRGNPPHSAPCVPNGSAYSGDYMEPEKPGAPLLPPPPQNSVPHYAEADIVTLQGVTGGNTYAVPALPPGAVGDGPPRVDFPRSRLRFKEKLGEGQFGEVHLCEVDSPQDLVSLDFPLNVRKGHPLLVAVKILRPDATKNARNDFLKEVKIMSRLKDPNIIRLLGVCVQDDPLCMITDYMENGDLNQFLSAHQLEDKAAEGAPGDGQAAQGPTISYPMLLHVAAQIASGMRYLATLNFVHRDLATRNCLVGENFTIKIADFGMSRNLYAGDYYRVQGRAVLPIRWMAWECILMGKFTTASDVWAFGVTLWEVLMLCRAQPFGQLTDEQVIENAGEFFRDQGRQVYLSRPPACPQGLYELMLRCWSRESEQRPPFSQLHRFLAEDALNTV

SEQ ID NO: 4064 - protein, 69 aa, Homo sapiens
MVARLVRFYPRADRVMSVCLRVELYGCLWRDGLLSYTAPVGQTMYLSEAVYLNDSTYDGHTVGGLQYGG

SEQ ID NO: 4065 - protein, 493 aa, Homo sapiens
SEAVYLNDSTYDGHTVGGLQYGGLGQLADGVVGLDDFRKSQELRVWPGYDYVGWSNHSFSSGYVEMEFEFDRLRAFQAMQVHCNNMHTLGARLPGGVECRFRRGPAMAWEGEPMRHNLGGNLGDPRARAVSVPLGGRVARFLQCRFLFAGPWLLFSEISFISDVVNNSSPALGGTFPPAPWWPPGPPPTNFSSLELEPRGQQPVAKAEGSPTAILIGCLVAIILLLLLIIALMLWRLHWRRLLSKVLESHPRTRSPGLVGIRPTPLPVSPMALRCCSPIQPTASFWPLTPVPLEARAPPHPPGPNPPTPRGVTGGNTYAVPALPPGAVGDGPPRVDFPRSRLRFKEKLGEGQFGEVHLCEVDSPQDLVSLDFPLNVRKGHPLLVAVKILRPDATKNARNDFLKEVKIMSRLKDPNIIRLLGVCVQDDPLCMITDYMENGDLNQFLSAHQLEDKAAEGAPGDGQAAQGPTISYPMLLHVAAQIASGMRYLATLN

SEQ ID NO: 4066 - protein, 172 aa, Homo sapiens
  SITE 1: note = misc_feature - Xaa can be any naturally occurring amino acid
XNNRPGPREPPPYQEPRPRGNPPHSAPCVPNGSAYSGDYMEPEKPGAPLLPPPPQNSVPHYAEADIVTLQGVTGGNTYAVPALPPGAVGDGPPRVDFPRSRLRFKEKLGEGQFGEVHLCEVDSPQDLVSLDFPLNVRKGHPLLVAVKILRPDATKNASFSLFSRNDFLKEVK

SEQ ID NO: 4067 - protein, 277 aa, Homo sapiens
  SITE 1: note = misc_feature - Xaa can be any naturally occurring amino acid
XRKGHPLLVAVKILRPDATKNARNDFLKEVKIMSRLKDPNIIRLLGVCVQDDPLCMITDYMENGDLNQFLSAHQLEDKAAEGAPGDGQAAQGPTISYPMLLHVAAQIASGMRYLATLNFVHRDLATRNCLVGENFTIKIADFGMSRNLYAGDYYRVQGRAVLPIRWMAWECILMGKFTTASDVWAFGVTLWEVLMLCRAQPFGQLTDEQVIENAGEFFRDQGRQVRVEEREDGSEAGDRRGRVVILETKEYLFPDSHPHCHNAGVPVPAACLPAGPI

SEQ ID NO: 4068 - protein, 196 aa, Homo sapiens
  SITE 1: note = misc_feature - Xaa can be any naturally occurring amino acid
XSLLLLLLVASGDADMKGHFDPAKCRYALGMQDRTIPDSDISASSSWLESSDGDGAWCPAGSVFPKEEEYLQVDLQRLHLVALVGTQGRHAGGLGKEFSRSYRLRYSRDGRRWMGWKDRWGQEVISGNEDPEGVVLKDLGPPMVARLVRFYPRADRVMSVCLRVELYGCLWRDGLLSYTAPVGQTMYLSEAVYLND

SEQ ID NO: 4069 - protein, 166 aa, Homo sapiens
LKVDDSNTRILIGCLVAIIFILLAIIVIILWRQFWQKMLEKASRRMLDDEMTVSLSLPSDSSMFNNNRSSSPSEQGSNSTYDRIFPLRPDYQEPSRLIRKLPEFAPGEEESGEDDVVGRVSREKPQQASGRYDTPAPSSLHLFLVSANLLRSPHSLSRFGLPLLLA

SEQ ID NO: 4070 - protein, 130 aa, Homo sapiens
MILIPRMLLVLFLLLPILSSAKAQVNPAICRYPLGMSGGQIPDEDITASSQWSESTAAKYGRLDSEEGDGAWCPEIPVEPDDLKEFLQIDLHTLHFITLVGTQGRHAGGHGIEFAPMYKINYSRDGTRWI

SEQ ID NO: 4071 - protein, 148 aa, Homo sapiens
MILIPRMLLVLFLLLPILSSAKAQVNPAICRYPLGMSGGQIPDEDITASSQWSESTAAKYGRLDSEEGDGAWCPEIPVEPDDLKEFLQIDLHTLHFITLVGTQGRHAGGHGIEFAPMYKINYSRDGTRWISWRNRHGKQVLDGNSNPY

SEQ ID NO: 4072 - protein, 855 aa, Homo sapiens
MILIPRMLLVLFLLLPILSSAKAQVNPAICRYPLGMSGGQIPDEDITASSQWSESTAAKYGRLDSEEGDGAWCPEIPVEPDDLKEFLQIDLHTLHFITLVGTQGRHAGGHGIEFAPMYKINYSRDGTRWISWRNRHGKQVLDGNSNPYDIFLKDLEPPIVARFVRFIPVTDHSMNVCMRVELYGCVWLDGLVSYNAPAGQQFVLPGGSIIYLNDSVYDGAVGYSMTEGLGQLTDGVSGLDDFTQTHEYHVWPGYDYVGWRNESATNGYIEIMFEFDRIRNFTTMKVHCNNMFAKGVKIFKEVQCYFRSEASEWEPNAISFPLVLDDVNPSARFVTVPLHHRMASAIKCQYHFADTWMMFSEITFQSDAAMYNNSEALPTSPMAPTTYDPMLKVDDSNTRILIGCLVAIIFILLAIIVIILWRQFWQKMLEKASRRMLDDEMTVSLSLPSDSSMFNNNRSSSPSEQGSNSTYDRIFPLRPDYQEPSRLIRKLPEFAPGEEESGCSGVVKPVQPSGPEGVPHYAEADIVNLQGVTGGNTYSVPAVTMDLLSGKDVAVEEFPRKLLTFKEKLGEGQFGEVHLCEVEGMEKFKDKDFALDVSANQPVLVAVKMLRADANKNARNDFLKEIKIMSRLKDPNIIHLLAVCITDDPLCMITEYMENGDLNQFLSRHEPPNSSSSDVRTVSYTNLKFMATQIASGMKYLSSLNFVHRDLATRNCLVGKNYTIKIADFGMSRNLYSGDYYRIQGRAVLPIRWMSWESILLGKFTTASDVWAFGVTLWETFTFCQEQPYSQLSDEQVIENTGEFFRDQGRQTYLPQPAICPDSVYKLMLSCWRRDTKNRPSFQEIHLLLLQQGDE

SEQ ID NO: 4073 - protein, 855 aa, Homo sapiens; identical to SEQ ID NO: 4072

SEQ ID NO: 4074 - protein, 171 aa, Homo sapiens
  SITE 1: note = misc_feature - Xaa can be any naturally occurring amino acid
XIFILLAIIVIILWRQFWQKMLEKASRRMLDDEMTVSLSLPSDSSMFNNNRSSSPSEQGSNSTYDRIFPLRPDYQEPSRLIRKLPEFAPGEEESGCSGVVKPVQPSGPEGVPHYAEADIVNLQGVTGGNTYSVPAVTMDLLSGKDVAVEEFPRKLLTFKEKLGEGQFGEVS

SEQ ID NO: 4075 - protein, 166 aa, Homo sapiens
MPFLELDTNLPANRVPAGLEKRLCAAAASILGKPADRVNVTVRPGLAMALSGSTEPCAQLSISSIGVVGTAEDNRSHSAHFFEFLTKELALGQDRFQVKFTGDSQSSERPLAWMSRHLLSGSCIAGGPQTNLEMNHLQLATSSSVNTGEKTSLPHKKRLQPKPGVL

SEQ ID NO: 4076 - protein, 118 aa, Homo sapiens
MPFLELDTNLPANRVPAGLEKRLCAAAASILGKPADRVNVTVRPGLAMALSGSTEPCAQLSISSIGVVGTAEDNRSHSAHFFEFLTKELALGQDRILIRFFPLESWQIGKIGTVMTFL

SEQ ID NO: 4077 - protein, 118 aa, Homo sapiens; identical to SEQ ID NO: 4076

SEQ ID NO: 4078 - protein, 107 aa, Homo sapiens
MPFLELDTNLPANRVPAGLEKRLCAAAASILGKPADRVNVTVRPGLAMALSGSTEPCAQLSISSIGVVGTAEDNRSHSAHFFEFLTKELALGQDRQVPGEVHGRLTE

SEQ ID NO: 4079 - protein, 132 aa, Homo sapiens
MQLFLLAVSVPLPAMPFLELDTNLPANRVPAGLEKRLCAAAASILGKPADRVNVTVRPGLAMALSGSTEPCAQLSISSIGVVGTAEDNRSHSAHFFEFLTKELALGQDRILIRFFPLESWQIGKIGTVMTFL

SEQ ID NO: 4080 - protein, 50 aa, Homo sapiens
  SITE 1: note = misc_feature - Xaa can be any naturally occurring amino acid
XKDLPPPQEASATQTWRSVTELKFPLGILIRFFPLESWQIGKIGTVMTFL

SEQ ID NO: 4081 - protein, 729 aa, Homo sapiens
LPTGFVAPILCVLLPSPTREAATVASATGDSASERESAAPAAAPTAEAPPPSVVTRPEPQALPSPAIRAPLPDLYPFGTMRGGGFGDRDRDRDRGGFGARGGGGLPPKKFGNPGERLRKKKWDLSELPKFEKNFYVEHPEVARLTPYEVDELRRKKEITVRGGDVCPKPVFAFHHANFPQYVMDVLMDQHFTEPTPIQCQGFPLALSGRDMVGIAQTGSGKTLAYLLPAIVHINHQPYLERGDGPICLVLAPTRELAQQVQQVADDYGKCSRLKSTCIYGGAPKGPQIRDLERGVEICIATPGRLIDFLESGKTNLRRCTYLVLDEADRMLDMGFEPQIRKIVDQIRPDRQTLMWSATWPKEVRQLAEDFLRDYTQINVGNLELSANHNILQIVDVCMESEKDHKLIQLMEEIMAEKENKTIIFVETKRRCDDLTRRMRRDGWPAMCIHGDKSQPERDWVLNEFRSGKAPILIATDVASRGLDVEDVKFVINYDYPNSSEDYVHRIGRTARSTNKGTAYTFFTPGNLKQARELIKVLEEANQAINPKLMQLVDHRGGGGGGGGRSRYRTTSSANNPNLMYQDECDRRLRGVKDGGRRDSASYRDRSETDRAGYANGSGYGSPNSAFGAQAGQYTYGQGTYGAAAYGTSSYTAQEYGAGTYGASSTTSTGRSSQSSSQQFSGIGRSGQQPQPLMSQQFAQPPGATNMIGYMGQTAYQYPPPPPPPPPSRK

SEQ ID NO: 4082 - protein, 731 aa, Homo sapiens
LPTGFVAPILCVLLPSPTREAATVASATGDSASERESAAPAAAPTAEAPPPSVVTRPEPQALPSPAIRAPLPDLYPFGTMRGGGFGDRDRDRDRGGFGARGGGGLPPKKFGNPGERLRKKKWDLSELPKFEKNFYVEHPEVARLTPYEVDELRRKKEITVRGGDVCPKPVFAFHHANFPQYVMDVLMDQHFTEPTPIQCQGFPLALSGRDMVGIAQTGSGKTLAYLLPAIVHINHQPYLERGDGPICLVLAPTRELAQQVQQVADDYGKCSRLKSTCIYGGAPKGPQIRDLERGVEICIATPGRLIDFLESGKTNLRRCTYLVLDEADRMLDMGFEPQIRKIVDQIRPDRQTLMWSATWPKEVRQLAEDFLRDYTQINVGNLELSANHNILQIVDVCMESEKDHKLIQLMEEIMAEKENKTIIFVETKRRCDDLTRRMRRDGWPAMCIHGDKSQPERDWVLNEFRSGKAPILIATDVASRGLDVEDVKFVINYDYPNSSEDYVHRIGRTARSTNKGTAYTFFTPGNLKQARELIKVLEEANQAINPKLMQLVDHRGGGGGGGKGGRSRYRTTSSANNPNLMYQDECDRRLRGVKDGGRRDSASYRDRSETDRAGYANGSGYGSPNSAFGAQAGQYTYGQGTYGAAAYGTSSYTAQEYGAGTYGASSTTSTGRSSQSSSQQFSGIGRSGQQPQPLMSQQFAQPPGATNMIGYMGQTAYQYPPPPPPPPPSRK

SEQ ID NO: 4083 - protein, 729 aa, Homo sapiens; identical to SEQ ID NO: 4081

SEQ ID NO: 4084 - protein, 731 aa, Homo sapiens; identical to SEQ ID NO: 4082

SEQ ID NO: 4085 - protein, 56 aa, Homo sapiens
  SITE 1: note = misc_feature - Xaa can be any naturally occurring amino acid
XWPAMCIHGDKSQPERDWVLNEFRSGKAPILIATDVASRGLGSPALGNQMGLQRSI

SEQ ID NO: 4086 - protein, 138 aa, Homo sapiens
MAAAFEASGALAAVATAMPAEHVAVQVPAPEPTPGPVRILRTAQDLSSPRTRTGDVLLAEPADFESLLLSRPVLEGLRAAGFERPSPVQLKAIPLGRCGLDLIVQAKSGTGKTCVFSTIALDSLVLENLSTQAELSNS

SEQ ID NO: 4087 - protein, 824 aa, Homo sapiens
MAAAFEASGALAAVATAMPAEHVAVQVPAPEPTPGPVRILRTAQDLSSPRTRTGDVLLAEPADFESLLLSRPVLEGLRAAGFERPSPVQLKAIPLGRCGLDLIVQAKSGTGKTCVFSTIALDSLVLENLSTQILILAPTREIAVQIHSVITAIGIKMEGLECHVFIGGTPLSQDKTRLKKCHIAVGSPGRIKQLIELDYLNPGSIRLFILDEADKLLEEGSFQEQINWIYSSLPASKQMLAVSATYPEFLANALTKYMRDPTFVRLNSSDPSLIGLKQYYKVVNSYPLAHKVFEEKTQHLQELFSRIPFNQALVFSNLHSRAQHLADILSSKGFPAECISGNMNQNQRLDAMAKLKHFHCRVLISTDLTSRGIDAEKVNLVVNLDVPLDWETYMHRIGRAGRFGTLGLTVTYCCRGEEENMMMRIAQKCNINLLPLPDPIPSGLMEECVDWDVEVKAAVHTYGIASVPNQPLKKQIQKIERTLQIQKAHGDHMASSRNNSVSGLSVKSKNNTKQKLPVKSHSECGIIEKATSPKELGCDRQSEEQMKNSVQTPVENSTNSQHQVKEALPVSLPQIPCLSSFKIHQPYTLTFAELVEDYEHYIKEGLEKPVEIIRHYTGPGDQTVNPQNGFVRNKVIEQRVPVLASSSQSGDSESDSDSYSSRTSSQSKGNKSYLEGSSDNQLKDSESTPVDDRISLEQPPNGSDTPNPEKYQESPGIQMKTRLKEGASQRAKQSRRNLPRRSSFRLQTEAQEDDWYDCHREIRLSFSDTYQDYEEYWRAYYRAWQEYYAAASHSYYWNAQRHPSWMAAYHMNTIYLQEMMHSNQ

SEQ ID NO: 4088 - protein, 432 aa, Homo sapiens [sequence omitted]

SEQ ID NO: 4089 - protein, 191 aa, Homo sapiens
ASVRSGASDAGGEMREGFGRGPQRETPSPPPREFSNLSQPRKNLWGIKSTAVRNIDGSINNINEDDEEDVVDLAANSLLNKLIHQSLVESSHRVEVLQKDPSSPLYSVKTFEELRLKEELLKGIYAMGFNRPSKIQEMALPMMLAHPPQNLIAQSQSGTGKTAAFVLAMLSRVNALELFPQCLCLAPTYEL

SEQ ID NO: 4090 - protein, 468 aa, Homo sapiens
IAAMASLLWGGDAGAAESERLNSHFSNLSQPRKNLWGIKSTAVRNIDGSINNINEDDEEDVVDLAANSLLNKLIHQSLVESSHRVEVLQKDPSSPLYSVKTFEELRLKEELLKGIYAMGFNRPSKIQEMALPMMLAHPPQNLIAQSQSGTGKTAAFVLAMLSRVNALELFPQCLCLAPTYELALQTGRVVEQMGKFCVDVQVMYAIRGNRIPRGTDITKQIIIGTPGTVLDWCFKLKLIDLTKIRVFVLDEADVMIDTQGFSDHSIRIQRALPSECQMLLFSATFEDSVWHFAERIIPDPNVIKLRKEELTLNNIRQYYVLCEHRKDKYQALCNIYGSITIGQAIIFCQTRRNAKWLTVEMIQDGHQVSLLSGELTVEQRASIIQRFRDGKEKVLITTNVCARGIDVKQVTIVVNFDLPVKQGEEPDYETYLHRIGRTGRFGKKGLAFNMIEVDELPSLMKIQDHFSK

SEQ ID NO: 4091 - protein, 483 aa, Homo sapiens
MASLLWGGDAGAAESERLNSHFSNLSQPRKNLWGIKSTAVRNIDGSINNINEDDEEDVVDLAANSLLNKLIHQSLVESSHRVEVLQKDPSSPLYSVKTFEELRLKEELLKGIYAMGFNRPSKIQEMALPMMLAHPPQNLIAQSQSGTGKTAAFVLAMLSRVNALELFPQCLCLAPTYELALQTGRVVEQMGKFCVDVQVMYAIRGNRIPRGTDITKQIIIGTPGTVLDWCFKLKLIDLTKIRVFVLDEADVMIDTQGFSDHSIRIQRALPSECQMLLFSATFEDSVWHFAERIIPDPNVIKLRKEELTLNNIRQYYVLCEHRKDKYQALCNIYGSITIGQAIIFCQTRRNAKWLTVEMIQDGHQVSLLSGELTVEQRASIIQRFRDGKEKVLITTNVCARGIDVKQVTIVVNFDLPVKQGEEPDYETYLHRIGRTGRFGKKGLAFNMIEVDELPSLMKIQDHFNSSIKQLNAEDMDEIEKIDY

SEQ ID NO: 4092 - protein, 369 aa, Homo sapiens
MGFNRPSKIQEMALPMMLAHPPQNLIAQSQSGTGKTAAFVLAMLSRVNALELFPQCLCLAPTYELALQTGRVVEQMGKFCVDVQVMYAIRGNRIPRGTDITKQIIIGTPGTVLDWCFKLKLIDLTKIRVFVLDEADVMIDTQGFSDHSIRIQRALPSECQMLLFSATFEDSVWHFAERIIPDPNVIKLRKEELTLNNIRQYYVLCEHRKDKYQALCNIYGSITIGQAIIFCQTRRNAKWLTVEMIQDGHQVSLLSGELTVEQRASIIQRFRDGKEKVLITTNVCARGIDVKQVTIVVNFDLPVKQGEEPDYETYLHRIGRTGRFGKKGLAFNMIEVDELPSLMKIQDHFNSSIKQLNAEDMDEIEKIDY

SEQ ID NO: 4093 - protein, 197 aa, Homo sapiens
MGFNRPSKIQEMALPMMLAHPPQNLIAQSQSGTGKTAAFVLAMLSRVNALELFPQCLCLAPTYELALQTGRVVEQMGKFCVDVQVMYAIRGNRIPRGTDITKQIIIGTPGTVLDWCFKLKLIDLTKIRVFVLDEADVMIDTQGFSDHSIRIQRIIWLLVAKETTDNFQLPSLTLELYRDIMETPHSFLLLSQGTWRI

SEQ ID NO: 4094 - protein, 67 aa, Homo sapiens
  SITE 1: note = misc_feature - Xaa can be any naturally occurring amino acid
XGIDVKQVTIVVNFDLPVKQGEEPDYETYLHRIGRTGRFGKKGLAFNMIEVDELPSLMKIQDHFRKS

SEQ ID NO: 4095 - protein, 407 aa, Homo sapiens
  SITE 1: note = misc_feature - Xaa can be any naturally occurring amino acid
XLVDLAANSLLNKLIHQSLVESSHRVEVLQKDPSSPLYSVKTFEELRLKEELLKGIYAMGFNRPSKIQEMALPMMLAHPPQNLIAQSQSGTGKTAAFVLAMLSRVNALELFPQCLCLAPTYELALQTGRVVEQMGKFCVDVQVMYAIRGNRNWCFKLKLIDLTKIRVFVLDEADVMIDTQGFSDHSIRIQRALPSECQMLLFSATFEDSVWHFAERIIPDPNVIKLRKEELTLNNIRQYYVLCEHRKDKYQALCNIYGSITIGQAIIFCQTRRNAKWLTVEMIQDGHQVSLLSGELTVEQRASIIQRFRDGKEKVLITTNVCARGIDVKQVTIVVNFDLPVKQGEEPDYETYLHRIGRTGRFGKKGLAFNMIEVDELPSLMKIQDHFNSSIKQLNAEDMDEIEKIDY

SEQ ID NO: 4096 - protein, 540 aa, Homo sapiens
MALTRPVRLFSLVTRLLLAPRRGLTVRSPDEPLPVVRIPVALQRQLEQRQSRRRNLPRPVLVRPGPLLVSARRPELNQPARLTLGRWERAPLASQGWKSRRARRDHFSIERAQQEAPAVRKLSSKGSFADLGLEPRVLHALQEAAPEVVQPTTVQSSTIPSLLRGRHVVCAAETGSGKTLSYLLPLLQRLLGQPSLDSLPIPAPRGLVLVPSRELAQQVRAVAQPLGRSLGLLVRDLEGGHGMRRIRLQLSRQPSADVLVATPGALWKALKSRLISLEQLSFLVLDEADTLLDESFLELVDYILEKSHIAEGPADLEDPFNPKAQLVLVGATFPEGVGQLLNKVASPDAVTTITSSKLHCIMPHVKQTFLRLKGADKVAELVHILKHRDRAERTGPSGTVLVFCNSSSTVNWLGYILDDHKIQHLRLQGQMPALMRVGIFQSFQKSSRDILLCTDIASRGLDSTGVELVVNYDFPPTLQDYIHRAGRVGRVGSEVPGTVISFVTHPWDVSLVQKIELAARRRRSLPGLASSVKEPLPQAT

SEQ ID NO: 4097 - protein, 565 aa, Homo sapiens
MEDSDSAAKQLGLAEAAAVAAAAAVAAAAAAAAGGEAEEPVLSRDEDSEEDADSEAERETPRVTAVAVMAAEPGHMDMGAEALPGPDEAAAAAAFAEVTTVTVANVGAAADNVFTTSVANAASISGHVLSGRTALQIGDSLNTEKATLIVVHTDGSIVETTGLKGPAAPLTPGPQSPPTPLAPGQEKGGTKYNWDPSVYDSELPVRCRNISGTLYKNRLGSGGRGRCIKQGENWYSPTEFEAMAGRASSKDWKRSIRYAGRPLQCLIQDGILNPHAASCTCAACCDDMTLSGPVRLFVPYKRRKKENELPTTPVKKDSPKNITLLPATAATTFTVTPSGQITTSGALTFDRASTVEATAVISESPAQGDVFAGATVQEASVQPPCRASHPEPHYPGYQDSCQIAPFPEAALPTSHPKIVLTSLPALAVPPPTPTKAAPPALVNGLELSEPRSWLYLEEMVNSLLNTAQQLKTLFEQAKHASTYREAATNQAKIHADAERKEQSCVNCGREAMSECTGCHKVNYCSTFCQRKDWKDHQHICGQSAAVTVQADEVHVAESVMEKVTV

SEQ ID NO: 4098 - protein, 349 aa, Homo sapiens
  SITE 1: note = misc_feature - Xaa can be any naturally occurring amino acid
XLYKNRLGSGGRGRCIKQGENWYSPTEFEAMAGRASSKDWKRSIRYAGRPLQCLIQDGILNPHAASCTCAACCDDMTLSGPVRLFVPYKRRKKENELPTTPVKKDSPKNITLLPATAATTFTVTPSGQITTSGALTFDRASTVEATAVISESPAQGDVFAGATVQEASVQPPCRASHPEPHYPGYQDSCQIAPFPEAALPTSHPKIVLTSLPALAVPPPTPTKAAPPALVNGLELSEPRSWLYLEEMVNSLLNTAQQLKTLFEQAKHASTYREAATNQAKIHADAERKEQSCVNCGREAMSECTGCHKVNYCSTFCQRKRWSLTMLTSLVSISWLRAILPCQPPKVLGL

SEQ ID NO: 4099 - protein, 86 aa, Homo sapiens
  SITE 1: note = misc_feature - Xaa can be any naturally occurring amino acid
XPVLSRDEDSEEDADSEAERETPRVTAVAVMAAEPGHMDMGAEALPGPDEAAAAAAFAGKCARRPLASSGSRAPTPRACPAQLSQR

SEQ ID NO: 4100 - protein, 136 aa, Homo sapiens
MAILSLRAPGPWQAMQAHLNPFNKQSGPRQHEQGPGEEVPDVTPEEALPELPPGEPEFRCPERVMDLGLSEDHFSRPVGLFLASDVQQLRQAIEECKQVILELPEQSEKQKDAVVRLIHLRLKLQELKDPNEDEPN

SEQ ID NO: 4101 - protein, 512 aa, Homo sapiens
MAILSLRAPGPWQAMQVWADRTLLTPHTGVTSQVLGVAAAVMTPLPGGHAAGRTREARWDAMEYDEKLARFRQAHLNPFNKQSGPRQHEQGPGEEVPDVTPEEALPELPPGEPEFRCPERVMDLGLSEDHFSRPVGLFLASDVQQLRQAIEECKQVILELPEQSEKQKDAVVRLIHLRLKLQELKDPNEDEPNIRVLLEHRFYKEKSKSVKQTCDKCNTIIWGLIQTWYTCTGCYYRCHSKCLNLISKPCVSSKVSHQAEYELNICPETGLDSQDYRCAECRAPISLRGVPSEARQCDYTGQYYCSHCHWNDLAVIPARVVHNWDFEPRKVSRCSMRYLALMVSRPVLRLREINPLLFSYVEELVEIRKLRQDILLMKPYFITCREAMEARLLLQLQDRQHFVENDEMYSVQDLLDVHAGRLGCSLTEIHTLFAKHIKLDCERCQAKGFVCELCREGDVLFPFDSHTSVCADCSAVFHRDCYYDNSTTCPKCARLSLRKQSLFQEPGPDVEA

SEQ ID NO: 4102 - protein, 125 aa, Homo sapiens
MDLGLSEDHFSRPVGLFLASDVQQLRQAIEECKQVILELPEQSEKQKDAVVRLIHLRLKLQELKDPNEDEPNIRVLLEHRFYKEKSKSVKQTCDKCNTIIWGLIQTWYTCTGCYYRCHSKCLNLI

SEQ ID NO: 4103 - protein, 391 aa, Homo sapiens
MDLGLSEDHFSRPVGLFLASDVQQLRQAIEECKQVILELPEQSEKQKDAVVRLIHLRLKLQELKDPNEDEPNIRVLLEHRFYKEKSKSVKQTCDKCNTIIWGLIQTWYTCTGCYYRCHSKCLNLISKPCVSSKVSHQAEYELNICPETGLDSQDYRCAECRAPISLRGVPSEARQCDYTGQYYCSHCHWNDLAVIPARVVHNWDFEPRKVSRCSMRYLALMVSRPVLRLREINPLLFSYVEELVEIRKLRQDILLMKPYFITCREAMEARLLLQLQDRQHFVENDEMYSVQDLLDVHAGRLGCSLTEIHTLFAKHIKLDCERCQAKGFVCELCREGDVLFPFDSHTSVCADCSAVFHRDCYYDNSTTCPKCARLSLRKQSLFQEPGPDVEA

SEQ ID NO: 4104 - protein, 66 aa, Homo sapiens
MEYDEKLARFRQAHLNPFNKQSGPRQHEQGPGEEVPDVTPEEALPELPPGEPEFRCPERVMDLGLS

SEQ ID NO: 4105 - protein, 107 aa, Homo sapiens
MEYDEKLARFRQAHLNPFNKQSGPRQHEQGPGEEVPDVTPEEALPELPPGEPEFRCPERVMDLGLSEDHFSRPVDGPLTAPAPNLGRVCSWPLTSSSCGRRSRSASR

SEQ ID NO: 4106 - protein, 106 aa, Homo sapiens
MEYDEKLARFRQAHLNPFNKQSGPRQHEQGPGEEVPDVTPEEALPELPPGEPEFRCPERVMDLGLSEDHFSRPVGLFLASDVQQLRQAIEECKQVILELPEQSEKQ

SEQ ID NO: 4107 - protein, 134 aa, Homo sapiens
MEYDEKLARFRQAHLNPFNKQSGPRQHEQGPGEEVPDVTPEEALPELPPGEPEFRCPERVMDLGLSEDHFSRPVGLFLASDVQQLRQAIEECKQVILELPEQSEKQKDAVVRLIHLRLKLQELKDPNEDEPNIR

SEQ ID NO: 4108 - protein, 150 aa, Homo sapiens
MEYDEKLARFRQAHLNPFNKQSGPRQHEQGPGEEVPDVTPEEALPELPPGEPEFRCPERVMDLGLSEDHFSRPVGLFLASDVQQLRQAIEECKQVILELPEQSEKQKDAVVRLIHLRLKLQELKDPNEDEPNIRVLLEHRFYKEKSKSVK

SEQ ID NO: 4109 - protein, 451 aa, Homo sapiens
MEYDEKLARFRQAHLNPFNKQSGPRQHEQGPGEEVPDVTPEEALPELPPGEPEFRCPERVMDLGLSEDHFSRPVGLFLASDVQQLRQAIEECKQVILELPEQSEKQKDAVVRLIHLRLKLQELKDPNEDEPNIRVLLEHRFYKEKSKSVKQTCDKCNTIIWGLIQTWYTCTGCYYRCHSKCLNLISKPCVSSKVSHQAEYELNICPETGLDSQDYRCAECRAPISLRGVPSEARQCDYTGQYYCSHCHWNDLAVIPARVVHNWDFEPRKVSRCSMRYLALMVSRPVLRLREINPLLFSYVEELVEIRKLRQDILLMKPYFITCREAMEARLLLQLQDRQHFVENDEMYSVQDLLDVHAGRLGCSLTEIHTLFAKHIKLDCERCQAKGFVCELCREGDVLFPFDSHTSVCADCSAVFHRDCYYDNSTTCPKCARLSLRKQSLFQEPGPDVEA

SEQ ID NO: 4110 - protein, 451 aa, Homo sapiens; identical to SEQ ID NO: 4109

SEQ ID NO: 4111 - protein, 434 aa, Homo sapiens
MEYDEKLARFRQAHLNPFNKQSGPRQHEQGPGEEVPDVTPEEALPELPPGEPEFRCPERVMDLGLSEDHFSRPVGLFLASDVQQLRQAIEECKQVILELPEQSEKQKDAVVRLIHLRLKLQELKDPNEDEPNIRVLLEHRFYKEKSKSVKQTCDKCNTIIWGLIQTWYTCTGCYYRCHSKCLNLISKPCVSSKVSHQAEYELNICPETGLDSQDYRCAECRAPISLRGVPSEARQCDYTGQYYCSHCHWNDLAVIPARVVHNWDFEPRKVSRCSMRYLALMVSRPVLRLREINPLLFSYVEELVEIRKLRQDILLMKPYFITCREAMEARLLLQDLLDVHAGRLGCSLTEIHTLFAKHIKLDCERCQAKGFVCELCREGDVLFPFDSHTSVCADCSAVFHRDCYYDNSTTCPKCARLSLRKQSLFQEPGPDVEA

SEQ ID NO: 4112 - protein, 451 aa, Homo sapiens; identical to SEQ ID NO: 4109

SEQ ID NO: 4113 - protein, 197 aa, Homo sapiens
MEYDEKLARFRQAHLNPFNKQSGPRQHEQGPGEEVPDVTPEEALPELPPGEPEFRCPERVMDLGLSEDHFSRPVGLFLASDVQQLRQAIEECKQVILELPEQSEKQKDAVVRLIHLRLKLQELKDPNEDEPNIRVLLEHRFYKEKSKSVKQTCDKCNTIIWGLIQTWYTCTGGPRPRRGVRNERDQSSCLRWAHIQM

SEQ ID NO: 4114 - protein, 197 aa, Homo sapiens; identical to SEQ ID NO: 4113

SEQ ID NO: 4115 - protein, 176 aa, Homo sapiens
MEYDEKLARFRQAHLNPFNKQSGPRQHEQGPGEEVPDVTPEEALPELPPGEPEFRCPERVMDLGLSEDHFSRPVGLFLASDVQQLRQAIEECKQVILELPEQSEKQKDAVVRLIHLRLKLQELKRCQAKGFVCELCREGDVLFPFDSHTSVCADCSAVFHRDCYYDNSTTCPKCAR

SEQ ID NO: 4116 - protein, 441 aa, Homo sapiens
MEYDEKLARFRQAHLNPFNKQSGPRQHEQGPGEEVPDVTPEEALPELPPGEPEFRCPERVMDLGLSEDHFSRPVLRQAIEECKQVILELPEQSEKQKDAVVRLIHLRLKLQELKDPNEDEPNIRVLLEHRFYKEKSKSVKQTCDKCNTIIWGLIQTWYTCTGCYYRCHSKCLNLISKPCVSSKVSHQAEYELNICPETGLDSQDYRCAECRAPISLRGVPSEARQCDYTGQYYCSHCHWNDLAVIPARVVHNWDFEPRKVSRCSMRYLALMVSRPVLRLREINPLLFSYVEELVEIRKLRQDILLMKPYFITCREAMEARLLLQLQDRQHFVENDEMYSVQDLLDVHAGRLGCSLTEIHTLFAKHIKLDCERCQAKGFVCELCREGDVLFPFDSHTSVCADCSAVFHRDCYYDNSTTCPKCARLSLRKQSLFQEPGPDVEA

SEQ ID NO: 4117 - protein, 127 aa, Homo sapiens
MEYDEKLARFRQAHLNPFNKQSGPRQHEQGPGEEVPDVTPEEALPELPPGEPEFRCPERVMDLGLSEDHFSRPVQLRQAIEECKQVILELPEQSEKQKDAVVRLIHLRLKLQELKDPNEDEPNIRVL

SEQ ID NO: 4118 - protein, 177 aa, Homo sapiens
MRGGGQAHLNPFNKQSGPRQHEQGPGEEVPDVTPEEALPELPPGEPEFRCPERVMDLGLSEDHFSRPVGLFLASDVQQLRQAIEECKQVILELPEQSEKQKDAVVRLIHLRLKLQELKDPNEDEPNIRVLLEHRFYKEKSKSVKQTCDKCNTIIWGLIQTWYTCTGCYYRCHSKCLN

SEQ ID NO: 4119 - protein, 186 aa, Homo sapiens
MRGGGQVLGVAAAVMTPLPGGHAAGRTREARWDAMEYDEKLARFRQAHLNPFNKQSGPRQHEQGPGEEVPDVTPEEALPELPPGEPEFRCPERVMDLGLSEDHFSRPVGLFLASDVQQLRQAIEECKQVILELPEQSEKQKDAVVRLIHLRLKLQELKDPNEDEPNIRVLLEHRFYKEKSKSVKQT

SEQ ID NO: 4120 - protein, 94 aa, Homo sapiens
MRTLAILAAILLVALQAQAEPLQARADEVAAAPEQIAADIPEVVVSLAWDESLAPKHPGSRKNMACYCRIPACIAGERRYGTCIYQGRLWAFCC

SEQ ID NO: 4121 - protein, 94 aa, Homo sapiens; identical to SEQ ID NO: 4120

SEQ ID NO: 4122 - protein, 94 aa, Homo sapiens; identical to SEQ ID NO: 4120

SEQ ID NO: 4123 - protein, 94 aa, Homo sapiens
MRTLAILAAILLVALQAQAEPLQARADEVAAAPEQIAADIPEVVVSLAWDESLAPKHPGSRKNMDCYCRIPACIAGERRYGTCIYQGRLWAFCC

SEQ ID NO: 4124 - protein, 97 aa, Homo sapiens
MRIIALLAAILLVALQVRAGPLQARGDEAPGQEQRGPEDQDISISFAWDKSSALQVSGSTRGMVCSCRLVFCRRTELRVGNCLIGGVSFTYCCTRVD

SEQ ID NO: 4125 - protein, 94 aa, Homo sapiens
MRTIAILAAILLVALQAQAESLQERADEATTQKQSGEDNQDLAISFAGNGLSALRTSGSQARATCYCRTGRCATRESLSGVCEISGRLYRLCCR

SEQ ID NO: 4126 - protein, 100 aa, Homo sapiens
MRTLTILTAVLLVALQAKAEPLQAEDDPLQAKAYEADAQEQRGANDQDFAVSFAEDASSSLRALGSTRAFTCHCRRSCYSTEYSYGTCTVMGINHRFCCL

SEQ ID NO: 4127 - protein, 68 aa, Homo sapiens
MRTSYLLLFTLCLLLSEMASGGNFLTGLGHRSDHYNCVSSGGQCLYSACPIFTKIQGTCYRGKAKCCK

SEQ ID NO: 4128 - protein, 67 aa, Homo sapiens
MRIHYLLFALLFLFLVPVPGHGGIINTLQKYYCRVRGGRCAVLSCLPKEEQIGKCSTRGRKCCRRKK

SEQ ID NO: 4129 - protein, 67 aa, Homo sapiens; identical to SEQ ID NO: 4128

SEQ ID NO: 4130 - protein, 72 aa, Homo sapiens
MQRLVLLLAISLLLYQDLPVRSEFELDRICGYGTARCRKKCRSQEYRIGRCPNTYACCLRKWDESLLNRTKP

SEQ ID NO: 4131 - protein, 72 aa, Homo sapiens; identical to SEQ ID NO: 4130

SEQ ID NO: 4132 - protein, 78 aa, Homo sapiens
MALIRKTFYFLFAMFFILVQLPSGCQAGLDFSQPFPSGEFAVCESCKLGRGKCRKECLENEKPDGNCRLNFLCCRQRI

SEQ ID NO: 4133 - protein, 78 aa, Homo sapiens; identical to SEQ ID NO: 4132

SEQ ID NO: 4134 - protein, 65 aa, Homo sapiens
MRTFLFLFAVLFFLTPAKNAFFDEKCNKLKGTCKNNCGKNEELIALCQKSLKCCRTIQPCGSIID

SEQ ID NO: 4135 - protein, 65 aa, Homo sapiens; identical to SEQ ID NO: 4134

SEQ ID NO: 4136 - protein, 70 aa, Homo sapiens
MPGAMKIFVFILAALILLAQIFQARTAIHRALISKRMEGHCEAECLTFEVKIGGCRAELAPFCCKNRKKH

SEQ ID NO: 4137 - protein, 70 aa, Homo sapiens; identical to SEQ ID NO: 4136

SEQ ID NO: 4138 - protein, 73 aa, Homo sapiens
MRIAVLLFAIFFFMSQVLPARGKFKEICERPNGSCRDFCLETEIHVGRCLNSQPCCLPLGHQPRIESTTPKKD

SEQ ID NO: 4139 - protein, 67 aa, Homo sapiens
MKIQLFFFILHFWVTILPAKKKYPEYGSLDLRRECRIGNGQCKNQCHENEIRIAYCIRPGTHCCLQQ

SEQ ID NO: 4140 - protein, 62 aa, Homo sapiens
MKIQLFFFILHFWVTILPARSNFEPKYRFERCEKVRGICKTFCDDVEYDYGYCIKWRSQCCV

SEQ ID NO: 4141 - protein, 82 aa, Homo sapiens
MKILCIFLTFVFTVSCGPSVPQKKTREVAERKRECQLVRGACKPECNSWEYVYYYCNVNPCCAVWEYQKPIINKITSKLHQK

SEQ ID NO: 4142 - protein, 69 aa, Homo sapiens
MRIFYYLHFLCYVTFILPATCTLVNADRCTKRYGRCKRDCLESEKQIDICSLPRKICCTEKLYEEDDMF

SEQ ID NO: 4143 - protein, 88 aa, Homo sapiens
MLPDHFSPLSGDIKLSVLALVVLVVLAQTAPDGWIRRCYYGTGRCRKSCKEIERKKEKCGEKHICCVPKEKDKLSHIHDQKETSELYI

SEQ ID NO: 4144 - protein, 102 aa, Homo sapiens
MSVMKPCLMTIAILMILAQKTPGGLFRSHNGKSREPWNPCELYQGMCRNACREYEIQYLTCPNDQKCCLKLSVKITSSKNVKEDYDSNSNLSVTNSSSYSHI

SEQ ID NO: 4145 - protein, 123 aa, Homo sapiens
MKLLLLALPMLVLLPQVIPAYSGEKKCWNRSGHCRKQCKDGEAVKDTCKNLRACCIPSNEDHRRVPATSPTPLSDSTPGIIDDILTVRFTTDYFEVSSKKDMVEESEAGRGTETSLPNVHHSS

SEQ ID NO: 4146 - protein, 43 aa, Homo sapiens
MKLLYLFLAILLAIEEPVISALVRTVGCCLDTARQTPHPSMHG

SEQ ID NO: 4147 - protein, 84 aa, Homo sapiens
MKLLYLFLAILLAIEEPVISGKRHILRCMGNSGICRASCKKNEQPYLYCRNCQSCCLQSYMRISISGKEENTDWSYEKQWPRLP

SEQ ID NO: 4148 - protein, 88 aa, Homo sapiens
MKLLYLFLAILLAIEEPVISVECWMDGHCRLLCKDGEDSIIRCRNRKRCCVPSRYLTIQPVTIHGILGWTTPQMSTTAPKMKTNITNR

SEQ ID NO: 4149 - protein, 76 aa, Homo sapiens
MKLLLLLLTVTLLLAQVTPVMKCWGKSGRCRTTCKESEVYYILCKTEAKCCVDPKYVPVKPKLTDTNTSLESTSAV

SEQ ID NO: 4150 - protein, 67 aa, Homo sapiens
MKLLLLTLTVLLLLSQLTPGGTQRCWNLYGKCRYRCSKKERVYVYCINNKMCCVKPKYQPKERWWPF

SEQ ID NO: 4151 - protein, 71 aa, Homo sapiens
MTQLLLFLVALLVLGHVPSGRSEFKRCWKGQGACQTYCTRQETYMHLCPDASLCCLSYALKPPPVPKHEYE

SEQ ID NO: 4152 - protein, 156 aa, Homo sapiens
MNILMLTFIICGLLTRVTKGSFEPQKCWKNNVGHCRRRCLDTERYILLCRNKLSCCISIISHEYTRRPAFPVIHLEDITLDYSDVDSFTGSPVSMLNDLITFDTTKFGETMTPETNTPETTMPPSEATTPETTMPPSETATSETMPPPSQTALTHN

SEQ ID NO: 4153 - protein, 111 aa, Homo sapiens
MKSLLFTLAVFMLLAQLVSGNWYVKKCLNDVGICKKKCKPEEMHVKNGWAMCGKQRDCCVPADRRANYPVFCVQTKTTRISTVTATTATTTLMMTTASMSSMAPTPVSPTG

SEQ ID NO: 4154 - protein, 99 aa, Homo sapiens
MGLFMIIAILLFQKPTVTEQLKKCWNNYVQGHCRKICRVNEVPEALCENGRYCCLNIKELEACKKITKPPRPKPATLALTLQDYVTIIENFPSLKTQST

SEQ ID NO: 4155 - protein, 93 aa, Homo sapiens
MKLFLVLIILLFEVLTDGARLKKCFNKVTGYCRKKCKVGERYEIGCLSGKLCCANDEEEKKHVSFKKPHQHSGEKLSVLQDYIILPTITIFTV

SEQ ID NO: 4156 - protein, 183 aa, Homo sapiens
MKLLFPIFASLMLQYQVNTEFIGLRRCLMGLGRCRDHCNVDEKEIQKCKMKKCCVGPKVVKLIKNYLQYGTPNVLNEDVQEMLKPAKNSSAVIQRKHILSVLPQIKSTSFFANTNFVIIPNATPMNSATISTMTPGQITYTATSTKSNTKESRDSATASPPPAPPPPNILPTPSLELEEAEEQ

SEQ ID NO: 4157 - protein, 79 aa, Homo sapiens
MKLHSLISVLLLFVTLIPKGKTGVIPGQKQCIALKGVCRDKLCSTLDDTIGICNEGKKCCRRWWILEPYPTPVPKGKSP

SEQ ID NO: 4158 - protein, 79 aa, Homo sapiens; identical to SEQ ID NO: 4157

SEQ ID NO: 4159 - protein, 70 aa, Homo sapiens
MRVLFFVFGVLSLMFTVPPARSFISNDECPSEYYHCRLKCNADEHAIRYCADFSICCKLKIIEIDGQKKW

SEQ ID NO: 4160 - protein, 70 aa, Homo sapiens
MRVLFFVFGVLSLMSTVPPTRSFTSNDECPSEYYHCRLKCNADEHAIRYCADFSICCKLKIIQIDGQKKW

SEQ ID NO: 4161 - protein, 95 aa, Homo sapiens
MKFLLLVLAALGFLTQVIPASAGGSKCVSNTPGYCRTCCHWGETALFMCNASRKCCISYSFLPKPDLPQLIGNHWQSRRRNTQRKDKKQQTTVTS

SEQ ID NO: 4162 - protein, 61 aa, Homo sapiens
MKIHVFLFVLFFFLVPIATRVKCAVKDTYSCFIMRGKCRHECHDFEKPIGFCTKLNANCYM

SEQ ID NO: 4163 - protein, 66 aa, Homo sapiens
MKPLLVVFVFLFLWDPVLAGINSLSSEMHKKCYKNGICRLECYESEMLVAYCMFQLECCVKGNPAP

SEQ ID NO: 4164 - protein, 66 aa, Homo sapiens; identical to SEQ ID NO: 4163

SEQ ID NO: 4165 - protein, 77 aa, Homo sapiens
MATRSVLLALVVLNLLFYVPPGRSGPNVYIQKIFASCWRLQGTCRPKCLKNEQYRILCDTIHLCCVNPKYLPILTGK

SEQ ID NO: 4166 - protein, 78 aa, Homo sapiens
MNLCLSALLFFLVILLPSGKGMFGNDGVKVRTCTSQKAVCFFGCPPGYRWIAFCHNILSCCKNMTRFQPPQAKDPWVH

SEQ ID NO: 4167 - protein, 64 aa, Homo sapiens
MRVLYLLFSFLFIFLMPLPGVFGGIGDPVTCLKSGAICHPVFCPRRYKQIGTCGLPGTKCCKKP

SEQ ID NO: 4168 - protein, 64 aa, Homo sapiens; identical to SEQ ID NO: 4167

SEQ ID NO: 4169 - protein, 84 aa, Homo sapiens
MRSRLLLSVAHLPTIRETTEEMLLGGPGQEPPPSPSLDDYVRSISRLAQPTSVLDKATAQGQPRPPHRPAQACRKGRPAVSLRD

SEQ ID NO: 4170 - protein, 212 aa, Homo sapiens
MRSRLLLSVAHLPTIRETTEEMLLGGPGQEPPPSPSLDDYVRSISRLAQPTSVLDKATAQGQPRPPHRPAQACRKGRPAVSLRDITARFSGQQPTLPMADTVDPLDWLFGESQEKQPSQRDLPRRTGPSAGLWGPHRQMDSSKPMGAPRGRLCEARMPGHSLARPPQDGQQSSDLRSWTFGQSAQAMASRHRPRPSSVLRTLYSHLPVIHEL

SEQ ID NO: 4171 - protein, 326 aa, Homo sapiens
MSENDNVFCAQLQCFHFPTLRHHDLHSWHAESCYEKSSFLCKRSQTCVDIKDNVVDEGFYFTPKGDDPCLSCTCHGGEPEMCVAALCERPQGCQQYRKDPKECCKFMCLDPDGNSLFDSMASGMRLVVSCISSFLILSLLLFMVHRLRQRRRERIESLIGANLHHFNLGRRIPGFDYGPDGFGTGLTPLHLSDDGEGGTFHFHDPPPPYTAYKYPDIGQPDDPPPPYEASIHPDSVFYDPADDDAFEPVEVSLPAPGDGGSEGALLRRLEQPLPTAGASLADLEDSADSSSALLVPPDPAQSGSTPAAEALPGGGRHSRSSLNTVV

SEQ ID NO: 4172 - protein, 550 aa, Homo sapiens
MVPKADSGAFLLLFLLVLTVTEPLRPELRCNPGQFACRSGTIQCIPLPWQCDGWATCEDESDEANCPEVTGEVRPHHGKEAVDPRQGRARGGDPSHFHAVNVAQPVRFSSFLGKCPTGWHHYEGTASCYRVYLSGENYWDAAQTCQRLNGSLATFSTDQELRFVLAQEWDQPERSFGWKDQRKLWVGYQYVITGRNRSLEGRWEVAFKGSSEVFLPPDPIFASAMSENDNVFCAQLQCFHFPTLRHHDLHSWHAESCYEKSSFLCKRSQTCVDIKDNVVDEGFYFTPKGDDPCLSCTCHGGEPEMCVAALCERPQGCQQYRKDPKECCKFMCLDPDGNSLFDSMASGMRLVVSCISSFLILSLLLFMVHRLRQRRRERIESLIGANLHHFNLGRRIPGFDYGPDGFGTGLTPLHLSDDGEGGTFHFHDPPPPYTAYKYPDIGQPDDPPPPYEASIHPDSVFYDPADDDAFEPVEVSLPAPGDGGSEGALLRRLEQPLPTAGASLADLEDSADSSSALLVPPDPAQSGSTPAAEALPGGGRHSRSSLNTVV

SEQ ID NO: 4173 - protein, 550 aa, Homo sapiens [sequence omitted]

SEQ ID NO: 4174 - protein, 509 aa, Homo sapiens
MVPKADSGAFLLLFLLVLTVTEPLRPEVTGEVRPHHGKEAVDPRQGRARGGDPSHFHAVNVAQPVRFSSFLGKCPTGWHHYEGTASCYRVYLSGENYWDAAQTCQRLNGSLATFSTDQELRFVLAQEWDQPERSFGWKDQRKLWVGYQYVITGRNRSLEGRWEVAFKGSSEVFLPPDPIFASAMSENDNVFCAQLQCFHFPTLRHHDLHSWHAESCYEKSSFLCKRSQTCVDIKDNVVDEGFYFTPKGDDPCLSCTCHGGEPEMCVAALCERPQGCQQYRKDPKECCKFMCLDPDGNSLFDSMASGMRLVVSCISSFLILSLLLFMVHRLRQRRRERIESLIGANLHHFNLGRRIPGFDYGPDGFGTGLTPLHLSDDGEGGTFHFHDPPPPYTAYKYPDIGQPDDPPPPYEASIHPDSVFYDPADDDAFEPVEVSLPAPGDGGSEGALLRRLEQPLPTAGASLADLEDSADSSSALLVPPDPAQSGSTPAAEALPGGGRHSRSSLNTVV

SEQ ID NO: 4175 - protein, 396 aa, Homo sapiens
MALLTNLLPLCCLALLALPAQSCGPGRGPVGRRRYARKQLVPLLYKQFVPGVPERTLGASGPAEGRVARGSERFRDLVPNYNPDIIFKDEENSGADRLMTERCKERVNALAIAVMNMWPGVRLRVTEGWDEDGHHAQDSLHYEGRALDITTSDRDRNKYGLLARLAVEAGFDWVYYESRNHVHVSVKADNSLAVRAGGCFPGNATVRLWSGERKGLRELHRGDWVLAADASGRVVPTPVLLFLDRDLQRRASFVAVETEWPPRKLLLTPWHLVFAARGPAPAPGDFAPVFARRLRAGDSVLAPGGDALRPARVARVAREEAVGVFAPLTAHGTLLVNDVLASCYAVLESHQWAHRAFAPLRLLHALGALLPGGAVQPTGMHWYSRLLYRLAEELLG

SEQ ID NO: 4176 - protein, 155 aa, Homo sapiens
MHKAGLLGLCARAWNSVRMASSGMTRRDPLANKVALVTASTDGIGFAIARRLAQDGAHVVVSSRKQQNVDQAVATLQGEGLSVTGTVCHVGKAEDRERLVATAVKLHGGIDILVSNAAVNPFFGSIMDVTEEVWDKLWMDKEKEESMKETLRIRR

SEQ ID NO: 4177 - protein, 192 aa, Homo sapiens
MHKAGLLGLCARAWNSVRMASSGMTRRDPLANKVALVTASTDGIGFAIARRLAQDGAHVVVSSRKQQNVDQAVATLQGEGLSVTGTVCHVGKAEDRERLVATAVKLHGGIDILVSNAAVNPFFGSIMDVTEEVWDKLWMDKEKEESMKETLRIRRLGEPEDCAGIVSFLCSEDASYITGETVVVGGGTPSRL

SEQ ID NO: 4178 - protein, 188 aa, Homo sapiens
MHKAGLLGLCARAWNSVRMASSGMTRRDPLANKVALVTASTDGIGFAIARRLAQDGAHVVVSSRKQQNVDQAVATLQGEGLSVTGTVCHVGKAEDRERLVATAVKLHGGIDILVSNAAVNPFFGSIMDVTEEVWDKRRLSGDRVFHSSLQSISSLDGQGKRGKHERNPADKKVRRARGLCWHRVFPVL

SEQ ID NO: 4179 - protein, 278 aa, Homo sapiens
MHKAGLLGLCARAWNSVRMASSGMTRRDPLANKVALVTASTDGIGFAIARRLAQDGAHVVVSSRKQQNVDQAVATLQGEGLSVTGTVCHVGKAEDRERLVATAVKLHGGIDILVSNAAVNPFFGSIMDVTEEVWDKTLDINVKAPALMTKAVVPEMEKRGGGSVVIVSSIAAFSPSPGFSPYNVSKTALLGLTKTLAIELAPRNIRVNCLAPGLIKTSFSRMLWMDKEKEESMKETLRIRRLGEPEDCAGIVSFLCSEDASYITGETVVVGGGTPSRL

SEQ ID NO: 4180 - protein, 158 aa, Homo sapiens
MHKAGLLGLCARAWNSVRMASSGMTRRDPLANKVALVTASTDGIGFAIARRLAQDGAHVVVSSRKQQNVDQAVATLQGEGLSVTGTVCHVGKAEDRERLVATLWMDKEKEESMKETLRIRRLGEPEDCAGIVSFLCSEDASYITGETVVVGGGTPSRL

SEQ ID NO: 4181 - protein, 244 aa, Homo sapiens
MHKAGLLGLCARAWNSVRMASSGMTRRDPLANKVALVTASTDGIGFAIARRLAQDGAHVVVSSRKQQNVDQAVATLQGEGLSVTGTVCHVGKAEDRERLVATTLDINVKAPALMTKAVVPEMEKRGGGSVVIVSSIAAFSPSPGFSPYNVSKTALLGLTKTLAIELAPRNIRVNCLAPGLIKTSFSRMLWMDKEKEESMKETLRIRRLGEPEDCAGIVSFLCSEDASYITGETVVVGGGTPSRL

SEQ ID NO: 4182 - protein, 199 aa, Homo sapiens
MHKAGLLGLCARAWNSVRMASSGMTRRDPLANKVALVTASTDGIGFAIARRLAQDGAHVVVSSRKQQNVDQAVATLQGEGLSVTGTVCHVGKAEDRERLVATTLDINVKAPALMTKAVVPEMEKRGGGSVVIVSSIAAFSPSPLWMDKEKEESMKETLRIRRLGEPEDCAGIVSFLCSEDASYITGETVVVGGGTPSRL

SEQ ID NO: 4183 - protein, 61 aa, Homo sapiens
RNIRVNCLAPGLIKTSFSRMLWMDKEKEESMKETLRIRRPRIHKHYHYSDLSKKSASLSKG

SEQ ID NO: 4184 - protein, 90 aa, Homo sapiens
MAVKLHGGIDILVSNAAVNPFFGSLMDVTEEVWDKGFSPYNVSKTALLGLNNTLAIELAPRNIRVNCLHLDLSRLASAGCSGWTRKKRKA

SEQ ID NO: 4185 - protein, 131 aa, Homo sapiens
MAVKLHGGIDILVSNAAVNPFFGSLMDVTEEVWDKTLDINVKAPALMTKAVVPEMEKRGGGSVVIVSSIAAFSPSPGFSPYNVSKTALLGLNNTLAIELAPRNIRVNCLHLDLSRLASAGCSGWTRKKRKA

SEQ ID NO: 4186 - protein, 49 aa, Homo sapiens
MDVTEEVWDKTLDINVKAPALMTKAVVPEMEKRGGGSVVIVSSIAAFSP

SEQ ID NO: 4187 - protein, 215 aa, Homo sapiens
MPFPCLSLPSSWDYRIGFAIARRLAQDRAHVVVSSRKQQNVDQAVATLQGEGLSVTGTVCHVGKAEDRERLVAMTLDINVKAPALMTKAVVPEMEKRGGGSVVIVSSIAAFSPSPGFSPYNVSKTALLGLNNTLAIELAPRNIRVNCLPGLIKTSFSRMLWMDKEKEESMKETLRIRRLGEPEDCAGIVSFLCSEDASYITGETVVVGGGTPSRL

SEQ ID NO: 4188 - protein, 192 aa, Homo sapiens
MQMARLLGLCAWARKSVRMASSRMTRRDPLTNKVALVTASTDGIGFAIARRLAQDRAHVVVSSRKQQNVDQAVATLQGEGLSVTGTVCHVGKAEDRERLVAMAVKLHGGIDILVSNAAVNPFFGSLMDVTEEVWDKLWMDKEKEESMKETLRIRRLGEPEDCAGIVSFLCSEDASYITGETVVVGGGTPSRL

SEQ ID NO: 4189 - protein, 232 aa, Homo sapiens
MQMARLLGLCAWARKSVRMASSRMTRRDPLTNKVALVTASTDGIGFAIARRLAQDRAHVVVSSRKQQNVDQAVATLQGEGLSVTGTVCHVGKAEDRERLVAMAVKLHGGIDILVSNAAVNPFFGSLMDVTEEVWDKTLDINVKAPALMTKAVVPEMEKRGGGSVVIVSSIAAFSPSPGFSPYNVSKTALLGLNNTLAIELAPRNIRVNCLHLDLSRLASAGCSGWTRKKRKA

SEQ ID NO: 4190 - protein, 242 aa, Homo sapiens
MQMARLLGLCAWARKSVRMASSRMTRRDPLTNKVALVTASTDGIGFAIARRLAQDRAHVVVSSRKQQNVDQAVATLQGEGLSVTGTVCHVGKAEDRERLVAMAVKLHGGIDILVSNAAVNPFFGSLMDVTEEVWDKTLDINVKAPALMTKAVVPEMEKRGGGSVVIVSSIAAFSPSPGFSPYNVSKTALLGLNNTLAIELAPRNIRVNCLHLDLSRLASAGWLGEPEDCAGIVSFLCSEDAS

SEQ ID NO: 4191 - protein, 157 aa, Homo sapiens
MQMARLLGLCAWARKSVRMASSRMTRRDPLTNKVALVTASTDGIGFAIARRLAQDRAHVVVSSRKQQNVDQAVATLQGEGLSVTGTVCHVGKAEDRERLVAMGFSPYNVSKTALLGLNNTLAIELAPRNIRVNCLHLDLSRLASAGCSGWTRKKRKA

SEQ ID NO: 4192 - protein, 157 aa, Homo sapiens; identical to SEQ ID NO: 4191

SEQ ID NO: 4193 - protein, 109 aa, Homo sapiens
  SITE 1: note = misc_feature - Xaa can be any naturally occurring amino acid
XSLMDVTEEVWDKTLDINVKAPALMTKAVVPEMEKRGGGSVVIVSSIAAFSPSPGFSPYNVSKTALLGLNNTLAIELAPRNIRVNCLHLDLSRLASAGCSGWTRKKRKA

SEQ ID NO: 4194 - protein, 61 aa, Homo sapiens
MNWELLLWLLVLCALLLLLVQLLRFLRADGDLTLLWAEWQGRRPEWELTDMVVWVTGASSG

SEQ ID NO: 4195 - protein, 339 aa, Homo sapiens
MNWELLLWLLVLCALLLLLVQLLRFLRADGDLTLLWAEWQGRRPEWELTDMVVWVTGASSGIGEELAYQLSKLGVSLVLSARRVHELERVKRRCLENGNLKEKDILVLPLDLTDTGSHEAATKAVLQEFGRIDILVNNGGMSQRSLCMDTSLDVYRKLIELNYLGTVSLTKCVLPHMIERKQGKIVTVNSILGIISVPLSIGYCASKHALRGFFNGLRTELATYPGIIVSNICPGPVQSNIVENSLAGEVTKTIGNNGDQSHKMTTSRCVRLMLISMANDLKEVWISEQPFLLVTYLWQYMPTWAWWITNKMGKKRIENFKSGVDADSSYFKIFKTKHD

SEQ ID NO: 4196 - protein, 339 aa, Homo sapiens; identical to SEQ ID NO: 4195

SEQ ID NO: 4197 - protein, 376 aa, Homo sapiens
MNWELLLWLLVLCALLLLLVQLLRFLRADGDLTLLWAEWQGRRPEWELTDMVVWVTGASSGIGEELAYQLSKLGVSLVLSARRVHELERVKRRCLENGNLKEKDILVLPLDLTDTGSHEAATKAVLQEFGRIDILVNNGGMSQRSLCMDTSLDVYRKLIELNYLGTVSLTKCVLPHMIERKQGKIVTVNSILGIISVPLSIGYCASKHALRGFFNGLRTELATYPGIIVSNICPGPVQSNIVENSLAGEVTKTIGNNGDQSHKMTTSRCVRLMLISMANDLKEVWISEQPFLLVTYLWQYMPTWAWWITTRWGRKGLRTLRVVWMQTLLILKSLRQNMTEKSTCTFQATGGRNGKHENSNLLMLLNNQRLICDFTF

SEQ ID NO: 4198 - protein, 289 aa, Homo sapiens
MVVWVTGASSGIGEELAYQLSKLGVSLVLSARRVHELERVKRRCLENGNLKEKDILVLPLDLTDTGSHEAATKAVLQEFGRIDILVNNGGMSQRSLCMDTSLDVYRKLIELNYLGTVSLTKCVLPHMIERKQGKIVTVNSILGIISVPLSIGYCASKHALRGFFNGLRTELATYPGIIVSNICPGPVQSNIVENSLAGEVTKTIGNNGDQSHKMTTSRCVRLMLISMANDLKEVWISEQPFLLVTYLWQYMPTWAWWITNKMGKKRIENFKSGVDADSSYFKIFKTKHD

SEQ ID NO: 4199 - protein, 212 aa, Homo sapiens
  SITE 1: note = misc_feature - Xaa can be any naturally occurring amino acid
XILVNNGGMSQRSLCMDTSLDVYRKLIELNYLGTVSLTKCVLPHMIERKQGKIVTVNSILGIISVPLSIGYCASKHALRGFFNGLRTELATYPGIIVSNICPGPVQSNIVENSLAGEVTKTIGNNGDQSHKMTTSRCVRLMLISMANDLKEVWISEQPFLMQTLLILKSLRQNMTEKSTCTFQATGGRNGKHENSNLLMLLNNQRLICDFTF

SEQ ID NO: 4200 - protein, 399 aa, Homo sapiens
  SITE 1: note = misc_feature - Xaa can be any naturally occurring amino acid
XLWLLVLCALLLLLVQLLRFLRADGDLTLLWAEWQGRRPEWELTDMVVWVTGASSGIGEELAYQLSKLGVSLVLSARRVHELERVKRRCLENGNLKEKDILVLPLDLTDTGSHEAATKAVLQEFGRIDILVNNGGMSQRSLCMDTSLDVYRKLIELNYLGTVSLTKCVLPHMIERKQGKIVTVNSILGIISVPLSIGYCASKHALRGFFNGLRTELATYPGIIVSNICPGPVQSNIVENSLAGEVTKTIGNNGDQSHKMTTSRCVRLMLISMANDLKEVWISEQPFLLVTYLWQYMPTWAWWITNKMGKKRIENFKSGVVRPISKFLNSMYQSCRKVQNFPVFKKLSGWVQWLMSVIPALWEAKADHLRPGVQDQPGQHSETPSLLKIQKVAGHGGACL

SEQ ID NO: 4201 - protein, 160 aa, Homo sapiens
  SITE 1: note = misc_feature - Xaa can be any naturally occurring amino acid
XNWELLLWLLVLCALLLLLVQLLRFLRADGDLTLLWAEWQGRRPEWELTDMVVWVTGASSGIGEELAYQLSKLGVSLVLSARRVHELERVKRRCLENGNLKEKDILVLPLDLTDTGSHEAATKAVLQEFGRGFFNGLRTELATYPGIIVSNICPGPVQSN

SEQ ID NO: 4202 - protein, 312 aa, Homo sapiens
MGVMAMLMLPLLLLGISGLLFIYQEVSRLWSKSAVQNKVVVITDAISGLGKECARVFHTGGARLVLCGKNWERLENLYDALISVADPSKQTFTPKLVLLDLSDISCVPDVAKEVLDCYGCVDILINNASVKVKGPAHKISLELDKKIMDANYFGPITLTKALLPNMISRRTGQIVLVNNIQGKFGIPFRTTYAASKHAALGFFDCLRAEVEEYDVVISTVSPTFIRSYHVYPEQGNWEASIWKFFFRKLTYGVHPVEVAEEVMRTVRRKKQEVFMANPIPKAAVYVRTFFPEFFFAVVACGVKEKLNVPEEG

SEQ ID NO: 4203 - protein, 311 aa, Homo sapiens
MGVMAMLMLPLLLLGISGLLFIYQEVSRLWSKSAVQNKVVVITDAISGLGKECARVFHTGGARLVLCGKNWERLENLYDALISVADPSKTFTPKLVLLDLSDISCVPDVAKEVLDCYGCVDILINNASVKVKGPAHKISLELDKKIMDANYFGPITLTKALLPNMISRRTGQIVLVNNIQGKFGIPFRTTYAASKHAALGFFDCLRAEVEEYDVVISTVSPTFIRSYHVYPEQGNWEASIWKFFFRKLTYGVHPVEVAEEVMRTVRRKKQEVFMANPIPKAAVYVRTFFPEFFFAVVACGVKEKLNVPEEG

SEQ ID NO: 4204 - protein, 132 aa, Homo sapiens
SVKVKGPAHKISLELDKKIMDANYFGPITLTKALLPNMISRRTGQIVLVNNIQGKFGIPFRTTFFFRKLTYGVHPVEVAEEVMRTVRRKKQEVFMANPIPKAAVYVRTFFPEFFFAVVACGVKEKLNVPEEG

SEQ ID NO: 4205 - protein, 66 aa, Homo sapiens
MLFWVLGLLILCGFLWTRKGKLKIEDITDKYIFITGCDSGFGNLAARTFDKKGFHVIAACLTESGS

SEQ ID NO: 4206 - protein, 319 aa, Homo sapiens
MLFWVLGLLILCGFLWTRKGKLKIEDITDKYIFITGCDSGFGNLAARTFDKKGFHVIAACLTESGSTALKAETSERLRTVLLDVTDPENVKRTAQWVKNQVGEKGLWGLINNAGVPGVLAPTDWLTLEDYREPIEVNLFGLISVTLNMLPLVKKAQGRVINVSSVGGRLAIVGGGYTPSKYAVEGFNDSLRRDMKAFGVHVSCIEPGLFKTNLADPVKVIEKKLAIWEQLSPDIKQQYGEGYIEKSLDKLKGNKSYVNMDLSPVVECMDHALTSLFPKTHYAAGKDAKIFWIPLSHMPAALQDFLLLKQKAELANPKAV

SEQ ID NO: 4207 - protein, 319 aa, Homo sapiens; identical to SEQ ID NO: 4206

SEQ ID NO: 4208 - protein, 319 aa, Homo sapiens; identical to SEQ ID NO: 4206

SEQ ID NO: 4209 - protein, 319 aa, Homo sapiens; identical to SEQ ID NO: 4206

SEQ ID NO: 4210 - protein, 319 aa, Homo sapiens; identical to SEQ ID NO: 4206

SEQ ID NO: 4211 - protein, 172 aa, Homo sapiens
MLPLVKKAQGRVINVSSVGGRLAIVGGGYTPSKYAVEGFNDSLRRDMKAFGVHVSCIEPGLFKTNLADPVKVIEKKLAIWEQLSPDIKQQYGEGYIEKSLDKLKGNKSYVNMDLSPVVECMDHALTSLFPKTHYAAGKDAKIFWIPLSHMPAALQDFLLLKQKAELANPKAV

SEQ ID NO: 4212 - protein, 379 aa, Homo sapiens
MPEGRSHCACSITSLTLLVSLTRVTLDILQKLDPPQPAHWRHHLLVLYKKGVYLSHTGGKMLFWVLGLLILCGFLWTRKGKLKIEDITDKYIFITGCDSGFGNLAARTFDKKGFHVIAACLTESGSTALKAETSERLRTVLLDVTDPENVKRTAQWVKNQVGEKGLWGLINNAGVPGVLAPTDWLTLEDYREPIEVNLFGLISVTLNMLPLVKKAQGRVINVSSVGGRLAIVGGGYTPSKYAVEGFNDSLRRDMKAFGVHVSCIEPGLFKTNLADPVKVIEKKLAIWEQLSPDIKQQYGEGYIEKSLDKLKGNKSYVNMDLSPVVECMDHALTSLFPKTHYAAGKDAKIFWIPLSHMPAALQDFLLLKQKAELANPKAV

SEQ ID NO: 4213 - protein, 122 aa, Homo sapiens
MHVIIAGNNDSKAKQVVSKIKEETLNDKVEFLYCDLASMTSIRQFVQKFKMKKIPLHVLINNAGVMMVPQRKTRDGFEEHFGLNYLGHFLLTNLLLDTLKESGSPGHSARVVTVSSATHYVA

SEQ ID NO: 4214 - protein, 63 aa, Homo sapiens
MPVFPPRPDRVAIVTGGTDGIGYSTAKHLARLGMHVIIAGNNDSKAKQVVSKIKEETLNDKET

SEQ ID NO: 4215 - protein, 330 aa, Homo sapiens
MSPLSAARAALRVYAVGAAVILAQLLRRCRGGFLEPVFPPRPDRVAIVTGGTDGIGYSTAKHLARLGMHVIIAGNNDSKAKQVVSKIKEETLNDKVEFLYCDLASMTSIRQFVQKFKMKKIPLHVLINNAGVMMVPQRKTRDGFEEHFGLNYLGHFLLTNLLLDTLKESGSPGHSARVVTVSSATHYVAELNMDDLQSSACYSPHAAYAQSKLALVLFTYHLQRLLAAEGSHVTANVVDPGVVNTDVYKHVFWATRLAKKLLGWLLFKTPDEGAWTSIYAAVTPELEGVGGHYLYNEKETKSLHVTYNQKLQQQLWSKSCEMTGVLDVTL

SEQ ID NO: 4216 - protein, 232 aa, Homo sapiens
MSPLSAARAALRVYAVGAAVILAQLLRRCRGGFLEPVFPPRPDRVAIVTGGTDGIGYSTAKHLARLGMHVIIVEFLYCDLASMTSIRQFVQKFKMKKIPLHVLINNAGVMMVPQRKTRDGFEEHFGLNYLGHFLLTNLLLDTLKESGSPGHSARVVTVSSATHYVAELNMDDLQSSACYSPHAAYAQSKLALVLFTYHLQRLLAAEGSHVTANVVDPGVVNTDVYKHVFWAT

SEQ ID NO: 4217 - protein, 154 aa, Homo sapiens
  SITE 1: note = misc_feature - Xaa can be any naturally occurring amino acid
XPARPGPTLPSPRVWPPRLSRVGLQPSSPRAAAPPRTLTPPGHGRGPGGSHAPRPRHQAALPAACGRPVTARPRQAPEGRSGRPRDLDPYPPQVFPPRPDRVAIVTGGTDGIGYSTAKHLARLGMHVIIAGNNDSKAKQVVSKIKEETLNDKET

SEQ ID NO: 4218 - protein, 1369 aa, Homo sapiens
MGGKNKKHKAPAAAVVRAAVSASRAKSAEAGIAGEAQSKKPVSRPATAAAAAAGSREPRVKQGPKIYSFNSTNDSSGPANLDKSILKVVINNKLEQRIIGVINEHKKQNNDKGMISGRLTAKKLQDLYMALQAFSFKTKDIEDAMTNTLLYGGDLHSALDWLCLNLSDDALPEGFSQEFEEQQPKSRPKFQSPQIQATISPPLQPKTKTYEEDPKSKPKKEEKNMEVNMKEWILRYAEQQNEEEKNENSKSLEEEEKFDPNERYLHLAAKLLDAKEQAATFKLEKNKQGQKEAQEKIRKFQREMETLEDHPVFNPAMKISHQQNERKKPPVATEGESALNFNLFEKSAAATEEEKDKKKEPHDVRNFDYTARSWTGKSPKQFLIDWVRKNLPKSPNPSFEKVPVGRYWKCRVRVIKSEDDVLVVCPTILTEDGMQAQHLGATLALYRLVKGQSVHQLLPPTYRDVWLEWSDAEKKREELNKMETNKPRDLFIAKLLNKLKQQQQQQQQHSENKRENSEDPEESWENLVSDEDFSALSLESANVEDLEPVRNLFRKLQSTPKYQKLLKERQQLPVFKHRDSIVETLKRHRVVVVAGETGSGKSTQVPHFLLEDLLLNEWEASKCNIVCTQPRRISAVSLANRVCDELGCENGPGGRNSLCGYQIRMESRACESTRLLYCTTGVLLRKLQEDGLLSNVSHVIVDEVHERSVQSDFLLIILKEILQKRSDLHLILMSATVDSEKFSTYFTHCPILRISGRSYPVEVFHLEDIIEETGFVLEKDSEYCQKFLEEEEEVTINVTSKAGGIKKYQEYIPVQTGAHADLNPFYQKYSSRTQHAILYMNPHKINLDLILELLAYLDKSPQFRNIEGAVLIFLPGLAHIQQLYDLLSNDRRFYSERYKVIALHSILSTQDQAAAFTLPPPGVRKIVLATNIAETGITIPDVVFVIDTGRTKENKYHESSQMSSLVETFVSKASALQRQGRAGRVRDGFCFRMYTRERFEGFMDYSVPEILRVPLEELCLHIMKCNLGSPEDFLSKALDPPQLQVISNAMNLLRKIGACELNEPKLTPLGQHLAALPVNVKIGKMLIFGAIFGCLDPVATLAAVMTEKSPFTTPIGRKDEADLAKSALAMADSDHLTIYNAYLGWKKARQEGGYRSEITYCRRNFLNRTSLLTLEDVKQELIKLVKAAGFSSSTTSTSWEGNRASQTLSFQEIALLKAVLVAGLYDNVGKIIYTKSVDVTEKLACIVETAQGKAQVHPSSVNRDLQTHGWLLYQEKIRYARVYLRETTLITPFPVLLFGGDIEVQHRERLLSIDGWIYFQAPVKIAVIFKQLRVLIDSVLRKKLENPKMSLENDKILQIITELIKTENN

SEQ ID NO: 4219 - protein, 1370 aa, Homo sapiens
MGGKNKKHKAPAAAVVRAAVSASRAKSAEAGIAGEAQSKKPVSRPATAAAAAAGSREPRVKQGPKIYSFNSTNDSSGPANLDKSILKVVINNKLEQRIIGVINEHKKQNNDKGMISGRLTAKKLQDLYMALQAFSFKTKDIEDAMTNTLLYGGDLHSALDWLCLNLSDDALPEGFSQEFEEQQPKSRPKFQSPQIQATISPPLQPKTKTYEEDPKSKPKKEEKNMEVNMKEWILRYAEQQNEEEKNENSKSLEEEEKFDPNERYLHLAAKLLDAKEQAATFKLEKNKQGQKEAQEKIRKFQREMETLEDHPVFNPAMKISHQQNERKKPPVATEGESALNFNLFEKSAAATEEEKGKKKEPHDVRNFDYTARSWTGKSPKQFLIDWVRKNLPKSPNPSFEKVPVGRYWKCRVRVIKSEDDVLVVCPTILTEDGMQAQHLGATLALYRLVKGQSVHQLLPPTYRDVWLEWSDAEKKREELNKMETNKPRDLFIAKLLNKLKQQQQQQQQHSENKRENSEDPEESWENLVSDEDFSALSLESANVEDLEPVRNLFRKLQSTPKYQKLLKERQQLPVFKHRDSIVETLKRHRVVVVAGETGSGKSTQVPHFLLEDLLLNEWEASKCNIVCTQPRRISAVSLANRVCDELGCENGPGGRNSLCGYQIRMESRACESTRLLYCTTGVLLRKLQEDGLLSNVSHVIVDEVHERSVQSDFLLIILKEILQKRSDLHLILMSATVDSEKFSTYFTHCPILRISGRSYPVEVFHLEDIIEETGFVLEKDSEYCQKFLEEEEEVTINVTSKAGGIKKYQEYIPVQTGAHADLNPFYQKYSSRTQHAILYMNPHKINLDLILELLAYLDKSPQFRNIEGAVLIFLPGLAHIQQLYDLLSNDRRFYSERYKVIALHSILSTQDQAAAFTLPPPGVRKIVLATNIAETGITIPDVVFVIDTGRTKENKYHESSQMSSLVETFVSKASALQRQGRAGRVRDGFCFRMYTRERFEGFMDYSVPEILRVPLEELCLHIMKCNLGSPEDFLSKALDPPQLQVISNAMNLLRKIGACELNEPKLTPLGQHLAALPVNVKIGKMLIFGAIFGCLDPVATLAAVMTEKSPFTTPIGRKDEADLAKSALAMADSDHLTIYNAYLGWKKARQEGGYRSEITYCRRNFLNRTSLLTLEDVKQELIKLVKAAGFSSSTTSTSWEGNRASQTLSFQEIALLKAVLVAGLYDNVGKIIYTKSVDVTEKLACIVETAQGKAQVHPSSVNRDLQTHGWLLYQEKIRYARVYLRETTLITPFPVLLFGGDIEVQHRERLLSIDGWIYFQAPVKIAVIFKQLRVLIDSVLRKKLENPKMSLENDKILQIITELIKTENNN

SEQ ID NO: 4220 - protein, 160 aa, Homo sapiens
  SITE 1: note = misc_feature - Xaa can be any naturally occurring amino acid
XRPRWSGPPCLLPEPNLPRLELPGRPKARSQCPGRPPLPLPLPAPGSPVSSKVVINNKLEQRIIGVINEHKKQNNDKGMISGRLTAKKLQDLYMALQAFSFKTKDIEDAMTNTLLYGGDLHSALDWLCLNLSDDALPEGFSQEFEEQQPKSRPKFQSPQI

SEQ ID NO: 4221 - protein, 1222 aa, Homo sapiens
MAAARRLMALAAGISPRLQPLGPRAAGRQGRSRGFSSSCAHPDHTKEAAEAESGMAPGGPGEGDGSLVNASRDLLKEFPQPKNLLNSVIGRALGISHAKDKLVYVHTNGPKKKKVTLHIKWPKSVEVEGYGSKKIDAERQAAAAACQLFKGWGLLGPRNELFDAAKYRVLADRFGSPADSWWRPEPTMPPTSWRQLNPESIRPGGPGGLSRSLGREEEEDEEEELEEGTIDVTDFLSMTQQDSHAPLRDSRGSSFEMTDDDSAIRALTQFPLPKNLLAKVIQIATSSSTAKNLMQFHTVGTKTKLSTLTLLWPCPMTFVAKGRRKAEAENKAAALACKKLKSLGLVDRNNEPLTHAMYNLASLRELGETQRRPCTIQVPEPILRKIETFLNHYPVESSWIAPELRLQSDDILPLGKDSGPLSDPITGKPYVPLLEAEEVRLSQSLLELWRRRGPVWQEAPQLPVDPHRDTILNAIEQHPVVVISGDTGCGKTTRIPQLLLERYVTEGRGARCNVIITQPRRISAVSVAQRVSHELGPSLRRNVGFQVRLESKPPSRGGALLFCTVGILLRKLQSNPSLEGVSHVIVDEVHERDVNTDFLLILLKGLQRLNPALRLVLMSATGDNERFSRYFGGCPVIKVPGFMYPVKEHYLEDILAKLGKHQYLHRHRHHESEDECALDLDLVTDLVLHIDARGEPGGILCFLPGWQEIKGVQQRLQEALGMHESKYLILPVHSNIPMMDQKAIFQQPPVGVRKIVLATNIAETSITINDIVHVVDSGLHKEERYDLKTKVSCLETVWVSRANVIQRRGRAGRCQSGFAYHLFPRSRLEKMVPFQVPEILRTPLENLVLQAKIHMPEKTAVEFLSKAVDSPNIKAVDEAVILLQEIGVLDQREYLTTLGQRLAHISTDPRLAKAIVLAAIFRCLHPLLVVVSCLTRDPFSSSLQNRAEVDKVKALLSHDSGSDHLAFVRAVAGWEEVLRWQDRSSRENYLEENLLYAPSLRFIHGLIKQFSENIYEAFLVGKPSDCTLASAQCNEYSEEEELVKGVLMAGLYPNLIQVRQGKVTRQGKFKPNSVTYRTKSGNILLHKSTINREATRLRSRWLTYFMAVKSNGSVFVRDSSQVHPLAVLLLTDGDVHIRDDGRRATISLSDSDLLRLEGDSRTVRLLKELRRALGRMVERSLRSELAALPPSVQEEHGQLLALLAELLRGPCGSFDVRKTADD

SEQ ID NO: 4222 - protein, 1155 aa, Homo sapiens
MAASRDLLKEFPQPKNLLNSVIGRALGISHAKDKLVYVHTNGPKKKKVTLHIKWPKSVEVEGYGSKKIDAERQAAAAACQLFKGWGLLGPRNELFDAAKYRVLADRFGSPADSWWRPEPTMPPTSWRQLNPESIRPGGPGGLSRSLGREEEEDEEEELEEGTIDVTDFLSMTQQDSHAPLRDSRGSSFEMTDDDSAIRALTQFPLPKNLLAKVIQIATSSSTAKNLMQFHTVGTKTKLSTLTLLWPCPMTFVAKGRRKAEAENKAAALACKKLKSLGLVDRNNEPLTHAMYNLASLRELGETQRRPCTIQVPEPILRKIETFLNHYPVESSWIAPELRLQSDDILPLGKDSGPLSDPITGKPYVPLLEAEEVRLSQSLLELWRRRGPVWQEAPQLPVDPHRDTILNAIEQHPVVVISGDTGCGKTTRIPQLLLERYVTEGRGARCNVIITQPRRISAVSVAQRVSHELGPSLRRNVGFQVRLESKPPSRGGALLFCTVGILLRKLQSNPSLEGVSHVIVDEVHERDVNTDFLLILLKGLQRLNPALRLVLMSATGDNERFSRYFGGCPVIKVPGFMYPVKEHYLEDILAKLGKHQYLHRHRHHESEDECALDLDLVTDLVLHIDARGEPGGILCFLPGWQEIKGVQQRLQEALGMHESKYLILPVHSNIPMMDQKAIFQQPPVGVRKIVLATNIAETSITINDIVHVVDSGLHKEERYDLKTKVSCLETVWVSRANVIQRRGRAGRCQSGFAYHLFPRSRLEKMVPFQVPEILRTPLENLVLQAKIHMPEKTAVEFLSKAVDSPNIKAVDEAVILLQEIGVLDQREYLTTLGQRLAHISTDPRLAKAIVLAAIFRCLHPLLVVVSCLTRDPFSSSLQNRAEVDKVKALLSHDSGSDHLAFVRAVAGWEEVLRWQDRSSRENYLEENLLYAPSLRFIHGLIKQFSENIYEAFLVGKPSDCTLASAQCNEYSEEEELVKGVLMAGLYPNLIQVRQGKVTRQGKFKPNSVTYRTKSGNILLHKSTINREATRLRSRWLTYFMAVKSNGSVFVRDSSQVHPLAVLLLTDGDVHIRDDGRRATISLSDSDLLRLEGDSRTVRLLKELRRALGRMVERSLRSELAALPPSVQEEHGQLLALLAELLRGPCGSFDVRKTADD

SEQ ID NO: 4223 - protein, 1166 aa, Homo sapiens
MCVNPTPGGTISRASRDLLKEFPQPKNLLNSVIGRALGISHAKDKLVYVHTNGPKKKKVTLHIKWPKSVEVEGYGSKKIDAERQAAAAACQLFKGWGLLGPRNELFDAAKYRVLADRFGSPADSWWRPEPTMPPTSWRQLNPESIRPGGPGGLSRSLGREEEEDEEEELEEGTIDVTDFLSMTQQDSHAPLRDSRGSSFEMTDDDSAIRALTQFPLPKNLLAKVIQIATSSSTAKNLMQFHTVGTKTKLSTLTLLWPCPMTFVAKGRRKAEAENKAAALACKKLKSLGLVDRNNEPLTHAMYNLASLRELGETQRRPCTIQVPEPILRKIETFLNHYPVESSWIAPELRLQSDDILPLGKDSGPLSDPITGKPYVPLLEAEEVRLSQSLLELWRRRGPVWQEAPQLPVDPHRDTILNAIEQHPVVVISGDTGCGKTTRIPQLLLERYVTEGRGARCNVIITQPRRISAVSVAQRVSHELGPSLRRNVGFQVRLESKPPSRGGALLFCTVGILLRKLQSNPSLEGVSHVIVDEVHERDVNTDFLLILLKGLQRLNPALRLVLMSATGDNERFSRYFGGCPVIKVPGFMYPVKEHYLEDILAKLGKHQYLHRHRHHESEDECALDLDLVTDLVLHIDARGEPGGILCFLPGWQEIKGVQQRLQEALGMHESKYLILPVHSNIPMMDQKAIFQQPPVGVRKIVLATNIAETSITINDIVHVVDSGLHKEERYDLKTKVSCLETVWVSRANVIQRRGRAGRCQSGFAYHLFPRSRLEKMVPFQVPEILRTPLENLVLQAKIHMPEKTAVEFLSKAVDSPNIKAVDEAVILLQEIGVLDQREYLTTLGQRLAHISTDPRLAKAIVLAAIFRCLHPLLVVVSCLTRDPFSSSLQNRAEVDKVKALLSHDSGSDHLAFVRAVAGWEEVLRWQDRSSRENYLEENLLYAPSLRFIHGLIKQFSENIYEAFLVGKPSDCTLASAQCNEYSEEEELVKGVLMAGLYPNLIQVRQGKVTRQGKFKPNSVTYRTKSGNILLHKSTINREATRLRSRWLTYFMAVKSNGSVFVRDSSQVHPLAVLLLTDGDVHIRDDGRRATISLSDSDLLRLEGDSRTVRLLKELRRALGRMVERSLRSELAALPPSVQEEHGQLLALLAELLRGPCGSFDVRKTADD

SEQ ID NO: 4224 - protein, 1194 aa, Homo sapiens
MFSLDSFRKDRAQHRQRQCKLPPPRLPPMCVNPTPGGTISRASRDLLKEFPQPKNLLNSVIGRALGISHAKDKLVYVHTNGPKKKKVTLHIKWPKSVEVEGYGSKKIDAERQAAAAACQLFKGWGLLGPRNELFDAAKYRVLADRFGSPADSWWRPEPTMPPTSWRQLNPESIRPGGPGGLSRSLGREEEEDEEEELEEGTIDVTDFLSMTQQDSHAPLRDSRGSSFEMTDDDSAIRALTQFPLPKNLLAKVIQIATSSSTAKNLMQFHTVGTKTKLSTLTLLWPCPMTFVAKGRRKAEAENKAAALACKKLKSLGLVDRNNEPLTHAMYNLASLRELGETQRRPCTIQVPEPILRKIETFLNHYPVESSWIAPELRLQSDDILPLGKDSGPLSDPITGKPYVPLLEAEEVRLSQSLLELWRRRGPVWQEAPQLPVDPHRDTILNAIEQHPVVVISGDTGCGKTTRIPQLLLERYVTEGRGARCNVIITQPRRISAVSVAQRVSHELGPSLRRNVGFQVRLESKPPSRGGALLFCTVGILLRKLQSNPSLEGVSHVIVDEVHERDVNTDFLLILLKGLQRLNPALRLVLMSATGDNERFSRYFGGCPVIKVPGFMYPVKEHYLEDILAKLGKHQYLHRHRHHESEDECALDLDLVTDLVLHIDARGEPGGILCFLPGWQEIKGVQQRLQEALGMHESKYLILPVHSNIPMMDQKAIFQQPPVGVRKIVLATNIAETSITINDIVHVVDSGLHKEERYDLKTKVSCLETVWVSRANVIQRRGRAGRCQSGFAYHLFPRSRLEKMVPFQVPEILRTPLENLVLQAKIHMPEKTAVEFLSKAVDSPNIKAVDEAVILLQEIGVLDQREYLTTLGQRLAHISTDPRLAKAIVLAAIFRCLHPLLVVVSCLTRDPFSSSLQNRAEVDKVKALLSHDSGSDHLAFVRAVAGWEEVLRWQDRSSRENYLEENLLYAPSLRFIHGLIKQFSENIYEAFLVGKPSDCTLASAQCNEYSEEEELVKGVLMAGLYPNLIQVRQGKVTRQGKFKPNSVTYRTKSGNILLHKSTINREATRLRSRWLTYFMAVKSNGSVFVRDSSQVHPLAVLLLTDGDVHIRDDGRRATISLSDSDLLRLEGDSRTVRLLKELRRALGRMVERSLRSELAALPPSVQEEHGQLLALLAELLRGPCGSFDVRKTADD

SEQ ID NO: 4225 - protein, 1194 aa, Homo sapiens; identical to SEQ ID NO: 4224

SEQ ID NO: 4226 - protein, 42 aa, Homo sapiens
MFSLDSFRKDRAQHRQRQCKLPPPRLPPMCVNPTPGGTISRG

SEQ ID NO: 4227 - protein, 42 aa, Homo sapiens; identical to SEQ ID NO: 4226

SEQ ID NO: 4228 - protein, 42 aa, Homo sapiens; identical to SEQ ID NO: 4226

SEQ ID NO: 4229 - protein, 138 aa, Homo sapiens
KAKFHQTEGDHLTLLAVYNSWKNNKFSNPWCYENFIQARSLRRAQDIRKQMLGIMDRHKLDVVSCGKSTVRVQKAICSGFFRNAAKKDPQEGYRTLIDQQVVYIHPSSALFNRQPEWDLYSRFSEWKSGTNCSSLSGT

SEQ ID NO: 4230 - protein, 1220 aa, Homo sapiens [sequence omitted]

SEQ ID NO: 4231 - protein, 1181 aa, Homo sapiens
MAVAVAMAGALIGSEPGPAEELAKLEYLSLVSKVCTELDNHLGINDKDLAEFVISLAEKNTTFDTFKASLVKNGAEFTDSLISNLLRLIQTMRPPAKPSTSKDPVVKPKTEKEKLKELFPVLCQPDNPSVRTMLDEDDVKVAVDVLKELEALMPSAAGQEKQRDAEHRDRTKKKKRSRSRDRNRDRDRDRERNRDRDHKRRHRSRSRSRSRTRERNKVKSRYRSRSRSQSPPKDRKDRDKYGERNLDRWRDKHVDRPPPEEPTIGDIYNGKVTSIMQFGCFVQLEGLRKRWEGLVHISELRREGRVANVADVVSKGQRVKVKVLSFTGTKTSLSMKDVDQETGEDLNPNRRRNLVGETNEETSMRNPDRPTHLSLVSAPEVEDDSLERKRLTRISDPEKWEIKQMIAANVLSKEEFPDFDEETGILPKVDDEEDEDLEIELVEEEPPFLRGHTKQSMDMSPIKIVKNPDGSLSQAAMMQSALAKERRELKQAQREAEMDSIPMGLNKHWVDPLPDAEGRQIAANMRGIGMMPNDIPEWKKHAFGGNKASYGKKTQMSILEQRESLPIYKLKEQLVQAVHDNQILIVIGETGSGKTTQITQYLAEAGYTSRGKIGCTQPRRVAAMSVAKRVSEEFGCCLGQEVGYTIRFEDCTSPETVIKYMTDGMLLRECLIDPDLTQYAIIMLDEAHERTIHTDVLFGLLKKTVQKRQDMKLIVTSATLDAVKFSQYFYEAPIFTIPGRTYPVEILYTKEPETDYLDASLITVMQIHLTEPPGDILVFLTGQEEIDTACEILYERMKSLGPDVPELIILPVYSALPSEMQTRIFDPAPPGSRKVVIATNIAETSLTIDGIYYVVDPGFVKQKVYNSKTGIDQLVVTPISQAQAKQRAGRAGRTGPGKCYRLYTERAYRDEMLTTNVPEIQRTNLASTVLSLKAMGINDLLSFDFMDAPPMETLITAMEQLYTLGALDDEGLLTRLGRRMAEFPLEPMLCKMLIMSVHLGCSEEMLTIVSMLSVQNVFYRPKDKQALADQKKAKFHQTEGDHLTLLAVYNSWKNNKFSNPWCYENFIQARSLRRAQDIRKQMLGIMDRHKLDVVSCGKSTVRVQKAICSGFFRNAAKKDPQEGYRTLIDQQVVYIHPSSALFNRQPECPKHFLPVVAVAVSLEQCLSKFEDLNKELGLVTC

SEQ ID NO: 4232 - protein, 53 aa, Homo sapiens
MAVAVAMAGALIGSEPGPAEELAKLEYLSLVSKVCTELDNHLGINDKDLGFSY

SEQ ID NO: 4233 - protein, 33 aa, Homo sapiens
  SITE 1: note = misc_feature - Xaa can be any naturally occurring amino acid
XYRTLIDQQVVYIHPSSALFNRQPEWTVPMGHV

SEQ ID NO: 4234 - protein, 6 aa, Homo sapiens
MGILSV

SEQ ID NO: 4235 - protein, 6 aa, Homo sapiens
MGILSV

SEQ ID NO: 4236 - protein, 56 aa, Homo sapiens
MGILSVDLLITLQILPPSANWWKSSPQWLTSCWSTLMRLIHQMAGRYRGTPLCLLR

SEQ ID NO: 4237 - protein, 55 aa, Homo sapiens
MGILSVDLLITLQILPVFFSNCLFLALYDSVILLKHVVLLLSRSKSTRGEWRRML

SEQ ID NO: 4238 - protein, 145 aa, Homo sapiens
MGILSVDLLITLQILPVFFSNCLFLALYDSVILLKHVVLLLSRSKSTRGEWRRMLTSEGLRCVWKSFLLDAYKQLNCPPSGFSKDGHILLVYEAYKSRLLVYSHLDLWMTDSVVLTLNFPRQISLCFGKNSAAELYIVSKKEKVP

SEQ ID NO: 4239 - protein, 306 aa, Homo sapiens
MGILSVDLLITLQILPVFFSNCLFLALYDSVILLKHVVLLLSRSKSTRGEWRRMLTSEGLRCVWKSFLLDAYKQLNCPPSGFSKDGHILLVYEAYKSRLLVYSHLDLWMVKLGEDAPNSSVVHVSSTEGGDNSGNGTQEKIAEGATCHLLDFASPERPLVVNFGSATPPFTSQLPAFRKLVEEFSSVADFLLVYIDEAHPSDGWAIPGDSSLSFEVKKHQNQEDRCAAAQQLLERFSLPPQCRVVADRMDNNANIAYGVAFERVCIVQRQKIAYLGGKGPFSYNLQEVRHWLEKNFSKRKKTRLAG

SEQ ID NO: 4240 - protein, 271 aa, Homo sapiens
MGILSVDLLITLQILPVFFSNCLFLALYDSVILLKHVVLLLSRSKSTRGEWRRMLTSEGLRCVWKSFLLDAYKQVKLGEDAPNSSVVHVSSTEGGDNSGNGTQEKIAEGATCHLLDFASPERPLVVNFGSATPPFTSQLPAFRKLVEEFSSVADFLLVYIDEAHPSDGWAIPGDSSLSFEVKKHQNQEDRCAAAQQLLERFSLPPQCRVVADRMDNNANIAYGVAFERVCIVQRQKIAYLGGKGPFSYNLQEVRHWLEKNFSKRKKTRLAG

SEQ ID NO: 4241 - protein, 271 aa, Homo sapiens; identical to SEQ ID NO: 4240

SEQ ID NO: 4242 - protein, 37 aa, Homo sapiens
  SITE 1: note = misc_feature - Xaa can be any naturally occurring amino acid
XMLTSEGLRCVWKSFLLDAYKQLNCPPSGFSKDGHIL

SEQ ID NO: 4243 - protein, 58 aa, Homo sapiens
  SITE 1: note = misc_feature - Xaa can be any naturally occurring amino acid
XMLTSEGLRCVWKSFLLDAYKQTDSVVLTLNFPRQISLCFGKNSAAELYIVSKKEKVP

SEQ ID NO: 4244 - protein, 77 aa, Homo sapiens
MEEAKKMISGLQALLLNGSLPEDEQERPLALCEPGVNPEEQLIIIQSRLDQSMEENQDLKKELLKCKQEARNLQGIK

SEQ ID NO: 4245 - protein, 472 aa, Homo sapiens
MGGTQVKCLTSPSPIHSAKSESIITQSEEKADFVIIPAEGIENRTEGTDSPLSRDWRPGSPGTYLETSWEEQLLEQQEYLEKEMEEAKKMISGLQALLLNGSLPEDEQERPLALCEPGVNPEEQLIIIQSRLDQSMEENQDLKKELLKCKQEARNLQGIKDALQQRLTQQDTSVLQLKQELLRANMDKDELHNQNVDLQRKLDERNRLLGEYKKELGQKDRLLQQHQAKLEEALRKLSDVSYHQVDLERELEHKDVLLAHCMKREADEATNYNSHNSQSNGFLLPTAGKGATSVSNRGTSDLQLVRDALRSLRNSFSGHDPQHHTIDSLEQGISSLMERLHVMETQKKQERKVRVKSPRTQVGSEYRESWPPNSKLPHSQSSPTVSSTCTKVLYFTDRSLTPFMVNIPKRLEEVTLKDFKAAIDREGNHRYHFKALDPEFGTVKEEIFHDDDAIPGWEGKIVAWVEEDHGEN

SEQ ID NO: 4246 - protein, 218 aa, Homo sapiens
MGTQVVMRFNNSLLPTEPSQQLQAYVAWVNAQLKKRPAVKPVQDLRQDLRDGVILAYLIEIVAGEKLSGVQLSPGNQQEMKNNVEKVLQFVASKKIRMHQTSAKDIVDGNLKSIMRLVLALAAHFKPGSSRTVNQGRDSRAPLQSHRPHCATAVAQGAAAALADVCHDMSRSGRDVFRYRQRNSSMDEEIENPYWSVRALVQQYEGQQRSPSESSCSR

SEQ ID NO: 4247 - protein, 683 aa, Homo sapiens
MLACLTRGNLLDVLQEGFNEQQLQAYVAWVNAQLKKRPAVKPVQDLRQDLRDGVILAYLIEIVAGEKLSGVQLSPGNQQEMKNNVEKVLQFVASKKIRMHQTSAKDIVDGNLKSIMRLVLALAAHFKPGSSRTVNQGRDSRAPLQSHRPHCATAVAQGAAAALADVCHDMSRSGRDVFRYRQRNSSMDEEIENPYWSVRALVQQYEGQQRSPSESSCSSLTSPSPIHSAKSESIITQSEEKADFVIIPAEGIENRTEGTDSPLSRDWRPGSPGTYLETSWEEQLLEQQEYLEKEMEEAKKMISGLQALLLNGSLPEDEQERPLALCEPGVNPEEQLIIIQSRLDQSMEENQDLKKELLKCKQEARNLQGIKDALQQRLTQQDTSVLQLKQELLRANMDKDELHNQNVDLQRKLDERNRLLGEYKKELGQKDRLLQQHQAKLEEALRKLSDVSYHQVDLERELEHKDVLLAHCMKREADEATNYNSHNSQSNGFLLPTAGKGATSVSNRGTSDLQLVRDALRSLRNSFSGHDPQHHTIDSLEQGISSLMERLHVMETQKKQERKVRVKSPRTQVGSEYRESWPPNSKLPHSQSSPTVSSTCTKVLYFTDRSLTPFMVNIPKRLEEVTLKDFKAAIDREGNHRYHFKALDPEFGTVKEEIFHDDDAIPGWEGKIVAWVEEDHGEN

SEQ ID NO: 4248 - protein, 266 aa, Homo sapiens
MMALGAAGATRVFVAMVAAALGGHPLLGVSATLNSVLNSNAIKNLPPPLGGAAGHPGSAVSAAPGILYPGGNKYQTIDNYQPYPCAEDEECGTDEYCASPTRGGDAGVQICLACRKRRKRCMRHAMCCPGNYCKNGICVSSDQNHFRGEIEETITESFGNDHSTLDGYSRRTTLSSKMYHTKGQEGSVCLRSSDCASGLCCARHFWSKICKPVLKEGQVCTKHRRKGSHGLEIFQRCYCGEGLSCRIQKDHHQASNSSRLHTCQRH

SEQ ID NO: 4249 - protein, 259 aa, Homo sapiens
MAALMRSKDSSCCLLLLAAVLMVESSQIGSSRAKLNSIKSSLGGETPGQAANRSAGMYQGLAFGGSKKGKNLGQAYPCSSDKECEVGRYCHSPHQGSSACMVCRRKKKRCHRDGMCCPSTRCNNGICIPVTESILTPHIPALDGTRHRDRNHGHYSNHDLGWQNLGRPHTKMSHIKGHEGDPCLRSSDCIEGFCCARHFWTKICKPVLHQGEVCTKQRKKGSHGLEIFQRCDCAKGLSCKVWKDATYSSKARLHVCQKI

SEQ ID NO: 4250 - protein, 213 aa, Homo sapiens
MTLRIDYCQGLLVGVSSSGLNIIQIQCQAYPCSSDKECEVGRYCHSPHQGSSACMVCRRKKKRCHRDGMCCPSTRCNNGICIPVTESILTPHIPALDGTRHRDRNHGHYSNHDLGWQNLGRPHTKMSHIKGHEGDPCLRSSDCIEGFCCARHFWTKICKPVLHQGEVCTKQRKKGSHGLEIFQRCDCAKGLSCKVWKDATYSSKARLHVCQKI

SEQ ID NO: 4251 - protein, 159 aa, Homo sapiens
MVCRRKKKRCHRDGMCCPSTRCNNGICIPVTESILTPHIPALDGTRHRDRNHGHYSNHDLGWQNLGRPHTKMSHIKGHEGDPCLRSSDCIEGFCCARHFWTKICKPVLHQGEVCTKQRKKGSHGLEIFQRCDCAKGLSCKVWKDATYSSKARLHVCQKI

SEQ ID NO: 4252 - protein, 132 aa, Homo sapiens
MQRLGATLLCLLLAAAVPTAPAPAPTATSAPVKPGPALSYPQEEATLNEMFREVEELMEDTQHKLRSAVEEMEAEEAAAKASSEVNLANLPPSYHNETNTDTKVGNNTIHVHREIHKECIIDEDCGPSMYCQ

SEQ ID NO: 4253 - protein, 183 aa, Homo sapiens
MQRLGATLLCLLLAAAVPTAPAPAPTATSAPVKPGPALSYPQEEATLNEMFREVEELMEDTQHKLRSAVEEMEAEEAAAKASSEVNLANLPPSYHNETNTDTKVGNNTIHVHREIHKECIIDEDCGPSMYCQFASFQYTCQPCRGQRMLCTRDSECCGDQLCVWGHCTKMATRGSNGTICDNQ

SEQ ID NO: 4254 - protein, 235 aa, Homo sapiens
MQRLGATLLCLLLAAAVPTAPAPAPTATSAPVKPGPALSYPQEEATLNEMFREVEELMEDTQHKLRSAVEEMEAEEAAAKASSEVNLANLPPSYHNETNTDTKVGNNTIHVHREIHKITNNQTGQMVFSETVITSVGDEEGRRSHECIIDEDCGPSMYCQFASFQYTCQPCRGQRMLCTRDSECCGDQLCVWGHCTKMATRGSNGTICDNQRDCQPGLCCAFQRGLLFPVCTPLP

SEQ ID NO: 4255 - protein, 350 aa, Homo sapiens
MQRLGATLLCLLLAAAVPTAPAPAPTATSAPVKPGPALSYPQEEATLNEMFREVEELMEDTQHKLRSAVEEMEAEEAAAKASSEVNLANLPPSYHNETNTDTKVGNNTIHVHREIHKITNNQTGQMVFSETVITSVGDEEGRRSHECIIDEDCGPSMYCQFASFQYTCQPCRGQRMLCTRDSECCGDQLCVWGHCTKMATRGSNGTICDNQRDCQPGLCCAFQRGLLFPVCTPLPVEGELCHDPASRLLDLITWELEPDGALDRCPCASGLLCQPHSHSLVYVCKPTFVGSRDQDGEILLPREVPDEYEVGSFMEEVRQELEDLERSLTEEMALREPAAAAAALLGGEEI

SEQ ID NO: 4256 - protein, 350 aa, Homo sapiens; identical to SEQ ID NO: 4255

SEQ ID NO: 4257 - protein, 364 aa, Homo sapiens
MQRLGATLLCLLLAAAVPTAPAPAPTATSAPVKPGPALSYPQEEATLNEMFREVEELMEDTQHKLRSAVEEMEAEEAAAKASSEVNLANLPPSYHNETNTDTKVGNNTIHVHREIHKITNNQTGQMVFSETVITSVGDEEGRRSHECIIDEDCGPSMYCQFASFQYTCQPCRGQRMLCTRDSECCGDQLCVWGHCTKMATRGSNGTICDNQRDCQPGLCCAFQRGLLFPVCTPLPVEGELCHDPASRLLDLITWELEPDGALDRCPCASGLLCQPHRLPRLEPGFVPSLPSHSLVYVCKPTFVGSRDQDGEILLPREVPDEYEVGSFMEEVRQELEDLERSLTEEMALREPAAAAAALLGGEEI

SEQ ID NO: 4258 - protein, 224 aa, Homo sapiens
MVAAVLLGLSWLCSPLGALVLDFNNIRSSADLHGARKGSQCLSDTDCNTRKFCLQPRDEKPFCATCRGLRRRCQRDAMCCPGTLCVNDVCTTMEDATPILERQLDEQDGTHAEGTTGHPVQENQPKRKPSIKKSQGRKGQEGESCLRTFDCGPGLCCARHFWTKICKPVLLEGQVCSRRGHKDTAQAPEIFQRCDCGPGLLCRSQLTSNRQHARLRVCQKIEKL

SEQ ID NO: 4259 - protein, 125 aa, Homo sapiens
MDFRGLPGNYHKEENQEHQLGNNTLSSHLQIDKMTDNKTGEVLISENVVASIQPAEGSFEGDLKVPRMEEKEALVPIQKATDSFHTELHPRVAFWIIKLPRRRSHQDALEGGHWLSEKRHRLQAI

SEQ ID NO: 4260 - protein, 146 aa, Homo sapiens
MDFRGLPGNYHKEENQEHQLGNNTLSSHLQIDKMTDNKTGEVLISENVVASIQPAEGSFEGDLKVPRMEEKEALVPIQKATDSFHTELHPRVAFWIIKLPRRRSHQDALEGGHWLSEKRHRLQAIRDGLRKGTHKDVLEEGTESSS

SEQ ID NO: 4261 - protein, 100 aa, Homo sapiens
MEEKEALVPIQKATDSFHTELHPRVAFWIIKLPRRRSHQDALEGGHWLSEKRHRLQAIRDGLRKGTHKDVLEEGTESSSHSRLSPRKTHLLYILRPSRQL

SEQ ID NO: 4262 - protein, 242 aa, Homo sapiens
MGEASPPAPARRHLLVLLLLLSTLVIPSAAAPIHDADAQESSLGLTGLQSLLQGFSRLFLKGNLLRGIDSLFSAPMDFRGLPGNYHKEENQEHQLGNNTLSSHLQIDKMTDNKTGEVLISENVVASIQPAEGSFEGDLKVPRMEEKEALVPIQKATDSFHTELHPRVAFWIIKLPRRRSHQDALEGGHWLSEKRHRLQAIRDGLRKGTHKDVLEEGTESSSHSRLSPRKTHLLYILRPSRQL

SEQ ID NO: 4263 - protein, 199 aa, Homo sapiens
MGEASPPAPARRHLLVLLLLLSTLVIPSAAAPIHDADAQESSLGLTGLQSLLQGFSRLFLKGNLLRGIDSLFSAPMDFRGLPGNYHKEENQEHQLGNNTLSSHLQIDKVPRMEEKEALVPIQKATDSFHTELHPRVAFWIIKLPRRRSHQDALEGGHWLSEKRHRLQAIRDGLRKGTHKDVLEEGTESSSHSRLSPRKT

SEQ ID NO: 4264 - protein, 137 aa, Homo sapiens
  SITE 1: note = misc_feature - Xaa can be any naturally occurring amino acid
XAAAPIHDADAQESSLGLTGLQSLLQGFSRLFLKVPRMEEKEALVPIQKATDSFHTELHPRVAFWIIKLPRRRSHQDALEGGHWLSEKRHRLQAIRDGLRKGTHKDVLEEGTESSSHSRLSPRKTHLLYILRPSRQL

SEQ ID NO: 4265 - protein, 724 aa, Homo sapiens
MDCLCIVTTKKYRYQDEDTPPLEHSPAHLPNQANSPPVIVNTDTLEAPGYELQVNGTEGEMEYEEITLERGNSGLGFSIAGGTDNPHIGDDPSIFITKIIPGGAAAQDGRLRVNDSILFVNEVDVREVTHSAAVEALKEAGSIVRLYVMRRKPPAEKVMEIKLIKGPKGLGFSIAGGVGNQHIPGDNSIYVTKIIEGGAAHKDGRLQIGDKILAVNSVGLEDVMHEDAVAALKNTYDVVYLKVAKPSNAYLSDSYAPPDITTSYSQHLDNEISHSSYLGTDYPTAMTPTSPRRYSPVAKDLLGEEDIPREPRRIVIHRGSTGLGFNIVGGEDGEGIFISFILAGGPADLSGELRKGDQILSVNGVDLRNASHEQAAIALKNAGQTVTIIAQYKPEEYSRFEAKIHDLREQLMNSSLGSGTASLRSNPKRGFYIRALFDYDKTKDCGFLSQALSFRFGDVLHVIDASDEEWWQARRVHSDSETDDIGFIPSKRRVERREWSRLKAKDWGSSSGSQGREDSVLSYETVTQMEVHYARPIIILGPTKDRANDDLLSEFPDKFGSCVPHTTRPKREYEIDGRDYHFVSSREKMEKDIQAHKFIEAGQYNSHLYGTSVQSVREVAEQGKHCILDVSANAVRRLQAAHLHPIAIFIRPRSLENVLEINKRITEEQARKAFDRATKLEQEFTECFSAIVEGDSFEEIYHKVKRVIEDLSGPYIWVPARERL

SEQ ID NO: 4266 - protein, 721 aa, Homo sapiens
MDCLCIVTTKKYRYQDEDTPPLEHSPAHLPNQANSPPVIVNTDTLEAPGYVNGTEGEMEYEEITLERGNSGLGFSIAGGTDNPHIGDDPSIFITKIIPGGAAAQDGRLRVNDSILFVNEVDVREVTHSAAVEALKEAGSIVRLYVMRRKPPAEKVMEIKLIKGPKGLGFSIAGGVGNQHIPGDNSIYVTKIIEGGAAHKDGRLQIGDKILAVNSVGLEDVMHEDAVAALKNTYDVVYLKVAKPSNAYLSDSYAPPDITTSYSQHLDNEISHSSYLGTDYPTAMTPTSPRRYSPVAKDLLGEEDIPREPRRIVIHRGSTGLGFNIVGGEDGEGIFISFILAGGPADLSGELRKGDQILSVNGVDLRNASHEQAAIALKNAGQTVTIIAQYKPEEYSRFEAKIHDLREQLMNSSLGSGTASLRSNPKRGFYIRALFDYDKTKDCGFLSQALSFRFGDVLHVIDASDEEWWQARRVHSDSETDDIGFIPSKRRVERREWSRLKAKDWGSSSGSQGREDSVLSYETVTQMEVHYARPIIILGPTKDRANDDLLSEFPDKFGSCVPHTTRPKREYEIDGRDYHFVSSREKMEKDIQAHKFIEAGQYNSHLYGTSVQSVREVAEQGKHCILDVSANAVRRLQAAHLHPIAIFIRPRSLENVLEINKRITEEQARKAFDRATKLEQEFTECFSAIVEGDSFEEIYHKVKRVIEDLSGPYIWVPARERL

SEQ ID NO: 4267 - protein, 296 aa, Homo sapiens
MDCLCIVTTKKYRYQDEDTPPLEHSPAHLPNQANSPPVIVNTDTLEAPGYVNGTEGEMEYEEITLERGNSGLGFSIAGGTDNPHIGDDPSIFITKIIPGGAAAQDGRLRVNDSILFVNEVDVREVTHSAAVEALKEAGSIVRLYVMRRKPPAEKVMEIKLIKGPKGLGFSIAGGVGNQHIPGDNSIYVTKIIEGGAAHKDGRLQIGDKILAVNSVGLEDVMHEDAVAALKNTYDVVYLKVAKPSNAYLSDSYAPPDITTCESPSNTKVPHDPSRLTHDMQSHDIPVAVPLQIFPMK

SEQ ID NO: 4268 - protein, 234 aa, Homo sapiens
MDCLCIVTTKKYRYQDEDTPPLEHSPAHLPNQVNAPELVHVAERNLSHLEAGHGVVGHAHLSPFKANSPPVIVNTDTLEAPGYVNGTEGEMEYEEITLERGNSGLGFSIAGGTDNPHIGDDPSIFITKIIPGGAAAQDGRLRVNDSILFVNEVDVREVTHSAAVEALKEAGSIVRLYVMRRKPPAEKVMEIKLIKGPKGLGFSIAGGVGNQHIPGDNSIYVTKIIEGGAAHKDG

SEQ ID NO: 4269 - protein, 91 aa, Homo sapiens
MEYEEITLERGNSGLGFSIAGGTDNPHIGDDPSIFITKIIPGGAAAQDGRLRVNDSILFVNEVDVREVTHSAAVEALKEAGSIVRLYVMRR

SEQ ID NO: 4270 - protein, 116 aa, Homo sapiens
MEYEEITLERGNSGLGFSIAGGTDNPHIGDDPSIFITKIIPGGAAAQDGRLRVNDSILFVNEVDVREVTHSAAVEALKEAGSIVRLYVMRRKPPAEKVMEIKLIKGPKGLGFSIAG

SEQ ID NO: 4271 - protein, 281 aa, Homo sapiens
MPINGVNLAWKYRYQDEDTPPLEHSPAHLPNQVNAPELVHVAERNLSHLEAGHGVVGHAHLSPFKANSPPVIVNTDTLEAPGYELQVNGTEGEMEYEEITLERGNSGLGFSIAGGTDNPHIGDDPSIFITKIIPGGAAAQDGRLRVNDSILFVNEVDVREVTHSAAVEALKEAGSIVRLYVMRRKPPAEKVMEIKLIKGPKGLGFSIAGGVGNQHIPGDNSIYVTKIIEGGAAHKDGRLQIGDKILAVNSVGLEDVMHEDAVAALKNTYDVVYLKVAKPSN

SEQ ID NO: 4272 - protein, 767 aa, Homo sapiens
MSQRPRAPRSALWLLAPPLLRWAPPLLTVLHSDLFQALLDILDYYEASLSESQKYRYQDEDTPPLEHSPAHLPNQANSPPVIVNTDTLEAPGYELQVNGTEGEMEYEEITLERGNSGLGFSIAGGTDNPHIGDDPSIFITKIIPGGAAAQDGRLRVNDSILFVNEVDVREVTHSAAVEALKEAGSIVRLYVMRRKPPAEKVMEIKLIKGPKGLGFSIAGGVGNQHIPGDNSIYVTKIIEGGAAHKDGRLQIGDKILAVNSVGLEDVMHEDAVAALKNTYDVVYLKVAKPSNAYLSDSYAPPDITTSYSQHLDNEISHSSYLGTDYPTAMTPTSPRRYSPVAKDLLGEEDIPREPRRIVIHRGSTGLGFNIVGGEDGEGIFISFILAGGPADLSGELRKGDQILSVNGVDLRNASHEQAAIALKNAGQTVTIIAQYKPEEYSRFEAKIHDLREQLMNSSLGSGTASLRSNPKRGFYIRALFDYDKTKDCGFLSQALSFRFGDVLHVIDASDEEWWQARRVHSDSETDDIGFIPSKRRVERREWSRLKAKDWGSSSGSQGREDSVLSYETVTQMEVHYARPIIILGPTKDRANDDLLSEFPDKFGSCVPHTTRPKREYEIDGRDYHFVSSREKMEKDIQAHKFIEAGQYNSHLYGTSVQSVREVAEQGKHCILDVSANAVRRLQAAHLHPIAIFIRPRSLENVLEINKRITEEQARKAFDRATKLEQEFTECFSAIVEGDSFEEIYHKVKRVIEDLSGPYIWVPARERL

SEQ ID NO: 4273 - protein, 85 aa, Homo sapiens
  SITE 1: note = misc_feature - Xaa can be any naturally occurring amino acid
XGPTKDRANDDLLSEFPDKFGSCVPHTTRPKREYEIDGRDYHFVSSREKMEKDIQAHKFIEAGQYNSHLYGTSVQSVREVAEQRD

SEQ ID NO: 4274 - protein, 97 aa, Homo sapiens
MTATEALLRVLLLLLAFGHSTYGAECFPACNPQNGFCEDDNVCRCQPGWQGPLCDQCVTSPGCLHGLCGEPGQCICTDGWDGELCDRDVRACSSAPC

SEQ ID NO: 4275 - protein, 310 aa, Homo sapiens
MTATEALLRVLLLLLAFGHSTYGAECFPACNPQNGFCEDDNVCRCQPGWQGPLCDQCVTSPGCLHGLCGEPGQCICTDGWDGELCDRDVRACSSAPCANNRTCVSLDDGLYECSCAPGYSGKDCQKKDGPCVINGSPCQHGGTCVDDEGRASHASCLCPPGFSGNFCEIVANSCTPNPCENDGVCTDIGGDFRCRCPAGFIDKTCSRPVTNCASSPCQNGGTCLQHTQGQAICFTILGVLTSLVVLGTVGIVFLNKCETWVSNLRYNHMLRKKKNLLLQYNSGEDLAVNIIFPEKIDMTTFSKEAGDEEI

SEQ ID NO: 4276 - protein, 383 aa, Homo sapiens
MTATEALLRVLLLLLAFGHSTYGAECFPACNPQNGFCEDDNVCRCQPGWQGPLCDQCVTSPGCLHGLCGEPGQCICTDGWDGELCDRDVRACSSAPCANNRTCVSLDDGLYECSCAPGYSGKDCQKKDGPCVINGSPCQHGGTCVDDEGRASHASCLCPPGFSGNFCEIVANSCTPNPCENDGVCTDIGGDFRCRCPAGFIDKTCSRPVTNCASSPCQNGGTCLQHTQVSYECLCKPEFTGLTCVKKRALSPQQVTRLPSGYGLAYRLTPGVHELPVQQPEHRILKVSMKELNKKTPLLTEGQAICFTILGVLTSLVVLGTVGIVFLNKCETWVSNLRYNHMLRKKKNLLLQYNSGEDLAVNIIFPEKIDMTTFSKEAGDEEI

SEQ ID NO: 4277 - protein, 136 aa, Homo sapiens
MTATEALLRVLLLLLAFGHSTYGAECFPACNPQNGFCEDDNVCRCQPGWQGPLCDQCVTSPGCLHGLCGEPGQCICTDGWDGELCDRGWHSPLFTSALRPYLPALAPTTSSQSPVAGVPHFLIPAHSVPCILKICL

SEQ ID NO: 4278 - protein, 54 aa, Homo sapiens
MGSRCALALAVLSALLCQVWSSGVFELKLQEFVNKKGLLGNRNCCRGGAGPPPC

SEQ ID NO: 4279 - protein, 723 aa, Homo sapiens
MGSRCALALAVLSALLCQVWSSGVFELKLQEFVNKKGLLGNRNCCRGGAGPPPCACRTFFRVCLKHYQASVSPEPPCTYGSAVTPVLGVDSFSLPDGGGADSAFSNPIRFPFGFTWPGTFSLIIEALHTDSPDDLATENPERLISRLATQRHLTVGEEWSQDLHSSGRTDLKYSYRFVCDEHYYGEGCSVFCRPRDDAFGHFTCGERGEKVCNPGWKGPYCTEPICLPGCDEQHGFCDKPGECKCRVGWQGRYCDECIRYPGCLHGTCQQPWQCNCQEGWGGLFCNQDLNYCTHHKPCKNGATCTNTGQGSYTCSCRPGYTGATCELGIDECDPSPCKNGGSCTDLENSYSCTCPPGFYGKICELSAMTCADGPCFNGGRCSDSPDGGYSCRCPVGYSGFNCEKKIDYCSSSPCSNGAKCVDLGDAYLCRCQAGFSGRHCDDNVDDCASSPCANGGTCRDGVNDFSCTCPPGYTGRNCSAPVSRCEHAPCHNGATCHERGHRYVCECARGYGGPNCQFLLPELPPGPAVVDLTEKLEGQGGPFPWVAVCAGVILVLMLLLGCAAVVVCVRLRLQKHRPPADPCRGETETMNNLANCQREKDISVSIIGATQIKNTNKKADFHGDHSADKNGFKARYPAVDYNLVQDLKGDDTAVRDAHSKRDTKCQPQGSSGEEKGTPTTLRGGEASERKRPDSGCSTSKDTKYQSVYVISEEKDECVIATEV

SEQ ID NO: 4280 - protein, 220 aa, Homo sapiens
MVSPRMSGLLSQTVILALIFLPQTRPAGVFELQIHSFGPGPGPGAPRSPCSARLPCRLFFRVCLKPGLSEEAAESPCALGAALSARGPVYTEQPGAPAPDLPLPDGLLQVPFRDAWPGTFSFIIETWREELGDQIGGGLCLDLGHALRCRCRAGFAGPRCEHDLDDCAGRACANGGTCVEGGGAHRCSCALGFGGRDCRERADPCAARPCAHGGRCYAHF

SEQ ID NO: 4281 - protein, 618 aa, Homo sapiens
MVSPRMSGLLSQTVILALIFLPQTRPAGVFELQIHSFGPGPGPGAPRSPCSARLPCRLFFRVCLKPGLSEEAAESPCALGAALSARGPVYTEQPGAPAPDLPLPDGLLQVPFRDAWPGTFSFIIETWREELGDQIGGPAWSLLARVAGRRRLAAGGPWARDIQRAGAWELRFSYRARCEPPAVGTACTRLCRPRSAPSRCGPGLRPCAPLEDECEAPLVCRAGCSPEHGFCEQPGECRCLEGWTGPLCTVPVSTSSCLSPRGPSSATTGCLVPGPGPCDGNPCANGGSCSETPRSFECTCPRGFYGLRCEVSGVTCADGPCFNGGLCVGGADPDSAYICHCPPGFQGSNCEKRVDRCSLQPCRNGGLCLDLGHALRCRCRAGFAGPRCEHDLDDCAGRACANGGTCVEGGGAHRCSCALGFGGRDCRERADPCAARPCAHGGRCYAHFSGLVCACAPGYMGARCEFPVHPDGASALPAAPPGLRPGDPQRYLLPPALGLLVAAGVAGAALLLVHVRRRGHSQDAGSRLLAGTPEPSVHALPDALNNLRTQEGSGDGPSSSVDWNRPEDVDPQGIYVISAPSIYAREVATPLFPPLHTGRAGQRQHLLFPYPSSILSVK

SEQ ID NO: 4282 - protein, 587 aa, Homo sapiens
MVSPRMSGLLSQTVILALIFLPQTRPAGVFELQIHSFGPGPGPGAPRSPCSARLPCRLFFRVCLKPGLSEEAAESPCALGAALSARGPVYTEQPGAPAPDLPLPDGLLQVPFRDAWPGTFSFIIETWREELGDQIGGPAWSLLARVAGRRRLAAGGPWARDIQRAGAWELRFSYRARCEPPAVGTACTRLCRPRSAPSRCGPGLRPCAPLEDECEAPLVCRAGCSPEHGFCEQPGECRCLEGWTGPLCTVPVSTSSCLSPRGPSSATTGCLVPGPGPCDGNPCANGGSCSETPRSFECTCPRGFYGLRCEVSGVTCADGPCFNGGLCVGGADPDSAYICHCPPGFQGSNCEKRVDRCSLQPCRNGGLCLDLGHALRCRCRAGFAGPRCEHDLDDCAGRACANGGTCVEGGGAHRCSCALGFGGRDCRERADPCAARPCAHGGRCYAHFSGLVCACAPGYMGARCEFPVHPDGASALPAAPPGLRPGDPQRYLLPPALGLLVAAGVAGAALLLVHVRRRGHSQDAGSRLLAGTPEPSVHALPDALNNLRTQEGSGDGPSSSVDWNRPEDVDPQGIYVISAPSIYAREA

SEQ ID NO: 4283 - protein, 1785 aa, Homo sapiens
MGISTVILEMCLLWGQVLSTGGWIPRTTDYASLIPSEVPLDPTVAEGSPFPSESTLESTVAEGSPISLESTLESTVAEGSLIPSESTLESTVAEGSDSGLALRLVNGDGRCQGRVEILYRGSWGTVCDDSWDTNDANVVCRQLGCGWAMSAPGNAWFGQGSGPIALDDVRCSGHESYLWSCPHNGWLSHNCGHGEDAGVICSAAQPQSTLRPESWPVRISPPVPTEGSESSLALRLVNGGDRCRGRVEVLYRGSWGTVCDDYWDTNDANVVCRQLGCGWAMSAPGNAQFGQGSGPIVLDDVRCSGHESYLWSCPHNGWLTHNCGHSEDAGVICSAPQSRPTPSPDTWPTSHASTAGPESSLALRLVNGGDRCQGRVEVLYRGSWGTVCDDSWDTSDANVVCRQLGCGWATSAPGNARFGQGSGPIVLDDVRCSGYESYLWSCPHNGWLSHNCQHSEDAGVICSAAHSWSTPSPDTLPTITLPASTVGSESSLALRLVNGGDRCQGRVEVLYQGSWGTVCDDSWDTNDANVVCRQLGCGWAMSAPGNARFGQGSGPIVLDDVRCSGHESYLWSCPHNGWLSHNCGHSEDAGVICSASQSRPTPSPDTWPTSHASTAGSESSLALRLVNGGDRCQGRVEVLYRGSWGTVCDDYWDTNDANVVCRQLGCGWAMSAPGNARFGQGSGPIVLDDVRCSGHESYLWSCPHNGWLSHNCGHHEDAGVICSASQSQPTPSPDTWPTSHASTAGSESSLALRLVNGGDRCQGRVEVLYRGSWGTVCDDYWDTNDANVVCRQLGCGWATSAPGNARFGQGSGPIVLDDVRCSGHESYLWSCPHNGWLSHNCGHHEDAGVICSASQSQPTPSPDTWPTSRASTAGSESTLALRLVNGGDRCRGRVEVLYQGSWGTVCDDYWDTNDANVVCRQLGCGWAMSAPGNAQFGQGSGPIVLDDVRCSGHESYLWSCPHNGWLSHNCGHHEDAGVICSAAQSQSTPRPDTWLTTNLPALTVGSESSLALRLVNGGDRCRGRVEVLYRGSWGTVCDDSWDTNDANVVCRQLGCGWAMSAPGNARFGQGSGPIVLDDVRCSGNESYLWSCPHKGWLTHNCGHHEDAGVICSATQINSTTTDWWHPTTTTTARPSSNCGGFLFYASGTFSSPSYPAYYPNNAKCVWEIEVNSGYRINLGFSNLKLEAHHNCSFDYVEIFDGSLNSSLLLGKICNDTRQIFTSSYNRMTIHFRSDISFQNTGFLAWYNSFPSDATLRLVNLNSSYGLCAGRVEIYHGGTWGTVCDDSWTIQEAEVVCRQLGCGRAVSALGNAYFGSGSGPITLDDVECSGTESTLWQCRNRGWFSHNCNHREDAGVICSGNHLSTPAPFLNITRPNTDYSCGGFLSQPSGDFSSPFYPGNYPNNAKCVWDIEVQNNYRVTVIFRDVQLEGGCNYDYIEVFDGPYRSSPLIARVCDGARGSFTSSSNFMSIRFISDHSITRRGFRAEYYSSPSNDSTNLLCLPNHMQASVSRSYLQSLGFSASDLVISTWNGYYECRPQITPNLVIFTIPYSGCGTFKQADNDTIDYSNFLTAAVSGGIIKRRTDLRIHVSCRMLQNTWVDTMYIANDTIHVANNTIQVEEVQYGNFDVNISFYTSSSFLYPVTSRPYYVDLNQDLYVQAEILHSDAVLTLFVDTCVASPYSNDFTSLTYDLIRSGCVRDDTYGPYSSPSLRIARFRFRAFHFLNRFPSVYLRCKMVVCRAYDPSSRCYRGCVLRSKRDVGSYQEKVDVVLGPIQLQTPPRREEEPR

SEQ ID NO: 4284 - protein, 2413 aa, Homo sapiens
MGISTVILEMCLLWGQVLSTGGWIPRTTDYASLIPSEVPLDPTVAEGSPFPSESTLESTVAEGSPISLESTLESTVAEGSLIPSESTLESTVAEGSDSGLALRLVNGDGRCQGRVEILYRGSWGTVCDDSWDTNDANVVCRQLGCGWAMSAPGNAWFGQGSGPIALDDVRCSGHESYLWSCPHNGWLSHNCGHGEDAGVICSAAQPQSTLRPESWPVRISPPVPTEGSESSLALRLVNGGDRCRGRVEVLYRGSWGTVCDDYWDTNDANVVCRQLGCGWAMSAPGNAQFGQGSGPIVLDDVRCSGHESYLWSCPHNGWLTHNCGHSEDAGVICSAPQSRPTPSPDTWPTSHASTAGPESSLALRLVNGGDRCQGRVEVLYRGSWGTVCDDSWDTSDANVVCRQLGCGWATSAPGNARFGQGSGPIVLDDVRCSGYESYLWSCPHNGWLSHNCQHSEDAGVICSAAHSWSTPSPDTLPTITLPASTVGSESSLALRLVNGGDRCQGRVEVLYRGSWGTVCDDSWDTNDANVVCRQLGCGWAMLAPGNARFGQGSGPIVLDDVRCSGNESYLWSCPHNGWLSHNCGHSEDAGVICSGPESSLALRLVNGGDRCQGRVEVLYRGSWGTVCDDSWDTNDANVVCRQLGCGWATSAPGNARFGQGSGPIVLDDVRCSGHESYLWSCPNNGWLSHNCGHHEDAGVICSAAQSRSTPRPDTLSTITLPPSTVGSESSLTLRLVNGSDRCQGRVEVLYRGSWGTVCDDSWDTNDANVVCRQLGCGWATSAPGNARFGQGSGPIVLDDVRCSGHESYLWSCPHNGWLSHNCGHHEDAGVICSVSQSRPTPSPDTWPTSHASTAGPESSLALRLVNGGDRCQGRVEVLYRGSWGTVCDDSWDTSDANVVCRQLGCGWATSAPGNARFGQGSGPIVLDDVRCSGYESYLWSCPHNGWLSHNCQHSEDAGVICSAAHSWSTPSPDTLPTITLPASTVGSESSLALRLVNGGDRCQGRVEVLYQGSWGTVCDDSWDTNDANVVCRQLGCGWAMSAPGNARFGQGSGPIVLDDVRCSGHESYLWSCPHNGWLSHNCGHSEDAGVICSASQSRPTPSPDTWPTSHASTAGSESSLALRLVNGGDRCQGRVEVLYRGSWGTVCDDYWDTNDANVVCRQLGCGWAMSAPGNARFGQGSGPIVLDDVRCSGHESYLWSCPHNGWLSHNCGHHEDAGVICSASQSQPTPSPDTWPTSHASTAGSESSLALRLVNGGDRCQGRVEVLYRGSWGTVCDDYWDTNDANVVCRQLGCGWATSAPGNARFGQGSGPIVLDDVRCSGHESYLWSCPHNGWLSHNCGHHEDAGVICSASQSQPTPSPDTWPTSHASTAGSESSLALRLVNGGDRCQGRVEVLYRGSWGTVCDDYWDTNDANVVCRQLGCGWATSAPGNARFGQGSGPIVLDDVRCSGHESYLWSCPHNGWLSHNCGHHEDAGVICSASQSQPTPSPDTWPTSRASTAGSESTLALRLVNGGDRCRGRVEVLYQGSWGTVCDDYWDTNDANVVCRQLGCGWAMSAPGNAQFGQGSGPIVLDDVRCSGHESYLWSCPHNGWLSHNCGHHEDAGVICSAAQSQSTPRPDTWLTTNLPALTVGSESSLALRLVNGGDRCRGRVEVLYRGSWGTVCDDSWDTNDANVVCRQLGCGWAMSAPGNARFGQGSGPIVLDDVRCSGNESYLWSCPHKGWLTHNCGHHEDAGVICSATQINSTTTDWWHPTTTTTARPSSNCGGFLFYASGTFSSPSYPAYYPNNAKCVWEIEVNSGYRINLGFSNLKLEAHHNCSFDYVEIFDGSLNSSLLLGKICNDTRQIFTSSYNRMTIHFRSDISFQNTGFLAWYNSFPSDATLRLVNLNSSYGLCAGRVEIYHGGTWGTVCDDSWTIQEAEVVCRQLGCGRAVSALGNAYFGSGSGPITLDDVECSGTESTLWQCRNRGWFSHNCNHREDAGVICSGNHLSTPAPFLNITRPNTDYSCGGFLSQPSGDFSSPFYPGNYPNNAKCVWDIEVQNNYRVTVIFRDVQLEGGCNYDYIEVFDGPYRSSPLIARVCDGARGSFTSSSNFMSIRFISDHSITRRGFRAEYYSSPSNDSTNLLCLPNHMQASVSRSYLQSLGFSASDLVISTWNGYYECRPQITPNLVIFTIPYSGCGTFKQADNDTIDYSNFLTAAVSGGIIKRRTDLRIHVSCRMLQNTWVDTMYIANDTIHVANNTIQVEEVQYGNFDVNISFYTSSSFLYPVTSRPYYVDLNQDLYVQAEILHSDAVLTLFVDTCVASPYSNDFTSLTYDLIRSGCVRDDTYGPYSSPSLRIARFRFRAFHFLNRFPSVYLRCKMVVCRAYDPSSRCYRGCVLRSKRDVGSYQEKVDVVLGPIQLQTPPRREEEPR

SEQ ID NO: 4285 - protein, 2403 aa, Homo sapiens
MGISTVILEMCLLWGQVLSTGGWIPRTTDYASLIPSEVPLDPTVAEGSPFPSESTLESTVAEGSPISLESTLESTVAEGSLIPSESTLESTVAEGSDSGLALRLVNGDGRCQGRVEILYRGSWGTVCDDSWDTNDANVVCRQLGCGWAMSAPGNAWFGQGSGPIALDDVRCSGHESYLWSCPHNGWLSHNCGHGEDAGVICSAAQPQSTLRPESWPVRISPPVPTEGSESSLALRLVNGGDRCRGRVEVLYRGSWGTVCDDYWDTNDANVVCRQLGCGWAMSAPGNAQFGQGSGPIVLDDVRCSGHESYLWSCPHNGWLTHNCGHSEDAGVICSAPQSRPTPSPDTWPTSHASTAGPESSLALRLVNGGDRCQGRVEVLYRGSWGTVCDDSWDTSDANVVCRQLGCGWATSAPGNARFGQGSGPIVLDDVRCSGYESYLWSCPHNGWLSHNCQHSEDAGVICSDTLPTITLPASTVGSESSLALRLVNGGDRCQGRVEVLYRGSWGTVCDDSWDTNDANVVCRQLGCGWAMLAPGNARFGQGSGPIVLDDVRCSGNESYLWSCPHNGWLSHNCGHSEDAGVICSGPESSLALRLVNGGDRCQGRVEVLYRGSWGTVCDDSWDTNDANVVCRQLGCGWATSAPGNARFGQGSGPIVLDDVRCSGHESYLWSCPNNGWLSHNCGHHEDAGVICSAAQSRSTPRPDTLSTITLPPSTVGSESSLTLRLVNGSDRCQGRVEVLYRGSWGTVCDDSWDTNDANVVCRQLGCGWATSAPGNARFGQGSGPIVLDDVRCSGHESYLWSCPHNGWLSHNCGHHEDAGVICSVSQSRPTPSPDTWPTSHASTAGPESSLALRLVNGGDRCQGRVEVLYRGSWGTVCDDSWDTSDANVVCRQLGCGWATSAPGNARFGQGSGPIVLDDVRCSGYESYLWSCPHNGWLSHNCQHSEDAGVICSAAHSWSTPSPDTLPTITLPASTVGSESSLALRLVNGGDRCQGRVEVLYQGSWGTVCDDSWDTNDANVVCRQLGCGWAMSAPGNARFGQGSGPIVLDDVRCSGHESYLWSCPHNGWLSHNCGHSEDAGVICSASQSRPTPSPDTWPTSHASTAGSESSLALRLVNGGDRCQGRVEVLYRGSWGTVCDDYWDTNDANVVCRQLGCGWAMSAPGNARFGQGSGPIVLDDVRCSGHESYLWSCPHNGWLSHNCGHHEDAGVICSASQSQPTPSPDTWPTSHASTAGSESSLALRLVNGGDRCQGRVEVLYRGSWGTVCDDYWDTNDANVVCRQLGCGWATSAPGNARFGQGSGPIVLDDVRCSGHESYLWSCPHNGWLSHNCGHHEDAGVICSASQSQPTPSPDTWPTSHASTAGSESSLALRLVNGGDRCQGRVEVLYRGSWGTVCDDYWDTNDANVVCRQLGCGWATSAPGNARFGQGSGPIVLDDVRCSGHESYLWSCPHNGWLSHNCGHHEDAGVICSASQSQPTPSPDTWPTSRASTAGSESTLALRLVNGGDRCRGRVEVLYQGSWGTVCDDYWDTNDANVVCRQLGCGWAMSAPGNAQFGQGSGPIVLDDVRCSGHESYLWSCPHNGWLSHNCGHHEDAGVICSAAQSQSTPRPDTWLTTNLPALTVGSESSLALRLVNGGDRCRGRVEVLYRGSWGTVCDDSWDTNDANVVCRQLGCGWAMSAPGNARFGQGSGPIVLDDVRCSGNESYLWSCPHKGWLTHNCGHHEDAGVICSATQINSTTTDWWHPTTTTTARPSSNCGGFLFYASGTFSSPSYPAYYPNNAKCVWEIEVNSGYRINLGFSNLKLEAHHNCSFDYVEIFDGSLNSSLLLGKICNDTRQIFTSSYNRMTIHFRSDISFQNTGFLAWYNSFPSDATLRLVNLNSSYGLCAGRVEIYHGGTWGTVCDDSWTIQEAEVVCRQLGCGRAVSALGNAYFGSGSGPITLDDVECSGTESTLWQCRNRGWFSHNCNHREDAGVICSGNHLSTPAPFLNITRPNTDYSCGGFLSQPSGDFSSPFYPGNYPNNAKCVWDIEVQNNYRVTVIFRDVQLEGGCNYDYIEVFDGPYRSSPLIARVCDGARGSFTSSSNFMSIRFISDHSITRRGFRAEYYSSPSNDSTNLLCLPNHMQASVSRSYLQSLGFSASDLVISTWNGYYECRPQITPNLVIFTIPYSGCGTFKQADNDTIDYSNFLTAAVSGGIIKRRTDLRIHVSCRMLQNTWVDTMYIANDTIHVANNTIQVEEVQYGNFDVNISFYTSSSFLYPVTSRPYYVDLNQDLYVQAEILHSDAVLTLFVDTCVASPYSNDFTSLTYDLIRSGCVRDDTYGPYSSPSLRIARFRFRAFHFLNRFPSVYLRCKMVVCRAYDPSSRCYRGCVLRSKRDVGSYQEKVDVVLGPIQLQTPPRREEEPR

SEQ ID NO: 4286 - protein, 2542 aa, Homo sapiens
MGISTVILEMCLLWGQVLSTGGWIPRTTDYASLIPSEVPLDPTVAEGSPFPSESTLESTVAEGSPISLESTLESTVAEGSLIPSESTLESTVAEGSDSGLALRLVNGDGRCQGRVEILYRGSWGTVCDDSWDTNDANVVCRQLGCGWAMSAPGNAWFGQGSGPIALDDVRCSGHESYLWSCPHNGWLSHNCGHGEDAGVICSAAQPQSTLRPESWPVRISPPVPTEGSESSLALRLVNGGDRCRGRVEVLYRGSWGTVCDDYWDTNDANVVCRQLGCGWAMSAPGNAQFGQGSGPIVLDDVRCSGHESYLWSCPHNGWLTHNCGHSEDAGVICSAPQSRPTPSPDTWPTSHASTAGPESSLALRLVNGGDRCQGRVEVLYRGSWGTVCDDSWDTSDANVVCRQLGCGWATSAPGNARFGQGSGPIVLDDVRCSGYESYLWSCPHNGWLSHNCQHSEDAGVICSAAHSWSTPSPDTLPTITLPASTVGSESSLALRLVNGGDRCQGRVEVLYRGSWGTVCDDSWDTNDANVVCRQLGCGWAMLAPGNARFGQGSGPIVLDDVRCSGNESYLWSCPHNGWLSHNCGHSEDAGVICSGPESSLALRLVNGGDRCQGRVEVLYRGSWGTVCDDSWDTNDANVVCRQLGCGWATSAPGNARFGQGSGPIVLDDVRCSGHESYLWSCPNNGWLSHNCGHHEDAGVICSAAQSRSTPRPDTLSTITLPPSTVGSESSLTLRLVNGSDRCQGRVEVLYRGSWGTVCDDSWDTNDANVVCRQLGCGWATSAPGNARFGQGSGPIVLDDVRCSGHESYLWSCPHNGWLSHNCGHHEDAGVICSVSQSRPTPSPDTWPTSHASTAGPESSLALRLVNGGDRCQGRVEVLYRGSWGTVCDDSWDTSDANVVCRQLGCGWATSAPGNARFGQGSGPIVLDDVRCSGYESYLWSCPHNGWLSHNCQHSEDAGVICSAAHSWSTPSPDTLPTITLPASTVGSESSLALRLVNGGDRCQGRVEVLYQGSWGTVCDDSWDTNDANVVCRQLGCGWAMSAPGNARFGQGSGPIVLDDVRCSGHESYLWSCPHNGWLSHNCGHSEDAGVICSASQSRPTPSPDTWPTSHASTAGSESSLALRLVNGGDRCQGRVEVLYRGSWGTVCDDYWDTNDANVVCRQLGCGWAMSAPGNARFGQGSGPIVLDDVRCSGHESYLWSCPHNGWLSHNCGHHEDAGVICSASQSQPTPSPDTWPTSHASTAGSESSLALRLVNGGDRCQGRVEVLYRGSWGTVCDDYWDTNDANVVCRQLGCGWATSAPGNARFGQGSGPIVLDDVRCSGHESYLWSCPHNGWLSHNCGHHEDAGVICSASQSQPTPSPDTWPTSHASTAGSESSLALRLVNGGDRCQGRVEVLYRGSWGTVCDDYWDTNDANVVCRQLGCGWATSAPGNARFGQGSGPIVLDDVRCSGHESYLWSCPHNGWLSHNCGHHEDAGVICSASQSQPTPSPDTWPTSHASTAGSESSLALRLVNGGDRCQGRVEVLYRGSWGTVCDDYWDTNDANVVCRQLGCGWATSAPGNARFGQGSGPIVLDDVRCSGHESYLWSCPHNGWLSHNCGHHEDAGVICSASQSQPTPSPDTWPTSRASTAGSESTLALRLVNGGDRCRGRVEVLYQGSWGTVCDDYWDTNDANVVCRQLGCGWAMSAPGNAQFGQGSGPIVLDDVRCSGHESYLWSCPHNGWLSHNCGHHEDAGVICSAAQSQSTPRPDTWLTTNLPALTVGSESSLALRLVNGGDRCRGRVEVLYRGSWGTVCDDSWDTNDANVVCRQLGCGWAMSAPGNARFGQGSGPIVLDDVRCSGNESYLWSCPHKGWLTHNCGHHEDAGVICSATQINSTTTDWWHPTTTTTARPSSNCGGFLFYASGTFSSPSYPAYYPNNAKCVWEIEVNSGYRINLGFSNLKLEAHHNCSFDYVEIFDGSLNSSLLLGKICNDTRQIFTSSYNRMTIHFRSDISFQNTGFLAWYNSFPSDATLRLVNLNSSYGLCAGRVEIYHGGTWGTVCDDSWTIQEAEVVCRQLGCGRAVSALGNAYFGSGSGPITLDDVECSGTESTLWQCRNRGWFSHNCNHREDAGVICSGNHLSTPAPFLNITRPNTDYSCGGFLSQPSGDFSSPFYPGNYPNNAKCVWDIEVQNNYRVTVIFRDVQLEGGCNYDYIEVFDGPYRSSPLIARVCDGARGSFTSSSNFMSIRFISDHSITRRGFRAEYYSSPSNDSTNLLCLPNHMQASVSRSYLQSLGFSASDLVISTWNGYYECRPQITPNLVIFTIPYSGCGTFKQADNDTIDYSNFLTAAVSGGIIKRRTDLRIHVSCRMLQNTWVDTMYIANDTIHVANNTIQVEEVQYGNFDVNISFYTSSSFLYPVTSRPYYVDLNQDLYVQAEILHSDAVLTLFVDTCVASPYSNDFTSLTYDLIRSGCVRDDTYGPYSSPSLRIARFRFRAFHFLNRFPSVYLRCKMVVCRAYDPSSRCYRGCVLRSKRDVGSYQEKVDVVLGPIQLQTPPRREEEPR

SEQ ID NO: 4287 - protein, 1785 aa, Homo sapiens; identical to SEQ ID NO: 4283

SEQ ID NO: 4288 - protein, 2403 aa, Homo sapiens; identical to SEQ ID NO: 4285

SEQ ID NO: 4289 - protein, 2413 aa, Homo sapiens; identical to SEQ ID NO: 4284

SEQ ID NO: 4290 - protein, 33 aa, Homo sapiens
MFNFDTFWKNFKSKLGFINWDAINKDQRSSRIP

SEQ ID NO: 4291 - protein, 33 aa, Homo sapiens; identical to SEQ ID NO: 4290

SEQ ID NO: 4292 - protein, 95 aa, Homo sapiens
MFNFDTFWKNFKSKLGFINWDAINKNQVPPPSTRALLYFSRLWEDFKQNTPFLNWKAIIEGADASSLQKRAGRDDQNYNYNQHAYPTAYGGKYSV

SEQ ID NO: 4293 - protein, 123 aa, Homo sapiens
MFNFDTFWKNFKSKLGFINWDAINKNQVPPPSTRALLYFSRLWEDFKQNTPFLNWKAIIEGADASSLQKRAGRDDQNYNYNQHAYPTAYGGKYSVKTPAKGGVSPSSSASRVQPGLLQWVKFW

SEQ ID NO: 4294 - protein, 123 aa, Homo sapiens; identical to SEQ ID NO: 4293

SEQ ID NO: 4295 - protein, 476 aa, Homo sapiens
MKFQGPLACLLLALCLGSGEAGPLQSGEESTGTNIGEALGHGLGDALSEGVGKAIGKEAGGAAGSKVSEALGQGTREAVGTGVRQVPGFGVADALGNRVGEAAHALGNTGHEIGRQAEDVIRHGADAVRGSWQGVPGHNGAWETSGGHGIFGSQGGLGGQGQGNPGGLGTPWVHGYPGNSAGSFGMNPQGAPWGQGGNGGPPNFGTNTQGAVAQPGYGSVRASNQNEGCTNPPPSGSGGGSSNSGGGSGSQSGSSGSGSNGDNNNGSSSGGSSSGSSSGGSSGGSSGGSSGNSGGSRGDSGSESSWGSSTGSSSGNHGGSGGGNGHKPGCEKPGNEARGSGESGIQNSETSPGMFNFDTFWKNFKSKLGFINWDAINKNQVPPPSTRALLYFSRLWEDFKQNTPFLNWKAIIEGADASSLQKRAGRDDQNYNYNQHAYPTAYGGKYSVKTPAKGGVSPSSSASRVQPGLLQWVKFW

SEQ ID NO: 4296 - protein, 386 aa, Homo sapiens
MKFQGPLACLLLALCLGSGEAGPLQSGEESTGTNIGEALGHGLGDALSEGVGKAIGKEAGGAAGSKVSEALGQGTREAVGTGVRQVPGFGVADALGNRVGEAAHALGNTGHEIGRQAEDVIRHGADAVRGSWQGVPGHNGAWETSGGHGIFGSQGGLGGQGQGNPGGLGTPWVHGYPGNSAGSFGMNPQGAPWGQGGNGGPPNFGTNTQGAVAQPGYGSVRASNQNEGCTNPPPSGSGGGSSNSGGGSGSQSGSSGSGSNGDNNNGSSSGGSSSGSSSGGSSGGSSGGSSGNSGGSRGDSGSESSWGSSTGSSSGNHGGSGGGNGHKPGCEKPGNEARGSGESGIQNSETSPGMFNFDTFWKNFKSKLGFINWDAINKDQRSSRIP

SEQ ID NO: 4297 - protein, 436 aa, Homo sapiens
MKFQGPLACLLLALCLGSGEAGPLQSGEESTGTNIGEALGHGLGDALSEGVGKAIGKEAGGAAGSKVSEALGQGTREAVGTGVRQVPGFGVADALGNRVGEAAHALGNTGHEIGRQAEDVIRHGADAVRGSWQGVPGHNGAWETSGGHGIFGSQGGLGGQGQGNPGGLGTPWVHGYPGNSAGSFGMNPQGAPWGQGGNGGPPNFGTNTQGAVAQPGYGSVRASNQNEGCTNPPPSGSGGGSSNSGGGSGSQSGSSGSGSNGDNNNGSSSGGSSSGSSSGGSSGGSSGGSSGNSGGSRGDSGSESSWGSSTGSSSGNHGGSGGGNGHKPGCEKPGNEARGSGESGIQGFRGQGVSSNMREISKEGNRLLGGSGDNYRGQGSSWGSGGGDAVGGVNTVNSETSPGMFNFDTFWKNFKSKLGFINWDAINKDQRSSRIP

SEQ ID NO: 4298 - protein, 398 aa, Homo sapiens
MKFQGPLACLLLALCLGSGEAGPLQSGEESTGTNIGEALGHGLGDALSEGVGKAIGKEAGGAAGSKVSEALGQGTREAVGTGVRQVPGFGVADALGNRVGEAAHALGNTGHEIGRQAEDVIRHGADAVRGSWQGVPGHNGAWETSGGHGIFGSQGGLGGQGQGNPGGLGTPWVHGYPGNSAGSFGMNPQGAPWGQGGNGGPPNFGTNTQGAVAQPGYGSVRASNQNEGCTNPPPSGSGGGSSNSGGGSGSQSGSSGSGSNGDNNNGSSSGGSSSGSSSGGSSGGSSGGSSGNSGGSRGDSGSESSWGSSTGSSSGNHGGSGGGNGHKPGCEKPGNEARGSGESGIQGFRGQGVSSNMRNSETSPGMFNFDTFWKNFKSKLGFINWDAINKDQRSSRIP

SEQ ID NO: 4299 - protein, 369 aa, Homo sapiens
MKFQGPLACLLLALCLGSGEAGPLQSGEESTGTNIGEALGHGLGDALSEGVGKAIGKEAGGAAGSKVSEALGQGTREAVGTGVRQVPGFGVADALGNRVGEAAHALGNTGHEIGRQAEDVIRHGADAVRGSWQGVPGHNGAWETSGGHGIFGSQGGLGGQGQGNPGGLGTPWVHGYPGNSAGSFGMNPQGAPWGQGGNGGPPNFGTNTQGAVAQPGYGSVRASNQNEGCTNPPPSGSGGGSSNSGGGSGSQSGSSGSGSNGDNNNGSSSGGSSSGSSSGGSSGGSSGGSSGNSGGSRGDSGSESSWGSSTGSSSGNHGGSGGGNGHKPGNSETSPGMFNFDTFWKNFKSKLGFINWDAINKDQRSSRIP

SEQ ID NO: 4300 - protein, 449 aa, Homo sapiens
MKFQGPLACLLLALCLGSGEAGPLQSGEESTGTNIGEALGHGLGDALSEGVGKAIGKEAGGAAGSKVSEALGQGTREAVGTGVRQVPGFGVADALGNRVGEAAHALGNTGHEIGRQAEDVIRHGADAVRGSWQGVPGHNGAWETSGGHGIFGSQGGLGGQGQGNPGGLGTPWVHGYPGNSAGSFGMNPQGAPWGQGGNGGPPNFGTNTQGAVAQPGYGSVRASNQNEGCTNPPPSGSGGGSSNSGGSSTGSSSGNHGGSGGGNGHKPGCEKPGNEARGSGESGIQGQGSSWGSGGGDAVGGVNTVNSETSPGMFNFDTFWKNFKSKLGFINWDAINKNQVPPPSTRALLYFSRLWEDFKQNTPFLNWKAIIEGADASSLQKRAGRDDQPGAGWQEVAAVTSKNYNYNQHAYPTAYGGKYSVKTPAKGGVSPSSSASRVQPGLLQWVKFW

SEQ ID NO: 4301 - protein, 465 aa, Homo sapiens
MKFQGPLACLLLALCLGSGEAGPLQSGEESTGTNIGEALGHGLGDALSEGVGKAIGKEAGGAAGSKVSEALGQGTREAVGTGVRQVPGFGVADALGNRVGEAAHALGNTGHEIGRQAEDVIRHGADAVRGSWQGVPGHNGAWETSGGHGIFGSQGGLGGQGQGNPGGLGTPWVHGYPGNSAGSFGMNPQGAPWGQGGNGGPPNFGTNTQGAVAQPGYGSVRASNQNEGCTNPPPSGSGGGSSNSGGSSTGSSSGNHGGSGGGNGHKPGCEKPGNEARGSGESGIQGFRGQGVSSNMREISKEGNRLLGGSGDNYRGQGSSWGSGGGDAVGGVNTVNSETSPGMFNFDTFWKNFKSKLGFINWDAINKNQVPPPSTRALLYFSRLWEDFKQNTPFLNWKAIIEGADASSLQKRAGRDDQNYNYNQHAYPTAYGGKYSVKTPAKGGVSPSSSASRVQPGLLQWVKFW

SEQ ID NO: 4302 - protein, 36 aa, Homo sapiens
MLGITSCSDQQAKEGEGIQHRLLLRQPRWERRRKWT

SEQ ID NO: 4303 - protein, 36 aa, Homo sapiens; identical to SEQ ID NO: 4302

SEQ ID NO: 4304 - protein, 36 aa, Homo sapiens; identical to SEQ ID NO: 4302

SEQ ID NO: 4305 - protein, 36 aa, Homo sapiens; identical to SEQ ID NO: 4302

SEQ ID NO: 4306 - protein, 36 aa, Homo sapiens; identical to SEQ ID NO: 4302

SEQ ID NO: 4307 - protein, 36 aa, Homo sapiens; identical to SEQ ID NO: 4302

SEQ ID NO: 4308 - protein, 36 aa, Homo sapiens; identical to SEQ ID NO: 4302

SEQ ID NO: 4309 - protein, 36 aa, Homo sapiens; identical to SEQ ID NO: 4302

SEQ ID NO: 4310 - protein, 36 aa, Homo sapiens; identical to SEQ ID NO: 4302

SEQ ID NO: 4311 - protein, 36 aa, Homo sapiens; identical to SEQ ID NO: 4302

SEQ ID NO: 4312 - protein, 36 aa, Homo sapiens; identical to SEQ ID NO: 4302

SEQ ID NO: 4313 - protein, 36 aa, Homo sapiens; identical to SEQ ID NO: 4302

SEQ ID NO: 4314 - protein, 36 aa, Homo sapiens; identical to SEQ ID NO: 4302

SEQ ID NO: 4315 - protein, 36 aa, Homo sapiens; identical to SEQ ID NO: 4302

SEQ ID NO: 4316 - protein, 36 aa, Homo sapiens; identical to SEQ ID NO: 4302

SEQ ID NO: 4317 - protein, 36 aa, Homo sapiens; identical to SEQ ID NO: 4302

SEQ ID NO: 4318 - protein, 36 aa, Homo sapiens; identical to SEQ ID NO: 4302

SEQ ID NO: 4319 - protein, 253 aa, Homo sapiens
MLGITSCSDQQAKEGEGLEGSSTGSSSGNHGGSGGGNGHKPGCEKPGNEARGSGESGIQGFRGQGVSSNMREISKEGNRLLGGSGDNYRGQGSSWGSGGGDAVGGVNTVNSETSPGMFNFDTFWKNFKSKLGFINWDAINKNQVPPPSTRALLYFSRLWEDFKQNTPFLNWKAIIEGADASSLQKRAGRDDQPGAGWQEVAAVTSKNYNYNQHAYPTAYGGKYSVKTPAKGGVSPSSSASRVQPGLLQWVKFW

SEQ ID NO: 4320 - protein, 131 aa, Homo sapiens
MLGITSCSDQQAKEGEGLEGSSTGSSSGNHGGSGGGNGHKPGCEKPGNEARGSGESGIQGFRGQGVSSNMRGQGSSWGSGGGDAVGGVNTVNSETSPGMFNFDTFWKNFKSKLGFINWDAINKDQRSSRIP

SEQ ID NO: 4321 - protein, 201 aa, Homo sapiens
MLGITSCSDQQAKEGEGLEGSSTGSSSGNHGGSGGGNGHKPGCEKPGNEARGSGESGIQGFRGQGVSSNMRNSETSPGMFNFDTFWKNFKSKLGFINWDAINKNQVPPPSTRALLYFSRLWEDFKQNTPFLNWKAIIEGADASSLQKRAGRDDQNYNYNQHAYPTAYGGKYSVKTPAKGGVSPSSSASRVQPGLLQWVKFW

SEQ ID NO: 4322 - protein, 116 aa, Homo sapiens
MLGITSCSDQQAKEGEGLEGSSTGSSSGNHGGSGGGNGHKPGCEKPGNEARGSGESGIQGQGSSWGSGGGDAVGGVNTVNSETSPGMFNFDTFWKNFKSKLGFINWDAINKDQRSS

SEQ ID NO: 4323 - protein, 184 aa, Homo sapiens
MLGITSCSDQQAKEGEGLEGSSTGSSSGNHGGSGGGNGHKPGCEKPGNEARGSGESGIQNSETSPGMFNFDTFWKNFKSKLGFINWDAINKDFKQNTPFLNWKAIIEGADASSLQKRAGRDDQPGAGWQEVAAVTSKNYNYNQHAYPTAYGGKYSVKTPAKGGVSPSSSASRVQPGLLQWVKFW

SEQ ID NO: 4324 - protein, 99 aa, Homo sapiens
MLGITSCSDQQAKEGEGLEGSSTGSSSGNHGGSGGGNGHKPGCEKPGNEARGSGESGIQNSETSPGMFNFDTFWKNFKSKLGFINWDAINKDQRSSRIP

SEQ ID NO: 4325 - protein, 189 aa, Homo sapiens
MLGITSCSDQQAKEGEGLEGSSTGSSSGNHGGSGGGNGHKPGCEKPGNEARGSGESGIQNSETSPGMFNFDTFWKNFKSKLGFINWDAINKNQVPPPSTRALLYFSRLWEDFKQNTPFLNWKAIIEGADASSLQKRAGRDDQNYNYNQHAYPTAYGGKYSVKTPAKGGVSPSSSASRVQPGLLQWVKFW

SEQ ID NO: 4326 - protein, 203 aa, Homo sapiens
MLGITSCSDQQAKEGEGLEGSSTGSSSGNHGGSGGGNGHKPGCEKPGNEARGSGESGIQNSETSPGMFNFDTFWKNFKSKLGFINWDAINKNQVPPPSTRALLYFSRLWEDFKQNTPFLNWKAIIEGADASSLQKRAGRDDQPGAGWQEVAAVTSKNYNYNQHAYPTAYGGKYSVKTPAKGGVSPSSSASRVQPGLLQWVKFW

SEQ ID NO: 4327 - protein, 203 aa, Homo sapiens; identical to SEQ ID NO: 4326

SEQ ID NO: 4328 - protein, 82 aa, Homo sapiens
MLGITSCSDQQAKEGEGLEGSSTGSSSGNHGGSGGGNGHKPGNSETSPGMFNFDTFWKNFKSKLGFINWDAINKDQRSSRIP

SEQ ID NO: 4329 - protein, 172 aa, Homo sapiens
MLGITSCSDQQAKEGEGLEGSSTGSSSGNHGGSGGGNGHKPGNSETSPGMFNFDTFWKNFKSKLGFINWDAINKNQVPPPSTRALLYFSRLWEDFKQNTPFLNWKAIIEGADASSLQKRAGRDDQNYNYNQHAYPTAYGGKYSVKTPAKGGVSPSSSASRVQPGLLQWVKFW

SEQ ID NO: 4330 - protein, 90 aa, Homo sapiens
MNMKPATASALLLLLLGLAWTQGSHGWGADASSLQKRAGRDDQNYNYNQHAYPTAYGGKYSVKTPAKGGVSPSSSASRVQPGLLQWVKFW

SEQ ID NO: 4331 - protein, 36 aa, Homo sapiens
SGNHGGSGGGNGHKPGISRLWLTKWVLLSSHISLVP

SEQ ID NO: 4332 - protein, 152 aa, Homo sapiens
SSTGSSSGNHGGSGGGNGHKPGNSETSPGMFNFDTFWKNFKSKLGFINWDAINKNQVPPPSTRALLYFSRLWEDFKQNTPFLNWKAIIEGADASSLQKRAGRDDQNYNYNQHAYPTAYGGKYSVKTPAKGGVSPSSSASRVQPGLLQWVKFW

SEQ ID NO: 4333 - protein, 74 aa, Homo sapiens
  SITE 1: note = misc_feature - Xaa can be any naturally occurring amino acid
XALLLLLLGLAWTQGSHGWGADASSLQKRAGRDDQNYNYNQHAYPTAYGGKYSVKTPAKASRVQPGLLQWVKFW

SEQ ID NO: 4334 - protein, 201 aa, Homo sapiens
  SITE 1: note = misc_feature - Xaa can be any naturally occurring amino acid
XGGGNGHKPGCEKPGNEARGSGESGIQGFRGQGVSSNMREISKEGNRLLGGSGDNYRNSETSPGMFNFDTFWKNFKSKLGFINWDAINKNQVPPPSTRALLYFSRLWEDFKQNTPFLNWKAIIEGADASSLQKRAGRDDQPGAGWQEVAAVTSKNYNYNQHAYPTAYGGKYSVKTPAKGGVSPSSSASRVQPGLLQWVKFW

SEQ ID NO: 4335 - protein, 109 aa, Homo sapiens
  SITE 1: note = misc_feature - Xaa can be any naturally occurring amino acid
XPATASALLLLLLGLAWTQGSHGWVGTAGCTGCGRVITAETCRQRRSELQLQPACVSHCLWWEVLSQDPCKGGSLTFFLGFPGATWPAAVGEVLVGNFLQPPPRPRKAL

SEQ ID NO: 4336 - protein, 96 aa, Homo sapiens
  SITE 1: note = misc_feature - Xaa can be any naturally occurring amino acid
XPPPSTRALLYFSRLWEDFKQNTPFLNWKAIIEGADASSLQKRAGRDDQNYNYNQHAYPTAYGGKYSVKTPAKGGVSPSSSASRVQPGLLQWVKFW

SEQ ID NO: 4337 - protein, 497 aa, Homo sapiens
MKISILLMFLWGLSCALPVTRYQNNESEDSEEWKGHLAQAPTPPLANEDPSDSTQSEEGLGSDDHQYIYRLAGGFSRSTGKGGDDKDDDEDDSGDDTFGDDDSGPGPKDRQEGGNSRLGSDEDSDDTIQASEESAPQGQDSAQDTTSESRELDNEDRVDSKPEGGDSTQESESEEHWVGGGSDGESSHGDGSELDDEGMQSDDPESIRSERGNSRMNSAGMKSKESGENSEQANTQDSGGSQLLEHPSRKIFRKSRISEEDDRSELDDNNTMEEVKSDSTENSNSRDTGLSQPRRDSKGDSQEDSKENLSQEESQNVDGPSSESSQEANLSSQENSSESQEEVVSESRGDNPDPTTSYVEDQEDSDSSEEDSSHTLSHSKSESREEQADSESSESLNFSEESPESPEDENSSSQEGLQSHSSSAESQSEESHSEEDDSDSQDSSRSKEDSNSTESKSSSEEDGQLKNIEIESRKLTVDAYHNKPIGDQDDNDCQDGY

SEQ ID NO: 4338 - protein, 513 aa, Homo sapiens
MKISILLMFLWGLSCALPVTRYQNNESEDSEEWKGHLAQAPTPPLESSESSEGSKVSSEEQANEDPSDSTQSEEGLGSDDHQYIYRLAGGFSRSTGKGGDDKDDDEDDSGDDTFGDDDSGPGPKDRQEGGNSRLGSDEDSDDTIQASEESAPQGQDSAQDTTSESRELDNEDRVDSKPEGGDSTQESESEEHWVGGGSDGESSHGDGSELDDEGMQSDDPESIRSERGNSRMNSAGMKSKESGENSEQANTQDSGGSQLLEHPSRKIFRKSRISEEDDRSELDDNNTMEEVKSDSTENSNSRDTGLSQPRRDSKGDSQEDSKENLSQEESQNVDGPSSESSQEANLSSQENSSESQEEVVSESRGDNPDPTTSYVEDQEDSDSSEEDSSHTLSHSKSESREEQADSESSESLNFSEESPESPEDENSSSQEGLQSHSSSAESQSEESHSEEDDSDSQDSSRSKEDSNSTESKSSSEEDGQLKNIEIESRKLTVDAYHNKPIGDQDDNDCQDGY

SEQ ID NO: 4339 - protein, 542 aa, Homo sapiens
MELRSELPSVPGAATAAAATATGPPVASVASVAAAAAAAASLPVSVAGGLLRGPPLLLRAAEKYPRTPKCARCRNHGVVSALKGHKRYCRWKDCLCAKCTLIAERQRVMAAQVALRRQQAQEENEARELQLLYGTAEGLALAAANGIIPPRPAYEVFGSVCAADGGGPGAGAPAGTGGGAAGAGGSEAKLQKFDLFPKTLLQAGRPGSPLPPPVKPLSPDGADSGPGTSSPEVRPGSGSENGDGESFSGSPLARASKEAGGSCPGSAGPGGGGEEDSPGSASPLGSESGSEADKEEGEAAPAPGLGGGSGPRQRTPLDILTRVFPGHRRGVLELVLQGCGGDVVQAIEQVLNHHRGGLAAGLGPAAPPDKAAVGAAAAADDAWPSRVDAAAAAAAAAGGPGLPAPLQAGPAAPPHHRPLLAGAMAPGALGSLSSRSAFSPLQPNASHFGADAGAYPLGAPLGLSPLRLAYSAAAAHSRGLAFMAPYSTAGLVPTLGFRPPMDYAFSDLMRDRSAAAAAAVHKEPTYGGGLYGPMVNGAPEKQ

SEQ ID NO: 4340 - protein, 542 aa, Homo sapiens; identical to SEQ ID NO: 4339

(The sequence listing continues in the following parts.)
